United States Patent Application Publication US 2014/0057251 A1 - sequence listing, part 128

SEQ ID NO: 233702 - DNA, 1503 bp, Cannabis indica
aagaccagcaaagctagggagcggcatgctcggacactccaagcctaaaagcgatatcctagctgttgaagacatgggctctaagcaaccaaagcttatagagcccacaatctctttcaccaaagaagatgctggtcaggtcagtttcccacaaaatgacccctggtcattactgcacaaaccaggaacatgatcgtggcaagatgcatggtggatgatggagcctcctccaacattcttttcaagtcaacatatgaaaagatggggctccaactcactgacctggcaccctgcaatcaagtgatgtatggcttctttggcgaaggcattgcacctgtcaggtatatcaaattacccctcacaataggagaaaatccaaccaccagaactctgatggcgtagttcttcgtgatcaacgttccctcgaccttcaacgctatgataggctgaccaacccttaatgacctgaaggtagtcacatccatctaccacctatgcctcaaatttcaaataaggcatgggtggcatgtgtgagaggagattaacagtctgcccatcagtgttacaacttggccctatccatagccaaggaagagaagatgcctgccaagggcccagaagatgagcccaacaaagggcaatgaagtccagctcaaagctgggacatagacatagatccttgctttagggatccttcaagaagatttgggtttgtagaagagttagaagaagtggaggtttatcccactttcccaacaagaagactaaagatcagtagacctttttgcatggtcacatagatacatggtcgggagtgacccgtccgtgatgacccatgcactcaacatcgatccaagcatctgatctgtgcaacaaaagaggaggttgttggataaggagcgtgcccaagcgctcaacgatgaggtcgagaggctacgagcccatgactttataacagaggcattctatccactatggctatccaacctagtcttggtgcccaaacccaacaaaaagtggagagtatgcatcggcttcaccaacctgaacaaagaatgtcctgaagactgcttctcgcttcccaaaatggaccagcttgtagatgtaacaactggccatgaaatcctgagtttcatggatgcatattcaggttacaatcaaataaagatgcatccatcagatcaggagcacactagcttcatgacagatgtaggcatgtactgctacaaagtcatgccctttggtctgaaaaatgtaaaggccacatatcaaaggctagtgaatatgatgttcaaagatctcatcagtctcaatatggaggtgtatgtggacgacatgcttgtcaagtgcaaaacggctgggggcatgtggaggtgttaaatctcaaaatattacatatttcatggtataaaaatacaatgttaattaaattttaaataatattttcatgaaattaaagttatatattttaatattgaaaatattttattttagattaattta

SEQ ID NO: 233703 - DNA, 570 bp, Cannabis indica
aacaacaaaaacaatttcatgactaactcaaacgagacatccatagacacaaaagcagatgcatataaccttaaaacaacctattctcctcaactccatggaattttgagtaggggtgtttacttttgattgtatattgctctgactaaattgatttcagttagagcaatctacaattaaaaataggccaatcaggatttttgtcccctaaactttaatatgtaccaaatcatgcccccttaacatttatagccgttaaaaattctccctgaactattgagattattagatttaaggacttttgtctaatttcattcaattttactatcttactgattgtttatgtactaaactatactcttcaaactttgatatctaccaaatcatgcctttcgaatttttacatgtactaaatcatacctcccgaattttcatcatgttagacttattttattaaaattggacaaaaatccttaaatccaacaatctcaatagttcagaaaacatttttaacgaccttaaaattaaaggaaacatgatttagtccgtgtcaaaattcggaggtaaaaa

SEQ ID NO: 233704 - DNA, 657 bp, Cannabis indica
taaaataatttccaacagagatgtgtgaatgatcctctagttcaaccaaacatttatatcttgcaaactatttttggtcatggatcattcaaaaaataaatgttcagtcgattcattgtgatcacaacagaagaggcattcctgttaagttgcaatcttcattttgtacaacctatctctggtttttcagcttttggtgcattgcaagtcagagcatgaagctgtgctttggtgcatttaatctcctccatacctgtctaatccattgcaccttgggtcgagttagaaccaacatgttataacactgtgtcacagtgtactactgctttagtatagttctcacctacagtgtttccttgaacttatctttgagcctaactaagcatttccaatgccagatgccaaccatctcagaattgagatcattgatctaagatcaactaagtaatatttacttagaaagatattacggtaagtttatgatatcttttctatgtgaatagcggtgcaggccaatgtataacaatacatccaatacaagcttattttaccaatgccttgtaaaagacataccaccatcgaagtataagtaaaccacattggtgattatcatataagtggaaatcctatgtattgataaattgtgggactaaagtt

SEQ ID NO: 233705 - DNA, 997 bp, Cannabis indica
aaaagcatgccatgcaaaaagccaacacttggctagataaggctactcgagagagactactacaaacaagacgagagctagaaacaccctatccgaccagatgttcgaacagggacttagggggcaaacgttatcccaaattttacccacctgatatggcatgtcaacacaaaccaagacagagtacatgtggaacagagccttgccaataataagacaaggtctcattacaaggtatatatgataaaactgccaagcaacaagcgaaaggagtggagcaagtcgtcaagtaactgtaccaacatgtttggccagccaagatgagcttaaatggtcggccataatcggggcacaagttggccggccaaaaagtgactttcagaccaaaggggctttcgtttgaccaagagaacttggcctctacaagaaaaatgtgtacaaagctggcatccacttgccaaaggccaacctcttcttggtgaagctgacaggaacataacctgtcaaaccctggtaggaacatgacatgctagaccctggtaggaacatgacctgtcaaaccgtaacaggaataggacctactagatcctggcaagagcacgcatggctagccagacctcatcctgcaggtgtatatggcattggccagcttctccgtagcagaacattgatgcgcaaccttcatccgtggatagcaagccaagctacgagttgggccttgacagcccattaagatgctacaaaaaatatctacttttaaggagtaattttggtcagcttgttgatagaccctccctgatctatcaactagtcttccttggagtggatcactgatgagatcctggcctcttccattggttctctaattgaacttccttatcaggtcgttggcttctttgttacaatgatccaactttgtctagtgagatcaaaagatgtactcttggtcatccatccatcttaggaatttgcatctctgctgagcgaatacatcgca

SEQ ID NO: 233706 - DNA, 1240 bp, Cannabis indica
tgatcggctgaactgagaaaaaaaggactggaaatgtcctcatgagccaatcgatcaagaggtgaacgcctccttggttgagatgaatcagctggtggaactggagatgaatgaacaggttcttggttgtcttcctcaggttgagatctggatcgagagcttggaatgcgatttggagccatggtgttgttggctactggtgcggaagtagaatcggggggaagatccgattggtggagttcagaggcaggtggatgagtaccatcctgcgatcgtgtggagggcctcgccatggaagagtggccaaggttgtctactgataccatatgaggaacagagctagagagaaggaaagagagaaaatcagagaaaagtaaaagcactgttttattgataatgctctgttgtttttacacagtacaaaacaggggtttttatatagcagtaggaaacctagctgcattagtttaggaaataatagaagcctcagtaattagttgtaacaatataactaatcaagattaagctctaactaactaacagacaccctaattctgataatgtgtctatgtgaataagaatattttttcttattttttttattataaaacaaataaaatacactaactcaatatattactaaaaaatattaagaaattagaagtttgtgcctttttttttaatattactagaaagttaatatatattgtatattataattttttaaaaatatatataattaagtgagaattggataagattggttactttttgaggtcaaacaacatccaatccgcattagatttttcaatccaatccaatctgcacaagtgcggatatccgcattttacggattggattagattggattggatacttagtgaattcccctaaatataagtgtactatacatacccaattattttttttgtttgtaaaaaaaaatctttatacttggcacctccttaaagtggtgccaagttccgtcactggcgctaggaaaaccttattatgtggcagctacaagcgccttttaattttctaacgccaaaatgcgctggcaaaaatccatctttagcaaaagtatcttttgatagatagatttttgaattttgtcatgcgcagtaatgcgcctattttcactacaaaaaagtttacttttagttataacgaaatttgtgactaaaagtaaaaaaattgtgacaaattataaaatataattcctatgttgtgactaaaa

SEQ ID NO: 233707 - DNA, 1438 bp, Cannabis indica
attcttctggttatcagattgtgcttagtttttttaaaaaaaaatacttgttctttagatctagattttacttttgaatctttgtgactttatcttttctcacttttgcccttacaatccatcaccacttttaaaaaattttgactcactcctttgattcagctctttcgaattcaaggttgattgcacatcatcgattgtgatcgattctcttctatacaacattgtatctttaaagtgtacataaaactttggtaaagaactgagcaaccacaaggctagatctttgtcttcaatagtgacaccaatattttcaagatcgagaatcaacttgttaaactcatcaatttgttctccaacagatttgtcttctgtcatcttaaatgaatacagggcatgtttcaaatataatctattcactaatgatttagccatatacaaactttcaagttttagccacacacctgcgattgcatcttctttagcaacctttctcataatcttatttctaagattcaaaatgatcacactatgagcctttgtaggagtctttttcttgtctttttcagatattaaatcaagaagaggcttcgtattttgcagcaaccatgattacaaaccaagctttgataccaatttattgtgcaaaacagaaataatcaatgacttatgatttagtttacagtatcaagaaacacgcaacacaatcaagaaataatataccaagacatttcaagattcaagtaatgaattaagcaataaaccagaaaagaataacaccaggtttaacgagttcgagccatgtacaatgctttgcatctcgatcggaacaacaacaaccatatctttattgatattagtgtttataaggttacaagaatcctcataaactctcagagattacgagaacaagtttatctctctagtttagactctctctcttaaccttacattatcacgattttcaatcaaacaaatctggtctaattctcacataggttataaaaatttacaactatttatagatttgcattattgcctaaaatatctcctaaatcaccgtgacacatttacaccaccttaaatgatctagctcatcactagcaataataatccacgttaacttaaaaaacacactttcaattcgaacaatctggaagctttataaaacaagcctttcggatacgtacatagcttccttcccggatagatcttcaagactgacaataagttgtctgggaatgtatttccggattaataacaagctatccaagagagacattccatacacggtacaagcttatctagaagtaccttccaaattccataagaccttctgcacagtgcttttcggattcacactaagcttccgatatcgctctttcggattaacgacttctatcttagatgacaaaacttataaccataaccaacaaat

SEQ ID NO: 233708 - DNA, 876 bp, Cannabis indica
actcacgtgctaaccactgtcttacctattgtccttcaaatgcaaacattctgaatccacgggtgctcgtgaccaggtgccagtaatcctagtcacataatctgggattttcacacatagggttaaccccggattccatactcataaaatatattcatggcatttaaagttcagataattacacagagctcggaacgagcattccaacgatataaagaactcctaaatcggagttcggaatcaaaagatatgaaatttcaaagttcgaactcaaaactgcccaaaaattttaaggcgggccgcggcatgcccaagccatgccgcggcacctgggaccaattcccaggttccaccaacaggggcgggccgtggcatgctcagaccatgccgcagcacctgggttccaaacccagaaatcagccatgaacaacacgaatttcagcaaccaaaacactttaaattcatcccaaaacttgatcaaactctcaaattaccaaataaagttgctagcaaacattagagagttaaaatgtacaaatcatacactaaattccaacatattacccccaatttcagattgcataatcaactcaaaaaccaagcttcttcaacaagaactcaagctcaaaacttgagctttacattccaacaaacccaaatagttcagcagcaaaaataccaagaaatactaggtttcaagcataagaatcaacctagaattttatccataactcaataataaaatcaccacaaaataaaggaattaacacccaaaattaacaaagccaagcatcaattcccatagcatgcaactcaagaatatactaactcaaacatgcttttaccacaattaaaattcaacaaaaacttcaatca

SEQ ID NO: 233709 - DNA, 1809 bp, Cannabis indica
aggtcgagaaagatttaatcagtgagtaagtcattcatctttttcttttagatgattgcaatgaaatgtatgaattatttccgaattctttgctatagattttgcttgttcttgaacttttcttggttaattgtagaataattagttctagggtttggaaatttaactaatgtttaactataacgtctagttatttcattgcatttcgattttgaccttaaatcattcattcacattcgttcataatgttctgaaaaataccaggttccaactgaagttttgaacttctgggattggaaattctaactctgggtgaaatcttttctttcgattttgatcaagcctagtcgacatgtaaaatcttttttcattcgttactccgaccaactcttattctcttgtctcctaccttttgtagatgaaccctggtgatttctagggaggcaagcatcatattcaccaggacttgctccaacttctatacaaagatcacccctacctccgcgctaatccatcctcgtctagtgacgatcttttgaattctagttttgaagattgggaagtgagcagtgaacatacaccttccccggagctcgaggtgcaacatcacttgtatcccgaccaaactacatagcgaagaatacgaccgtttcatctgagaactaagaaggttggaggcacatctcctgtgaactagacgtacaaggtccatccgagcatggtcgacactctgctcgagggctatccaatcccaactgctgaaggaaactctattgttgagtttgttgtaactgttgcaaagcaaacctctgaaagatctctaccaagtcataaaatgatagcacagaccaagcaggctatcagaaagccttcatttgctaaccctcatattgctcgactggctaccctggccagggcagaacaggcctgacctaaggtcaaggaggaggagattgcaggagatgttgaagttcaggagatggaggaccagggcgaggtccgtcttgcaactactgctgaggctgaatgcaaagaggaagagagagtagctcgggtgctgccatttggtggtttcaacgagaagggggaacctgtctttgagacgggcgaagtcttggaagctggttgggactatgttgaggaggaatatactgaggctcatcccataaacagaaggggtccaaagggagctcgatcgatttctccaccattcattctaactttcaatagattgaccaatctcttttaggatagtctacgagggcaggtcgaatgcttccttccctctcctaggtagctggcaacggaccctggagagggttattgtgcttggtcgggtcctcatgccacccagggtgcaatgctgcctttgcatccgtatttcaaggagatagctaattaatacaatatcagtctgatctaactcacccctaaggacattaaatacttgtttgccctgtttctgttgtacgcctctcaaggatggggtcagtcatccgcccatgatactaactagctatttgacctgaagtccagtcccaagaaaaataggtctagatatttctacttttctcaaatcgaggagaggtggctgactgataccatagatactgaggtgaccaaaattagtggctatgtggaggactattacttcgtcaagggcatgaacaccaagcacaccagttttcaacacattcctccttattgtcgacctctgttcactctgggactcagagagatggctcaagagattctccaacctcccttagatgatcagaatatttctctcttggccactgaggccaattt

SEQ ID NO: 233710 - DNA, 1002 bp, Cannabis indica
agaatgtttggtttagtgtctttccatatcatttgtatttctagtttgtagttttgttttggtatgttcaattttgaaaccactaatgaaaggtgtcaccaaaatattttgaaatattgttccttgtcaagagaactttcattagatattggctcctttattataatcaattcaacataatattggctccttcaacctaaaaattccgttgtcaaccatttaataataataaaagaaaaaacaaagaaactatttgagtaaacccattaattaaataatgaaaaatgtgaaacatgcttagctttattatgtataacactacacataaaactaattataaatactcgggaccattatttgtctcataattaaattcttccatgtgatacacgtgttccaatttaatttttttaaaaaataaattatgtaattttatcaacaacaattaactaaaataatagcatacaattagattggaacatctttcctgatagaaacacgatcatgattagaattagaaaaacgagccaaataatcaaacgtctaattcatagacaagaaaaataaaaataaaatcagatgaaaaaggttgcagcatcacagttaagcttaagaacagttatattcagtttcatctactgctcataaaatacactaatagaaacaactgcagcaagttcattcaatcttgtagcttaagccctcaactattgtacaaggtacgtaactgcactactaccaactccttcagtcgcagagaacttgttattcccaaccaataacattgaaattatggcgagtcatcgaaaaataaagaagaactaataacgaaacaaaagaaaacaaaaacatatcaacaaacaagactaaaacagacaaaaccatattacagagataagacaaaacacaaccttgaccaaaccacaactatgcctaggcacaccggaaaaaaaaaaaagaacaacttcctgtaactgtaagatttaattaatcgtaaatatc

SEQ ID NO: 233711 - DNA, 850 bp, Cannabis indica
attttatcacgtacaagatctacttatctgatcagggacaaggggtcgagcaggcagtaggagagcctatgccagcctaggaaggaggagttacatctgaacaggacgctccaagcaataagaagaagaggagggttcctcaaggtgaccaagtacctattgagcgggctattaggatcagagacaatcctgagaaggttgctcaatcttccgcctaggtggaaggaaagggaaaggccattgtggtcaagcaagaggaagaggactcttctaatgaagatgccccttctttacttgtttgagaaggtgcccctgttcatgtgtaggatactttattttgttcttaacctcatttacacttgtttaattcatgcttgttctgacatccttgttttactcatgtgcagctttatctcagaggatgttgtgtgcattgaagaagaggtctggtgatgcctccggctagaaagtctccagcgaagctctctaaggtggacgatatgccacccaagagcatcatccccaacaccaagactcctcagctgattgttgagaagagcttggttatccctccaactgaggtttacgaggaagcagtatcaaatgtacccatcggccaagaagaactcaaaatctcagtctatggttgccccgtccaaaggttcaaagggaggaagcactgatgggcctggactacccaagcctttagcaactcctactatcctgaacctagagactaagaaggggaaggagatgcttcagttctaatagattgagtgcttccgaagtgaacgccagctggccggaggggagggatatggtttgtgggagtcgttctcgatggggcagg

SEQ ID NO: 233712 - DNA, 1131 bp, Cannabis indica
tataaagaacatccaaaatggagcttatagtcaaaagttatggccaaaacatgtttacaaaaatccaggatcgacagggcattaacaccgcaagggcgccccttataggggtaaaatcccccgtaatctgagcttatgaggactgcgcggtgtccatgcatagggttgcaatgcctaggttgaaaacacttaaaaattgccaaattttcataccaattcaaaaccatactaatacctactacaaagatggcacacaagcctcaaaatcaagcgtaaataggttcaaacattccaaatatacacatgcacaacttacacataacctaagctcaaaacttttcaaaacatgttattcaaattcaacgagaaaaccaagcccaacttcatgctcaaattcaccaaaatgaccatagaaaaacaacccaaacttccaaccctaactcaactcataactcaaattttcacaacaagaaatttatttccatccatggtgttatccaatttcttgcacaatgatgtggcagaatactcaagtgacacgtgtcctgtatttcttgtatctaggcagaggtgaatgtttagaacagactctatattgtacgtcagcatgtataacctttgattacctaagcaggatgaaagatagatcatctgagcaagtataagtctagcttgccgaactacttccaaagagttaatcacttcagagtaatcttgcgttgccaagacacgaagggaatcctgacaatcgtgggattgaatcagagaaatatagcaacattttctagtttcctattttgtgtatcataattatgtaataaatgtaattttttattttatacagtgtaagcaaaagggaaaccttccctcatgcattaaggccctataaatagttacttagcctcactgtgaaagggatcgaaagaattgcttcagagagagagatctaagagaattactcagagattcattgttagaactttcaaagagaaaaacactttgttctttctctctagttaatacaattcaagaagtgtaggctattaccacactcacggagccgaaccttgttaaagtctggtgttctttattactttgttttttttactctattttaattacattcttaat

SEQ ID NO: 233713 - DNA, 1368 bp, Cannabis indica
ggtgagcacattagaggaagacatgcgtcgagctgggaagaatgaaggactcaaacacgcaattataagtacacttggcatggaacaacttgttagaaacacaattcccagagtatgtttataactcggctggctgaatagtcttctgcgagacagaaacgtacgaactgctaactcgtgtatcgacgagaaaccatgcgattgcaagtgtgcatgatgaggcctcaacctcgctgcgtgaaagagaaatgataacgataaaaacacttagtgtatattccatgatgtacaaactaagtgtaaacagtttggtgaatcaagatggcagacagcgaggcatctatctcgctggaagatggcacgcatgcgagaaagatcatctcgacaccagaaaatatagttatcagaattaaagtaattttgggaagtcatatgacgagccacagctcgccatcaaagttaactcgacaccattcctagcgaggcattcctatgagttgaggtttaccacaaatcaataaatatgcattcatctctgcccaataaaagcgggatacttacagttgtgtgaattataaataaaacctcatttactcagcttgatttgtaatcgaatctcgtgatttgagggaataattgttgtaacgattacagtcaacttttgtaatttactgcccactatgtaattataaatagtggcagacaatatcaaaagggacgatgaaaaaatctcatacaagagaagccctaaaaaaaattaaaaatctgaataagattgacttgtggactatgcagaattttaactacaaaacgacgtaaaaaaaccctgtgttcatttctatttttctatagctttttattctttctgtgtgaaatcactatcgtgagccttaaattcagttaacaaaaatctgcgttaacaacaagtaacacaagtcagttaagagatgagttgtgtaagagtgacaactctttcctaaacgcatagctctataactaactttataacagaaaactaacctactaactaccttcactaataattaataattgacaacaacctggttaaactaatattatatagcattagcaaaatgcttgaatttttattaatcaatatcaaatatatatatataatactaataaaccttgccctttatttttataaaacttttaaaactaatacaggtatataatgcattgatcaaataaccttaaataatatttaattgataacgatttcaacactaataatattatccttttactctcgtaattggttattgttgttattattactatgtttgttactatttttgaggattaataaaatatatgttataaaaaattattataaatctcatatta

SEQ ID NO: 233714 - DNA, 1486 bp, Cannabis indica
aagataaaccaaagtcattaatcacatagtggccagttgccacactaaaaaccagccacctcacccaggacaaaatgacaaaaatacccttctcaaaaagctagactatgggcagctacgatggtgtgcatgccttgtactatggcttaacgtgggggacaaaacctgtcgttgtaccagaaagagcatggtcgtcacttctgtaatcttacaggtacgaacagggctcgcctgccacatcatacgggggattcaactcattctaagtcctttcgctactcgcttaggcgtactcgaggaagcccctagcctccgtagggcgcttcgcttccgctcccgggaataggagatgccatgcatgctaatcctctacgtgttctcgccttgcgatggagatatccttcgcggaagccccacgcaagagctggggactaaggcattgactagttgatgactatctcgactttcacaattagattccacttgtcaaacttacaaaaatgtggtcaataattatcaattactatagaaaaatggttatctctactatataatttaattacatttgaaatatattataaataaataaatctaatatataaataatatattaattgagctaaaaaatataattggataaaatattaatcaatcactcttgaaaaaaaattaaaattaataatgtgttacatcaaagtaaatagaaataattttttgttcgactatatggcaacacaaaatattttgggactttttcacttttacactttaaaacaaatttttttatttttttacggaattctacatagaaacccctattgcaaccaacactgcaacctaatttgcaacaaaaaaatcgtatagaaacccatattgcaactagcgctggaaccactttagaaacccaacctgtaaatttgaaaaaaaaattaaaaaaataatatatgaggtaatttctcaaatatttttaaacaagatgtgaattttaactaattttaactaagttaataaaaaatatacgattgatgtgtttttgttctattttcatggaatagcatttaagttgtcttgatactatttagaggataggaccataacgatttggtggtaaacacattttttaatgttaggaatctatcatcatcatcatattatatatatttcatatgattcctcatcttcttgcaaagccttgatgtcccaattgaatgctctgccattgtggcctctcaattctaagatactgaatttcttttcaaaatatataaatgcatatagagggcccactaaaattccagaatctctttctcaacttcttatttaattattgttaagataatctatttgaaatgtgtcctctgagttagtgtgaaacattaatccgtcctatatttgtttatgaaatgtcattgtcatcttgtgagcgtgccggagtggttatcgggcatgactagaaatcatgtgggctttgcccgcgcaggttcga

SEQ ID NO: 233715 - DNA, 814 bp, Cannabis indica
aggtaaatttgattaattgatgaataaaagagacatttttcaacttaccccttattttatttggggatttttacaaaaatactaaattttaggcgaaaatttatactactacacgaaattttttacaaaaatactatctttttataaaacaatcgtaaaacaaggaaacagaataattaatttaacagtgaaacaactaaaaaataatcgtagaacaatagtaaaaacttaacacagtattattattgaaaaaaattctggcccagtcccatagtcaaaaaggaaaaaagttgaaaatttcagtatgtcgtgtaaaaatcccatttatattttagaatacacttgttattaaaatttccacaacacacatatttaaattacaacaaaattgcacaataatttgatgtttttgatgccttttatggattttgtactttttgcggcttttatgccttttacggctattgtgccatttattatggcttgtcattaattttttaaggtaattttgtggtttgttcattgggcaagtgaagtgatccagtttgtgctcaagacttctacttcaacgactttttagttttgacagataagtattccaagtcttgacatttgattatggattgttttatattatattatagattgctttgtcatcgttctttcacattatttattttttatttaattttgttgaaatatagttttatttattattatttaatttgttgcttgattttgtggagggcctacaattattaagactttgccgatcgataagtttaattttgatataatcaaaatcacacgtgtt

SEQ ID NO: 233716 - DNA, 1233 bp, Cannabis indica
ttatagtcatgtaaaataaccaaaattgataaaactttttctattgttattattggaagaaaagaattagagggagattattttttgtttcatttttatttaaataacaaaatttagtgcttgcttgttggtaacaattagataattacttttttattaatttagttaattaagaactaaaaagaaactaaaatttttgttaagtgaaattagaaaaaacaaaaagtaaaaaggtacaggagtttagttattaaaaaaaaaaacatcacgacattataaaaaggacaattaaaagcttcaaatataaaaatatttaaatttttatatataaaaaaatagtttaaatattttagaaggtcctaaccttttatagtatttctccatcgttatttggtcattttattatctgaccaacatcaaagtaaactaactaacaaataagcacataattaataataatctatcatttagtgttaagttgataacatgataccacttgatcttggttgggtttttagatgagcattaaatatttaggcaaaaagattgtgttgggtatagttgccaacttgccttaattttgtgtttagttagatttgtgtatatataacatttttaatgggtattactcatagttattacataaatttaactgtaaatattaattttaaaaatattaaaccattaaattttgatccaattacaaataataaaggagaaaattaaatttctatacttaatttgttatttaattaaaaaaaaattaccccatatactattttttgatttttttttttaaaaaaataatacactttggattgctccagtagttactctgatggtttctttatggattttggttataatttaggttgctcctttagttactatgtagattgctatgtgaatttctgtaaaaaaatgtaaaaaaaaaaaaatgcaaaaaaaaactattttgaagtataaaaataaaaaaatccctaagagtatatcaaaaaaatatctacttaatttgtcgctatatcaaaatatgttcatatataaaaatatttaaatcaaactcaacttttttttttttatttttttttctagtctatggaacaacctcaacctgcaatatgatgtgaaagtaagagatttttctaattagatagaaaaattaagtataaaactcaattttttctaattttacctattcatagataatactcattaaaagtatatagagtattt

SEQ ID NO: 233717 - DNA, 1001 bp, Cannabis indica
aattttactaatttgacatatattaaattgtgccatctgactattttgttagtgatattggacaaaaatctttgaattcaacaatcttaataagtttgtaaaatttttaacaactttcagatgcacaatttaatacataacaatttgtaatatgtatggtttatgggaattattttagcaggtcaaactttatatgtactaaattatgctttcgaactttttaagacgttaaaaatcttccaaattattgaaatagtttgattcaaagactttttccaatacaattttactaatatgttgattgttcgtatatcaaattgtaccctttatatgttctgttagtaatattggacgaaagccaataatttgaagagatttgtaaggatgttcagagacacaatttgttacataacaatttgtaatataaattcatggttatggggaattattttagcaggttgaacagcctgcttttgcagtaacaggagttaataatgagcaagaactttcatgggttctaatacaacttggagttgttggctttttctacttcctagttatgccagtaagtcaatttattataacttaaaaacatttctctttcaatgaattatataacaaatatttgtgttgtttttactgtatagccagtaattatgaactggcttaggttaagattctacaaaagaaaactcttggagacttatttacagttcatgtttgttttcatcttctttcctgggtaagtagaaacttaacacatttgaggttaatctaaacttaaagtattcacttcataaatgttatgattgagattttttttggttttttttttctagtatgattctctgggcaccatttttgaacttcagaaagtttccacgtgatccatcaatgaagtatccttggtctaagccttctgatccttcaaagattagaagccaatactacaaatacccatatgctgaaactgatgattatttatgatcagtaaatctaat

SEQ ID NO: 233718 - DNA, 1173 bp, Cannabis indica
ttatatgtatattttaatttaataattagtattaaaaataaattattagttatttgtaagacgtcacctgacagtagtgcattataaaaaatctttcttttagtcacaatgaaaattgtaactaaaaataaaagagttgtaactaattataaatcatcattcttatgttgtgactaaaatgttcgtgactaaaaaatattaataacaaaaatcacaatttattattactaaatatatttttagtcacaatacttattgtgactaaaactaaagtagtgataacctgcatttaaatattatgttaaaagtgatcatatttagtaataaaaaatttatgttgtgactaaaaaattgtcattaaaagtacttaatttttttaatggtattagacattattagtacgtatgtaacactctaattaatgctaatcgcaatagcttaggtcatctttaagaactcccatgcattttacaaagacccaattgaaagtattacttaacactcaagtttaaactaaactactaattcaacaaactaaaaaacaataattaaacctaaagggtcattatccaagaataatattgtattatgaaattaattgataggtttattgtgatgtattggcacacgtggattctttggtagggctgcatgagtagttgagaaaatattaataccttcattatttatgtatttattatttttacaatttataaaaataaaattaatttattagaaaggttaagcttaaagtttttgaaacttccaagtaagcttcatatatatggtatgtcccacaagttgactagaatcatttgtatcccaaaattgggttttgatgggttaataacaacagaatcactatataattaatactctaattaagtttgtccacatcaatgaataaaagataaaattattaataataataaatcaatcactagaggttgttaatacttaaatttttataaatatatattttgtttgtctctagcatattaattttctttaaacctacctaaattaattgaattaagcttacaaaagaaaatttcccaaagcaacataatacatatatatatatccaaaattaataaaaaattaacttgatattgagcttatgatatcaattgtacctaattaacaaatattattcctgtagaaaataatata

SEQ ID NO: 233719 - DNA, 727 bp, Cannabis indica
gggcataaaacccaacaacttttccccacagtatttaagttccaaatcatccattgttacccaaactgggaccctaataacatcctcctttttgaaatccacatttggatcccaagctttcataatgactggtcgtttgttgaagaatatgtagccaccatttagaaccgaatctctatcttcaacatcatgaaaccttatcaagaaaataccaaaggaaagaaagcctaccttatcgattttatccttcaagagttgcctcgcaactccatccagaacattcaaaggaggaatggctccaagaatgtagcatacaagagatgaattccagaatgagatctcctctttaatgtcatctagagtaatcttgatctgactttgtttgttcgagtgctcaaatgatacagacaggatcctaaccacactcccagaatgcaggactgcaggtgtattatggataccttttgaaacctctttcgaacaatccatatttacttccaggaagaagttaacatctcgttttacttcttcatgttgcagtatcacattcagggaaaacctaggtgagagaggttcttgaaagcaatcatgcaagttagaattaagcatcggagcatttgttaattgatcctcttcttcatcagaaaattccattggttccactccaaatacttcgtccattgacttagttttcttcgcatcaactgaggaatcaggacctcttttg

SEQ ID NO: 233720 - DNA, 455 bp, Cannabis indica
atatatatatattcattcactcactatatgtttatgtttatttaatattgttttttcaacattttttcaacttgctcacttatatattgtaattgatatattatgtaacttatatgtatataatattttttattatttacttctcttatttgttttgtaattgaataatattaatattcaaaattagaataattacatttgggtataaatgtgcaccatatgaggatgtcttttcaactttctcatttattataaattgtaactgatatactacaatatttatatgtaacttatgtgtatagaatatttttcattatttactcctcttatttgtcttgtaactgaataatattaatattcaaaatcataacaattacatttggggtataaatttgaaccatatgaaaatactcttctgtttaataataataatttttcatatgtcaatgaaaaga

SEQ ID NO: 233721 - DNA, 809 bp, Cannabis indica
attcagccagccgagttataaacgtactctgcaaattgtgtttcgaacgagttgttccatgccaagtgtacttacgattgtgtgtttgagttcttcgttcttcctagctcgacacgtttcttcctatgatgtgctcaccgaattttgggtataacaattgccgcttaaaaagttatttttttaaaagagctttttaatgattataaagggtattttcgtcatgttcctctttttgaaaagacgcatgtcctttgattttggcggttgtgcagttttgaggtacatcatacttaaaagaccatcttttccacttctgctttaaataatgtccgtaggatcaaatgattctctgatctaactaagccattatcatgggtataaagtaagagaaaaggaacagcctttgcattattttctccattttaaaaagtctaaaaaaactcttaaccttctttgtcaaggatcacgaacaagtttgtgcaagggcttgcatgccatctctgcccttgaactttttcctgcgagtttcctgcccttgaactttttgctttgttcgaagatttgcagacggagtaacaagtcattgccccaagccataactttaaactgtaagttgcattcttctttctcatgtttgttacattgtgtggatttgttacttagtttgtttgtatcgttgtcatctcatcgggttttggtagtttttaggatttaaacggtatctaggttcatactagggttcaggcagtatgtaggttattttaagatgtctaactcattaccttccggtttgataaaattctctccag

SEQ ID NO: 233722 - DNA, 567 bp, Cannabis indica
atttgatgtttgctaatgatacttttctaatatttgcccgtgctaacgaaaaaagaagctatggaaataatcaaatgtttgtctttgtatgaagtttggtcatgtcaaacttgcagcgaagataaatctttagtcctctttcacaggaaacttggactcgaacaaaaaggctcttattctcaatcggttttgtatggctattcacaatacaaagctgtgtttaggcacattatccacaatctcgttattggtgtatttcaatattgggtctcacaaattttgatttagtgactaacatgagaaactgctaaccaactattatttgtataatattattgggcataaataataatgttcaataataaaaaataattcactaaaaaaatattgtactaaaaattatacataaaaaaattattcataagaaaaaaaaattaagatcattaagaaaaaacccctcccaaattattgtaaaaaaaattatcattcatgacaaaatacatggttacataccgttattgtaaccaacgtacccaaattatcgtaaaaaaattatagaaaaaaaaa

SEQ ID NO: 233723 - DNA, 1022 bp, Cannabis indica
ttcaactataaatgtgtggaaggttttaagagccgtggattcatttttaagcaagtaaatccatgtaaatctactgaaggcatttaaaaaaattgatataatatttgtagccattgtatgacatggtgtgggagggaccccataagtcagacacaatgagttgcaaaggttttgaataaactatattggaaaagtttggaactggcaacttatgaatcttgcctacacaacatgcttggaaaataatagttgatgatttattacagggaatattataagatttcaaaacaaatgaaatgaccttattggaaggattgccaagtctgttatgccattactcaaagtctgaaacaagagacttagtacagtgagggaatgacattgagcttgattttgatgtatctgaatcactagtgacaataaagacagactttaggcttgaggatttaacatcttggctaagagatgattgggaatgggtaacatcttgaactgacctggatcaaaagtatataggccattgtggagagtcccagtcagaagagtgtctctagtaacatggtccttaacataacaaacatcaacatgaaattcaaagaagacattattgtcaagagaaaatttggagacacttaatagattcttagtaatctcaggaacatgaagtagattattgagagataaaggtttggcagagttattcgatgcaacaagagtttgaccatagtgtttgattgacaaacatgtgccattacccacatatatttgatctgaaccattttaatcggcagtactcatcaagttttgcatgtgtggtgtacaatgatttgtggaaccagaatcagaataccaactgccatcatcagcaagagtgttctgagccaaattagcttgcattgaaagagaatctgcaggcgaaatagctcccgtgaagctcttgtcaaatcgataaaaacaatcgatgatagtgtgaccaagcttgtaacaaagctggcactaaggtctattatgatgttgaggca

SEQ ID NO: 233724 - DNA, 1397 bp, Cannabis indica
gcccctacaactcaaccaagaccaacaagacacttacctattttgtaatctcaataggtagtctctctcttgcttagacaagtttttcctgtttacaagttgtaatctgtacttaacagaattttttacatcatcaactaaactaccaacagaactagaataattgctgaaaatacatctattcctcttgagcaaaatattatagattatagccgccaaaacagtaatgttgagtcgatgtagcctagctcgacttgtcaaaattacccaatcataccatccattgtaatctgtcggccaagccctgaatcccatccatgaaaaagttgtatctaggactttttgagacaacacacatctaaagaagagatgttcatgggattcctccttatcctcacaaaacagacaaaggttcgaattaagcactatatgaaaccgagataatttatctgtggtaagaaggtgagagttcatcacttgccgaagaaagaatctatgtttaggcacagttagagagctccaaactgccttgtgataattgactggactttgattcaaacttttgttatacaaccaattagttctaaatccaccgaaggccccagctttcacaatctcattctgattaaacttttgtctaaagtgacaaagtttacgccaataccagctcgaatcttactttagattataagaccaaaagtaagaagacttcaggtaaatgttattaacccacttgacacaaagcatatcttttttggtagtgatagcccaaacatatttcgcaaggattgcttggttccacctgataccgtctttgaacccaagccccccataagtcttcggaaggcaaactttatcccaagatgctaagtggatcttgttcatgttgccatttaatccccagagaaaacctctacacaacttttctacctccttggtgatactatgaggaagaacaaaaatactcatccaataattctgaagcccaagtaacacagaatgaatcaattgagcttttccagcaaaagacagatgtctactcgaccaagtatggagtctttgttttatctttttgattatgaacccacaatcctcagccttccattttgttggtctaagaggaacacccaggtactttaaggggaaagtgccatcaactagctgtaaatctctaagaatatcttggatatcaacattactcatgcctccaaaatagacttgagatttgctagcattgatatgtaatccagacacctgactaaattcatcgagtacctcaatatcagaaaagagggagtagaacccttactaaacagaatcaagtcatcagcaaaatagagatttataattttcaactccttacacatcggatggaacctataggctgagttattagc

SEQ ID NO: 233725 - DNA, 1239 bp, Cannabis indica
ttccgaccagttcaacaaaagcgaagaatgttggataaggagggagctctagccctgaaggaagaagtagaaagctatgcaataataatttcataattgaagctttctgcccgacttgggttacgaatcccgtactggtacccaagccaaacaagaaatggcaagtttatattgatttcaccgacctcaataaggcatgccccaaagactgttttccactccgaaaaatctattgtggacgcaatagccaggcacgaaatattgagcttcatggacgcctattcggggtacaatcaaatcaaaatgcatccaccagaccaagaacatacaagtttccgaacagatatgggtttgtattgctataaagtcatgccatttggtctgaaaaatgctggagctacataccaaagattggtaaataagatgtttaaagaccagattggaagaaacatggaagtgtacgtggataacatgctcgtcaaatccaggatggctggggggcacatagatcacctggacgaatgcttcaaaatcctcaggaaatataacatgaaactcaatcccttaaagtgctcctttggagttagctcgggtaagtttctaggctttattgttaacgcccgaggaattgaagccaattcgaagaaaattcaagccctcctggatatgaaatcaccaacaagaaccaaggaagtttaaagcgtgagtggctgattgccgcactcagcagatctatttcaaaatcaacagacaagtgtgttccattcttcaacatcacgcgaggaaacaagcaatttgagtggacaaaggaatgtgaaaaggctttacaagagctaaaaacccaactcgcaaaacctccagtactatcgaaacctctggacgaagaagaacttgggatatacttggctgtcatggagcatgctgtaagtgccgtactaattagagaggaaaacaacatacaacatccagtctattacattagtaaaagagtcattgaggtcgaaggtcgatacccattgatagagaaactcacttacagcctgattctagcaacaagaaagttaaggccttattttcaagctcatcctgttcaggtatacactgacaacccgttataccaaatattgcaaaaaccagatgcttctggacggttgctcaaatgggcagtggagttggtctaatacgagattctcttccgaccccgaacaataattaagggccaggccttagcagactttg

SEQ ID NO: 233726 - DNA, 2283 bp, Cannabis indica
atgtaggatctatattttttttccttaaaaataaatttggtatcacgtagatcatttctctaaggcataaatacttagttacaccaccacttaccattttttcccactttttcaaatttctcaaattaaatccaaagttttagaaagcaaaagtcagtgaagatttctttagtgaatgaaagaattcttcgacgaagccatcagactcctttttcaagttagaaggagagattagttggacgctccactaccccttccaataacttgtgaaccccaaggtaatttttaacgatggatttaaacttggaaatttattctttaatttatcacgtcagtgctattcaagaaaggctagcttgattgtcttgagcgtctgtctttatcagagtttagcttgacatcgtcattcgacgttagtgtttgttctccaagaccttatttttcttcaaatccacaaccgtcacccagttcattgccaggtgaatttcatttttttttaaattcttgaatcttaagaagtgcttgaaattagtatttcgtttagggactgcatgtgctttatctcttgtttgaagaataaaacttaggcttgtgactggattctgactgtttcgtagaaataagatattttgggtactactttgagcaggtttagtatctactgaaaactagatttttcattctcagtttcaagaataatccgccttccagtagaaatgctggccaaatttttatttctctatctgaaagcctagaagtcttacctctgaagagcaggctcctctagatttggaaggcttccagccttccgaaagacgtaataagcgaagacctctggatgagcagtggatgcacccagaggggaattccaagagtcacatctggaagccctttgagggttgacatggctggactctaacacctagttacaccgtcacatattatgtctcctatgttagaacatgatagtgtgcgcaccaccgcaagaaatacatctcttttgtcccactacacctatctaatatttttttctattgtagtagtgcccgtgcctgacacctgtctgaaattgtgcgggccccatccgtaaggaacttctgccccactagccaaaatcctgcaatgggccttaaagtcatgtattttattattttccccaatagtgggcctagtttgcacagtaaccctagcgggtcacgcttatgcccagatcctgattctagcctataaatacctcattataccttcatgcaaggagaaaaattcacttcacaaattttagggtttttctcctctaagctagaaaaccccaagtgaggaaagatagctaaagattagggttctttaacttgtaaactcacttgtaatacatcaagttgattggctaatacattaactcgtaaactatgtttcattaacacccgaaccatgtaaaaatttctatctctattacttaattaatttcttaagctcttctttaatttaacttttgaaaattttcttaaacagtattgtgtcgtgtcaattcgtaacatcatgttatgtcgtgcttaaatctatatttttttgtgcttagttgtgtttgtacctcttacgatcgtgctaattattttgtgcccatcaaaaaatttgatctaaatttacaacactaatcactactggtataattgatatcacgacttgcttatattattttcataatagtcataaaaaaatattaacaatttataaagtttgattggcatggtaatttttaacagtaacaagttgacatgtacatacatgtgatctgatgtgaagtttgtctcactacaagaaaaagcttcaataccagtgaaattaataccgccggagccaaccgtcggtatttgatgggattattaccgacagaaaaggtaatcctccggtattacattttaaaaattttaaaaaaattaataaataatattaatatcggcgaatttagagtattactggcggaaaatccgcctctaatactttgggcgggattttgactgcccaaaatttgaaatgactaataccggcggattattagaggcgggttctaccagtattagtcaaggattctgaccatttttttattaccggcggaaccctattaatactagcgggtcctgccggtaataaaacactataaaacacccaactctaactcagaaaacattttccattttcccccacaaaatcccccccgaccctcctcctcctccttcgcccatttcctccgaccctcctcctcctccgcccatttctcttgtcctc

SEQ ID NO: 233727 - DNA, 928 bp, Cannabis indica
tttacaacctttctggatcgtggaaagctgagatttgatttggagaatgcgagctttcgattgactggcatatctctgttcaagagctcgccaagctgagtacgaactttgaaattgtgtcagagagccaagaatagattctgtcatggacgatcgaagccaactgagaagaagctgatcttttctcttccaagttttgaactccggattgggttgcccagagaccagcagttctagtgaagaaacacctccaagaagaatatcatcgtgtccatggccaatcacggtggggatgacttgagatttctaagccagaaagttggagcgatccaatttgacagtaagggatgagtggagggagttttggaacggattccatggaggattggtcggagcaggggcggcggtgggttgtgtttgaactgtggagcgtggtgggtttttagggtgacgaggaaccattgaagacggtggtcaggagctatctgataccatgaaagagcttatctatgcagtaagatctaatagaattcaatctataagattgcaattcaagattatgcaaaagttgaattattattaagctttgatatgtttatatagggggcaatacaaagaaaggcaaggaaaacagaataacagaaaagaagttgttacaagaatctgttattaactatattaactaactaagggtagtttagtaatagttgtagctttatcactatacataacacatataattacacacattgaaatcaataaatacaaaaaacaataatatttagcatttaaaacaaaatataaactgcccaattgatcatacgaaattatgaataggcgaaataagtagtgtttattaattcaggtatattttatgcttttattatttttgtatataaatgtataaaagaaaagtttgagtctattg

SEQ ID NO: 233728 - DNA, 1641 bp, Cannabis indica
tgacggtcttcaacaaaagaaacaccacctcccatcagcattgatcatcacatcaaaattccttatcctcaaagacttcacaataataagatggataagtagtttttgaaattccttgaaatattcaagaaactgcacataaacatcccattcatacaggctttggaacagatgccaacttacctggagttcatgaaagacatcctatctaagagacggaagttggaagaatttgagatggtggcacttactgaggagtgtagtgcagttctgcaaaagaaacgaccgcccaagttaaaagatccatgtagtttcaatatcccatgctcaataggggggtcgatacaaacaaaagctttatgtgatctgggagcaagtattaacttaatgcccatatctatgtttaaaagactaaaattaggagaagccaagcccacaacaatgactttacaaatggcagatcattctttgactcatcctttgggtataattcaagatgttctggtaatggttggtaagttcatcttccctgctgatttcttaatacttgacatggaggaagatgagaatattcctatcattttgggaagaccattcctggcaacaaggagagcgttaattgatatgcaaaagggggagttaaagttgcactttcaaaaaaaaaaaagaagaagaaactttcaaggtatttgccacaactgaaattccttcttgttgtcgagtggaagttgtaaaggatagtcgagaagtaactaccaacaagaagaaagggaagtctaaagaattctttcaaacttttcgacgacgtatgaaaaaactgttatgtgggaattgtgaaggtgaatctcaatctagggatagctttaaaaattgcaatgttggaggatagttttcttcgtttggtacaagggccctcatggatgcaagaggtggattttacccaccaccaccaccgccatactgatgtggtgctaaggtatgttcccttccctttaattttaatgtcacattggggacaatgtgtcactttagtttgggagggtgaacttaaagtttgtttctaaaattaaattttttagttttaatgtgagttaattttcttaatatgagttaatttgaaagaagggtacatagcatgatttgaaaagtttatttattttaagaaattcgtgtgcttggtgatgttatacttttgactagtttcaattttgtgctaacatagaaccatattaggtaattttctagcaattgaattaatttatgtatgctaaatgtgacttgtggaaagttgtttggaaaattctagaacttgcttgctttctatttgagatgaaataataaattatgcatgactaggaaagtgatttaggtatttttttagatcgattgtgcctttcaagccatccctgtaattttatcctagtttcctttttttgagccttaacctattctttgtttcgacacatatgggcctagaaaagataaacccgtaaacattcaaaaatttaaccctaattataccataagtatatctttagtttgggggaatttggatgggaaatttgtgtatgtgtgtgagaaaaagtgtgaaaattgagagaatatgacaaaaattaaagattgacagcaacttgagaaaaa

SEQ ID NO: 233729 - DNA, 1152 bp, Cannabis indica
acctcttgagtgttgggatgacatttcatttatcactgtattctattttttttttcctatatatatgtacatgcatttgtgtttttttgtataattttatttatgtttggtctaaagtatatacactaatataaataatttaatatttttataaatatttataatattagttgagttgataaaatctatatatttatatataaaataagaaagctcaaataagtcaagtaatattttattttagttttaaaaaaagtgtgagagtttcatatatatttttgttaaaaaaaataattttttatgttatgaactctatcacattattgttgttgtcttttaatttattttttgtaataatcatatgacacaaaaataaaaaataaaaatagttgtggtatgtattgttccgcatatattttctatataaggattataaaaaatataaaacaaattaaaaacaaataataattaattgatgaacaattatactataagtgatgatttaatacatgtgtatatatataaatataaaatgagtttcaaaaatattatattatatgaaaaatgaaaaattactaaattgaaaaattcttcactcatattacatatatttttaaatattaaactaataaataaatataaaattaatatatttttgaatgtaaatatatataattttctttaaatatttcaaaaccgcgcttgtttcctagtttttttataaataaattataaattatttaatttagcaaaatagctctccttccaagaaaagttataaaaccccaccttcttttagaacgactttataaataaataaaaatactttttttttttacccaaatgctttcaaaaaaaaattaattgtacaagttaaaaaagaacttcaaaaagcttactctaatgcacgaagggcacgacattagcaagttctcattcctgttaaagattttaatctccatccctattcaatctttatatcttctcatcgaaatcgacataaaatcccctaacgagacagggatagagtaaaaaataccttaatataaaaaaaaatttatattaaaaatttaattgtataaaaattaaaatattacatattattcattatgcaaacataaattataaattattaaatattattttaaaaaa

SEQ ID NO: 233730 - DNA, 1352 bp, Cannabis indica
aacatttgtggcgtcttccttcataccaaggttcatgcttaactaagcattagatcgcggttccacattcaaatttcgagaaatcttagaggctgccataattggtatccggttttcatcaaaactgttggtgtggttcgtattatttggtatcagagcgtaggatcatcgggttcggcctatctaccttttgtgtctttcttttcaattcatgttctataatcttgtttaacttgcgttctattttcttgtcaattcgtgcttcatctcttccaattttctttgtgaaatccgaaaactattagaaccacattctgataattttcttgtgtcaaacatcgtgtctttgcttttcttttcttcttaaaacaaatcgaaaattcaaaactcttaaatttttggctgatttcttgtctccaaattttctgtcaattagtttccctttttgttattgaaattcaaattctttttttaaaaaaaactccaatttcttattgctgaattctagtttctctatttgtgtcacaaatcagtttccttatttttttatttctcattggtttaccaaaattgtttcataaagcttgtctacttcgtttcctttttttttcctttgtgtcattagcaagtaaaaaaaaattgaattcataaaaaaaaggaaaggaaaccgagcaaaaaaaaaattagaatctggaaacctctcttcattttttttttttgtattttcttagtcgctatagtctaaaggcttgttttccaaatccccacacaagtgttccaattttaatcatttatttttctttagttttcatcagtgttcgtttagtttgtttggttggaatttctgcttgaatcctctcttgtactgtttgattagtctttaaagaacttaaagaagaatatgagtggaaaaggcagaggtgtgagcttagttgagggtaaaagccatcgaatttgagtgaaaacacgagtgaattgagtgaaattatttttttttttttttttgagtgaaacacgtgagggagtgtggtgagatctttctttatctgttctaacttatttttgtagaattcaatcatgtcaaaagctccagaagaaaatacttgtaatgaaactacaccacctacggttccaaatttataacttcaagatttgatgggggagatgaggaggatgatgcgagaggagtgtgaacaaatacatgccaggttagatagagtagaagaggaaacccaacagaggcaacggaggaatagggttcagcaaagggatgataatgaattagatggggaagggataattattgatgaagagtttgatgggataccagcaggtaaccataggaggtatgg

SEQ ID NO: 233731 - DNA, 960 bp, Cannabis indica
aagatagtagtaacataacatgccattacaatttttagtttcttccataactttgaggctccaatatcacctcacctcacctcctaatagaaaccagactctttacaaagaaacaatccctcaatcctaaaagactggtactatctacatcacaaacaacatttcttatcttttgtgtatgactgttaaaagacaccaactgtttatgcccatctttctttacttccattagaatctcaccattcttccgaatcggtaccccgaaacaaatattttccagtggtccatctccaacatactcatatttggtccaagaacaagaagcatcttcagcaacatccattgtgaagatacgaagaatattctctgtcatctctccatagcagtacaaccgaatcgttccacactgaaatttggatgaaataagaagtgaagtcccaatattcaaagtgtggcaaatgtatgagatggaatttctcgttactcaaattaaaactgaggataaagtcataataataattgtctaaatcatgccccaattagtaacaaactccttcccaatataaatggctgcctagaacattagacattataatatttacaatgtcttgagacatgctaatctttctccaataattggaactcattgtgtaaacctcaactttgcatttgttatggcaccaaatggcaacacatttgtaatcattatttaaagaatcaaatccaaatcccacaacaccattaggaaatctaggagacccttcaattataaagttccctggttgtgggagaaacatgaattctttcaaagcaggattacataacgccattgttccaacatcatttactaaaacaattagcccatcacagtgataaccactataccaaaagctttcatcaccaataggttctggcaaatgtatacttagaggttccatgacagacataagaggatcgtcc

SEQ ID NO: 233732 - DNA, 747 bp, Cannabis indica
cattgtatatatacatatatattcggattacctctcaaaatgttgtgagttggaatcctcgttgtctaatctcttgatcattgaagatctatagtggaagaggcgagctcaagaggacgtacccagatttctttggggaacctctataaaatctctagtgcattctttcctttaatttcctgcattttttactactgtgtttatttattttcttatgggttttttattttctgggcagtggggataatttttctgggttttattgacggtgttcttcatgtttttcaaagaagaacagtgaagaaagagaggatcgcggcttagggttaattgctgggttccttttctgggttgttgttcttcagagaagaacaaagaaatagatctgctgggttttctaagttggaggccgtgtatgtgcttcgatgaaaagaatgtatatatatatatatgcaaaggttaaatctagggctatagacgacttgtagtaattcaaaataaagggctgtccttttttcttgggtgcttaaatcacagagtcaacaggtgggtttgactggggtaaaaggtctcaattgaccttggcttttgattagttttgtgctatgtgtagggacatttcagagaagaaaatcttacattggtatctgagccaaacaaggtacaatctgcagcaaatattaatcaagaaagcataaagaaatcatcaagaaagcatcaagattcacattcataccagcaagaatt

SEQ ID NO: 233733 - DNA, 793 bp, Cannabis indica
gactagcattgggcccttatcaggccccatcggactggataaaaaaatgcaaaaaccagaaaaaattagaaaaaaccaaacaacaaccatttcaacacaaaaccaaaaataaacaacaacaacccacagatcaatcatgaaaataatattttaaactaaatataagaaccaataacaaaaaaaattacttacccattgattgttccacaagtttattcggtgctgtaagaatagagtctcacactaaactccataacttctagtactttgtagtagcttggagagattaattgtatactaaaaataaaattttagtgtgaattagttagggagaatgagagaacataaggttttgagagaagagagtgaaaagagaaaaagagtggcagtttgagagggagaggagtgtatacaaaggcattttgggtactaaatataatgtatacccattctcctaatttgtattaacattggcccattttcatatttttttccttcatgtatgtatagaaattcaaatttttcttctcaattaaaaaaaataaaaagtgaaaacagttttgtagaatatgtttttgagaaatattttcatttttttaattaaaaaaacaaaaaactgataaaaaaatgttaccaaacataccttaacccgatatgttaattaggggatatttgatccaatccaacattttttttcctcatccaatccaatccgatccaatccagttagacctcaaaattcaatccaatccgatccaattactaattaaattggatcggtttttaattagat

SEQ ID NO: 233734 - DNA, 567 bp, Cannabis indica
tttttcttgataaaaaaaaataaaataaaattacacatgtatgtaaggaaatatttaaattatttatttggcattgtaaattttcaaaatattcttaacagtttataatgtcaataaaaataaaattctaacaatttattttagacgtatatttaaaataaataatatcatgaataagagactttcgaagtatccgtccacttatattgtgcatatatttttcataatttattaaaaaaatgtgtattttattcttaaataattctattataccgacacatggaaaaaaaattataattataattatttagtgttaaaaattcgataatggtgcaccaatcacacttatttatttttaacttattttaactatttagtggtagccataaataactttattatatagttttgatagtggaataaatggtgtgatttataaaaaaaaatatatctatacttatttatttatttatttgagaaatttcctatatttttataaaagagtgtgttgtaattactaattaattttccaagacaaaaattaagcccgaaagtatcctaaatatc

SEQ ID NO: 233735 - DNA, 510 bp, Cannabis indica
tgagagttatgagaaagaagcagcacctacaattggttcaagaacaacttttagtgaagctaggaatcaagttgctactgtttttagaggcagcataagagatttggatatgaaaagagaaagtgatattagggagaccgagttgcgaataaccactgattcagaaaatatggcaaactctagtctgttcatgccaaagaggtgggctaacaatccaacaacactatctcaaatgaactcacttttgcttcaaagtacactttcttttcactcaatggtatggatctatcacctatagtttggatattcgattagtgtgataagcatgattcaatatgtcctagtttctcactcaataccttttgttggtgatagaggtcaaggtggtcttctgttcgtgatcgtgaacttcaatctgctaagctggagattgagaatgcacctaccatcagaaacaatccagaactcagtgcatatgtcttccgaaatgtttctaagtttaagaggtga

SEQ ID NO: 233736 - DNA, 4155 bp, Cannabis indica
aattaaaaaaaaaataaaaaatgaggtccaccaacacaattagaaggtagcttctattggatttgccctaagtctgagcttaattctgaatagtgttgtgctgtggctataaacgatttttgcagattaaggaaagagaaagaaagagatacacaaaataaccaaattacaaaatctttttcttttaagaaaaattactaaaattattgagcgggttaaaattttttgttactttaatttgacatgttacaaacttataattacataattagaaactaatatttatatttgattaggtataaaggtgtgcaagcatgctactgcaagtggcccaaaaaaataaaagacctaatatattttcttttgatgtttattaggtttttgttttagctttttacaccacatattaaaatttttaatttgttttacttttttttactataaggcggaatttttttcaaaaatactatgtaagtttcatacatgtatactgtgttaagttttcactgttgctccacagttattttttttaattgctccactgttgttttaattgttctgttttgttattttacagttactttataaaagacattaatttttgtaaaaaaaatcgtgtgactgtaaaattataaacttttacctaaaattaagtatttttataaaaaccttttttttttcgtaaatcgattttttaaggggctaattattaggtaggaatatgaattgtactctctgcattgtgtaattttttaggtgggaatgtattaaattccgtggaattttgagtaattattgttttttttttttttttggccaacattttcttaagtttaactattcttcatccttagattataaattaacctaataaactcttttcaaatcataaaggtcttgaattgcatgcccaactagtgcatccctaaaatagaacaacatacaatttacattaagcaataatctaaaagtcacataagttatgcaaatactcttgtttcatataaaaacccatgtctatttatttagagcattctcaatcaaacacatgtaataagcacaaagatgaataaatcacacaataagaaagaaggaacaatcaaatatcatataaatccatagaataatctcaggcaatatccatcaaatctttaaattgggagtttagctcataattaaattcataattaaactagacacaattaaaacataagaaattaagagaaaataagaaaactagatggaggattgtcacgaatcgtccacgctcgctccaagagccttcttgtgtttctagggttccattatgtctatccacgtataagcgaccccttttattaacgaagttctccttgacccgtacggagtcggcactgcagccacaattagcctcgccacggcggctgtagaaagtaaaattcgaggctttttgtagccatctcgccgtggccataagtcgtgttcgccgcggtcacaaatattagtagcgacaaaaatgttcctgctttaacatttctcagtaaaatatgcataattctcacatgcaagctccaactgagttgatacaagatgtgttagaaaaataaaaaagagatctaaaatttttatattttgactttttttaaaatctgatcataacatggtccaatttaaacttgaaattttagctttattttcttacaaaatttcctctatttcatagatcaccgtttttcaaaatttgaccaatttatacattacaagtgtcgaaactttaaactaaagaacacaagagtaattctattccaaaaataataacaaagaaaaaaaaataactttaaaaaatgacccgaaacaaaacttaggctaaaaataaccttaacacctttttgtacattaaaatttcacattaccctcattccaactgatggccaatttttttttgtcataataataacaacaaccaaatctatatgatcaatttacaaaagtaactaaaatataagattataagttaaacaaaaccatcaaaaatataactacatgctttttttaaaaaaaacaaatatatatatatatatatattattcagcaattaaaatgaaaaacaagtcacacaaagatagtaaacgtatacctagtttttaacaatacactactatcaaaacttaaacttaaaaccccttagcagtcaaaaaaaaaaaaaataagcaggccaagctaaaccacttagaggctgtcacataattaagtgcctttattaagcaggcttgtaccttcaataaagtgattccaaaagtctattatattccttctctccatgacactgttctaccccaagacttgaggtactgttcttcacaatgacaaattcagagccttcttcgatcagggccaagatccctaaagtgtagtgttgggtggttatggccttcaacttgaatccttgatctctctcaattacatcaaatttatgcttagtccatcctttttctccattccacttgacatttttgagacccttttacaatataatctgaatctatacttcctcgctccaatccaatcgaaccaaaccatttgagacaaaactaataaattggttttgaatttagaaaataaaaagcggtaaaaatactagtttagtttgaaaaaaaagaaatatggaccaaacaaaaaatagtattaagttgcaaaaataatgcataatcataaaatgttgcttctacatgttctatgctttaaccccagttacacacttattgactttaaatcaattaatgataaatgacccatcataataataaaacaaggcttttccttgtttctcacccctaaaacaactttccccaataatggcctaaagggaatccaattccttctccacatacttgccaaaacccctctcactcacaatactttttcttattaatatatacattactttccagcccaaccaacaaagaagtttttcaaaatacaatgtgtattgaaaaaaaaatcacccttgaaaactttttaacttatcatggttgccccaaaagcaacccctttaggctgaaagtgatgaagagattatgcaattacaatccaaaagtaacctttaccaatattttattaagctactactatcaacttaaacttaccataacttttcaatagttaataatttagaataattgtatcattagctaaccaaataatacaagtgttttttttcaagaaactaaaagtaccgcaaatgcatgcaatgctctcatattctattgaatattggtttatatttgctatggtttaactcatttcaagagaagaggtaatttatattaaagttataacaatcaaaacagggtgaggatcatatataaggaaactgaaggtaatgatttttatgacatacaactcaaaaggatgaaattaaaatgaccagacagacaatagacacggttacataaattagtactgtctttgaccattctaagcaaataaataataaaaagaggtgagtattatttattaaagagaaatagcaatactctttatcaactaaaactttatcaattacaaggtaaataatagtcggagaagtaaatttaatgtttatttttagttatataaatattcaatatttgtaatttctttagcacaaattttgttattatcttaaacatggcacaaacaaaactcagattttagattattggatctagacaaaaatatatattatcagttacttctaaatgttatttcaacaaatttaaaacagaatttgtactgacaaaattagaaaaaaaaaaatcacagcgttacaaatattgggcacttatcccgctaaaaattaatattaagtttatgcttcttgaaaatttaatattttaagtaattatgggtaagacccaatattaaattactctaataaaattataccatctattgtgatatttgaaaacagtagcagttctgtaataaaaaggtctatgccatttgtaaaggtaaagagcagtggtttttgtgaaaagatttaaaaagcaatatatgtattgattatttcaaagcattacatcaagagaaggacagcactagattagcaccaagatatatagatgctatatagggaaatttgattttctatacttagaaaatcaaaaaaaaatttccctaaaccaaaaatttaaa

SEQ ID NO: 233737 - DNA, 1170 bp, Cannabis indica
gtgactaaatatgtttttggtcataatactttttgtaactaaaattaaattagtgacaatttgtaatatgttttaattacgaataactttttattgtgactaaaagtcatatttaatcataacaaatttatattgtgactattttttttatagtaataatatcttaacacaattttgatagaaaaatttcaatattgatgcattaaaaaatttcattaataaaaaatatatacaaataaatacttaaattttataagttataccaattttatccctctaacaataaacattcaaattaacttttctctctttctctctcaattaaattctaaaacacaatcaccatgaagctgccgaagccaccaatcacgttttggccatcgcacatcggccgtacccaggcccgcccctgggcataggcgggctaggcctgtgcctagggcccacccagcccaggggcccaaaattttttttcctcttttaaaatcatacatttttttactaattttaaaaaataccacattttttctaacatatgggctcaaaatttttttttccctgtggcccactttgtttcagggccagccctggttgtaccacgtccacctttgcatgttcgcctttgcactaaacgtcagtgctctctttgtagtgtctctctcctcaaccaaaactaaaatgtgtaaattataaaaatgacagaataacaaaagaatcaaaacaccattaataaaccattaaaaatgtgtcatagtcgtattaaaaattatcataatgacaaaaaaatataaaaaatatatttaaaaaaaattattgataacctatcgataacccatcgaaaagccattcaaaataacctatcaagaagccatcataagtcatcgataacatatcgataagttatcgagaagccatcgaaataactcctcagtttactttttagcataggaaccccaaatcagattagaaaacaccataaccacatcaatctcaaaccttaaaaaaacacacacatacaagtccaagtaacaaaactaaacatttggctttgttgataaaggtggggcttcgacggagggggtagggtgtcgacgtcagactaagttcagtcttgtcagtgtcaatcgtcttctcgtcgcctctcggatgggttccttcaaagagagagat

SEQ ID NO: 233738 - DNA, 536 bp, Cannabis indica
ggagcaacacctggaatttgccatgcttctaggaatcctacagctttgtcattttccactctctctgacctcaacaatggtacctccattgactccccaattttcattggctgctgtggttcaatttcattagctcctacagcctctggactcactggtaagaagaagaaaaccaccaagccaacaaatgctattaacagaccaggcacaacaaaggaccagccccatccatagctcaataaagcagaagctagcaaagaaccagtgatgtttccaatagatgtgtgagcattccaaattcccattataaggcctctcttcttctttccaaaccatttaccaactactgcaaccactgaaggccaaccagttgattggaacagaccagcagccatttgaattataaggaagtagtaaaaactatggatgtttccccagtaaccaagaccaaatagggaagtgaacacaccagttcctaccattccaactgttaaaaagatcctcaaatccaatctatccccaagatgaccagaaaa

SEQ ID NO: 233739 - DNA, 1335 bp, Cannabis indica
tacgttaccctggtaacgtccccccttcaggcttcattgggcccttactcccacagagtgatggctcttatacatgagggcatcactctagctgcttcctggacaaatgactggccccacagacaaatccaagtgtttccaacatttttttttgctttgactcgcacgcttcatggggaaattttctaaatgaaatcaccccaagtcaaggaaactcaaccatagtgttccctcgtggtaagctatcaaaacatgatgcttcttgctaacataggtagtcccacgcctacataatctcaaaattactacagaatcatcgccttgaattcacctagtattccagactactcataaattatcccaactttgctaatgctagatcacttttaaacaaaagattttgttatttgaatcaattagattgatgcctccattaactagtcatgtcctatattccacttgggattaccagcaaatttaactcatattgtcatttttttttaccctgttagatgaactaccactaaataacatacatgcacagtccattagatcttttgatgtcgccccaattgagagtataatgtttaatgccaatataaattgaaataacaattataatatttctcataaattctaatttgagtcagtcaaaggaccgatacctgagtccccttaagtcataaccaacacttgggcaggacccatacacttttatctttaacatcattctttcttaactatgggtaggttcttttcaaatgacccactaccccataataaaacaagatctggctctacattggttcaaatggcaccttttagcatcttgaacactgaggataatgtcacaatttcttattctcacatcaaccgctatcttgaccaccctggaacttttttgtcttgtcccataattggtggttcatttagtttttgattcctgatctaatagtaagttggcttcataaattccatcacatatagtggtacaacaggaagtgtcggtaatacaataatagatacaagatgagcctattgttctttcagatcttagatctattttcccttattttctaatcatatcctgcataatagaatttacatgttcccagcattacggcaatgaagaattctcttccttattatttgccccgagcccagatagctcgctaatcagactatttgattgctcttactgcttaacttatcacacatttaatccacatcttctaaccatttagaactcagacatatataaatatcaatatgcatatcccatacacatattcttatcaaaattatcagtatcctactttccaacatactttataa

SEQ ID NO: 233740 - DNA, 913 bp, Cannabis indica
agttaaccttgctaaaggttgtctagtgtatggacgttggcactcctggccgaccagctataggtccggccaaggctttgctggcaggtatgtggatctgtctttgcttgtgtccaccgtgcagctatgtgatcttacaggttgaaagttgcacgcactaacttggtaggttgaaggatgcactcactaacttggcaggttaaaggctgcacgcactaacctggtaatttgtaagcactagcctagtaggttggaaggttgtaggcactaacctggcaggttagcaggctacaaacactaacatggcaagttagtgacgaactgttctccgtgtgtcttctgcttttgactatgtggacatgccaggtcaggtggataaaatttgggataatatttgccctccaagttcctattcgaacgtttgtacggatagggacttttcagatcttactttgactgtatgaacctttaccaaacagctttgtctggccaagtattggactttttggatgacgtacttttaaacatttgatcttctctctcccatgtatgccttttactttcctcatcttctcttcttcgacattttcctctttctttgaatctgctattgatgagtttcaagctatttaaagcttttagaaactttttgattctcacgttttacaatagtttttatacattgtaatcttcttcataaatttaggatgtataataatgtatgacttcttgatgaacaagattgagtcttggactggtaccttgggtctgttagagaccatgtccaactcttagatcttgtctaggaactttgtctggtacttagatcttgtacaggaaccctgtcaagggcttagatcctgcgtaagaattctatccaggacttagatcctgcgtaggaactctgtccagg

SEQ ID NO: 233741 - DNA, 2164 bp, Cannabis indica
atgatgatgtaaatgtaactctactatcaatgaactctaactattttgattgttatatctcttttaatgatggtcctcgatggcacttttcggctgtctatggttttcctgaaacttcaaataaaaagcacacttggactcttttagagagacttgctgatgtctctccattggatccatggttgcttgtgggtgacttgaacgagattttttcacattcacacaagaattatggtcccctacgatctgataaccatatgatggcatttcgaaccacaattgatttatgctctcttcttgaactccctcacacgggttcagatttcacttgggctaagaatagacggaatccacaagctttacaagagtgtcttgactgggtgttcatcaacacaatttggaaagataatttggcttcaccacatgtgtctcacctggactactacggttcagatcatagagctatcctcagtgtcattaatctgcaatctattacctatgctgtccagtatcgatcgagatttagatttgaaaaattatggcttaaggaagctgaatgctctcagattatttcccactgttggaacctttcttccgggaatccgattgaagatctgaatggaaacttaacaaattgtgctacttctcttcgatcttggcacagagataaatttaggaatcttaaaaatcagatctctttggcacaggctactgtcactgccctttccaacacttctacactagcaacttcacattaccagcaagttcagcaagctgaagccgttcttgatgatttgttggccactgaagaacaatactggcagcaacgtgccagaattgattggctacaatcaggagattgtaacacaaagttttttcacgcgaaagcttctgcaagatactccaataataagatcaaatttttaactgatgatgatggctctgtctttacttcacaacacgaaatatctggtttggttgctgcatattttgagaatctttttcaagcacaaaatgaagaccattgggctttgcaacacgttcttaatgtcatccctactactgtaacagctgaacataatgcctttctttcgagatactttactgctacagaagtttttgaggtactcaaaacaatgaatggagatggtagtcccggaattgatggaatgtctgctttattctatcaacataattgggatattgttggcgacttgatcacacaggcaattctacatgttctaaacaaagggggtagtcctgaagctctcaacaaaactctgattactctcattcccaagattaaaaaaaccaaaatcaatgaaagattttcgcccaattagtttgtgcaatgttgtctacaaactaatctctaagtctttggtgattcgatttaaaacaatccttcctcatgttatctcagaaactcaaagcgcctttttgcctaataggctcattactgataacatcttggtagcctttgaattggttcattgcctcaagcacaaaaccaggggtaggaaaggtttttcagctctcaaacttgacatgagcaaggcttttgatcgagtggagtggtcattcatagcggctgttatgggaaaaatggggttcagccttcgctggattactcttatcatgaattgcctacaaactactcaactatctttcattatcaatggtgcaatttcaggcaatgtgaaacctcaacggggtctcaggcaaggagatcctctatctccttatctattcttgatctgttctaaaggattgtctcgattgttacaatatgaagagtctattggctgcttaaaaggcttagctatctcaagacactcgccgtccatttctcacttgctctttgctgatgatagtttgttattttgtgaggcggatgatagatcttgtggtgcaatcaaaagagttttggatacatatcacaaagcttctggtcaacaattgaatactgataagtctgtcatgtcattttcaccaaatacaactgaggctgcaaaacactctttccgaaacatcctaggcatgcctatatgtgattgtcatgagtcataccttggtttaccagcttattctaaacgtgataagaagcaaatgtttaatcacataaaggagcgtatttggaaattattactgttggaaattattt

SEQ ID NO: 233742 - DNA, 755 bp, Cannabis indica
aattaaagaatggcctctaagaccttgacacgtattaaaaaaagaataacagaatgagaaaaatatcctaataaatttaattgtgtgttgattacattaggaccacagacacttggtgcattctgttgcagtagccgttatggcctcatcttccaatatgacctcattcctttacattttttatagagaattaaagagtatattctccttgctcaaacatttgatcataatttttttgcaacattttcttagctttaatattaaacaattgttttgagtatcactaatgcatataagaattagctgttcataatagtagagagtgactctaaaataactgttataactttaaaggataatcttctagatgggagataactaatgttatacccaaaatttgtctgcacttcagaggttgacacgtatccaacagagggaagacaaaacaattttgaatgagagagcgatatcattaagtgcatattaaataacttatttattaaataaaggttaaatagataatattcaaaatacattgactttattgtcaattgcgagacaagaatagtaactattaatcttagaataacgagacatatatatgccttcgaataaactgacaagaaaggataaatcatccatccaagcagagtgagtatatcaacataagatgcctcgcatttcatacatcgagaagatcgcctcacattataaatgtcataaagaggacaaagcgagatgggaaccttcccaac

SEQ ID NO: 233743 - DNA, 1109 bp, Cannabis indica
tccgccattaaatcgttttttgattgagttcccttctcctggcccaaattcacactacccttctccaacagcccattcggcccaccagtaatttcttatcccaatctttttcttttagtttcaagaaaaaccattccctcctcatcaatatccaaatcagatgccacctcattaaatcctttatttcctaattaacctctccaacaactccattactatgcacggcacaatctcccactattattgcatggccaccaatcaaatccctattcccatgcatcaatccttgacccaccattttaggaataacaacttgctgcccatcccgaaaatcagggacattaatgttcctctctcctctcgactggaaatcagagcctccgcctttttgaacagcccccgtcgcacctccaccaccaccttgcaggccaacccccgatctaaaataaccgatccaatctgtactattgcggattggatttaaactgttatgcagatcggattggatccaaaatatgacatccgcacttagtgcggattggatgttgtttgaccaaaaaagtacggattggattggatgaacacccctactctaagatgctcttctataatacccacttggtgagacccaaactttttcttttgtgtatccatcttttgagatgatgatgatgattgtattggtgatccaagattatttaatcttgatgttgttgtgagcctctagttttactagagaagaactttgtaattctattattgaaccttggtgatagtggatgatttgagcggactacggtcccgtggtttttcccgcattgagtttccacgtaaaaatcttggtgtctcacttttatgattgatttgtgtatttaatattgtttgtggtgctttggttgatctttaatattgcatattgtggtgtttgataagtatcccatttttgacaaacaaagagggaaaatattgtggttaattgcaataggttttcccaacacaaattgtcccatccatagatgagtgcatatggtaaaaattaaaagttaaaattgaaagattttttaatggagtttcagattttttttccaatcatttacgattaaccacca

SEQ ID NO: 233744 - DNA, 921 bp, Cannabis indica
cccaccatcaaaaattcttcaaccgctccacctctttttctttgaccaaactcagcaaaccaatcattaaaacccatagcagcagaggaaaaaattgcatatatgttccaacatgaccgagcaaaagggcaattaacaggacgtggaggattggttcaacctctccactacagaagacacactgtatatcaatagggacgtgcttgttgttaagctgtgtttgagtggcaagacatcttgatagtgcatgctaagcaaaatggatcacttttgagaggaccttgagcttccaaagttgcttccacaggtcagattccaactgaacatttcagtctcctctcaaatattgaaggtgctgatatgagcttttcacagagtaaaaaccagatgcttcctttttccaaaatcaagcatcctcacttatggaagagctgagaggaatgctaaggatgatatggttgtccctggaatcaaaaaaatctcatattaaatccttgtcccactcctttaaaccaggtgtcataagttgataaaccttgttatggagtaaagtaggatgggaagatgtcacttaagggtgtcatcgattggaaaccaaggaatattaaccacatcagttgcaaaaccagatccaattctaattcttgcttctgattttatcaagctctaggactcaaaaatacttctccaaatgaaacttggattagaccccaaagctgctgtcaaaaagaaccccaaggataataacgagatttataaatacgacccgcaagagaattctcacgtaacagaaggcgccaaccatgcttccccaataaagaaatattataatctataaggttacgaaatcccaacccaccaatgtttttatgcctggaaagatgacgccaactcataaaactaatcccacaagaattattg

SEQ ID NO: 233745 - DNA, 1287 bp, Cannabis indica
aattgttttaaacttaaaacgaaattaaaccttaccttaagcttttacgctctgagaatttgctatcccgctactactggagcttggatcgctaaatataatataataatatattaataataatgacagtaagattaataattatattaattaattttttttattaattgttatcctattaattcttagtaactaagaaatttttacttttagggcactaagataaatcccatacacttctaattacgccaatacttttattattaacttatcacaatatttccatcagttgtattaattaaacccgttatgatatttttggcccctgatcgtgtctctaaggtcgccaaacctggaaatatttttattccaaatataccttatattcaattcacacatgctatataaatcttcataatttataaattacgattatttactcacttatagcaaatttaaaatttacgttgaagtagattagtaggatcataatcccacctattatctaattaacccataatataattataaaccctaattatctaccatttgacttattaggatattatagtcacacaatccctaataaaaaaagcaatagggccaaaccatagtagtattcaaaaatagagggtttatggtcaaagatatacataaggcctgaggctgaatataagtagtgttacaaaaaggtctcatgcaacatggaacataaaattaaaacagtgtctaaaacgccacaagccacatagaacataaatgtaagtaatgttcttaagctaaatggccatcactcataaaaagccataggctatgtggaacatataaatattgtttatgttatacacacataatatcaaatactactaatgaaattaaatttggagccgcagaatcttgatcggcagagtctaggccggccccatcatcaggatgctcctcggcctgcccgacaatatcatggctagccaccatctccacaggtgggtcagccagtcccttaccatgagttcctgatgataaccccttagatagacagcgacttgatctacctccgtccggctctcaaaaagtgcctttctacagtccaacattctctccacaaaagcctcattgcccatgtacgccaaatgagcttagggttacacaactataactcataagtgaatttagaagataggtcggtgtactcctccctaatggcctactggccatcaagagcttcttgaagcttttgcttgtagttatcaagattagattgcagtctggagatgaaggcaacttgtg

SEQ ID NO: 233746 - DNA, 1014 bp, Cannabis indica
atatcttgcatgaaggctctattatgctattacggggctgtactccagctatactctatcgttggcttacgtggacatgccatgtcaggtggacaaaatttgggataacatttacccccaaagtccctattcgaacgtctagttggatagggactttctagccatcgtcttgtttatagtagtctctgttgagcaaccttatctagccaagtgttggcttttttccttccatgcttttggatatttgatattctctctttatatacatctcatcttctcttcttggatatctcttctttgtacttgtcattaacaagtttcaatctttttaagcttttggaaacttttcgattcacatgtgaatttgtaatctctttggtaaattgatcatcatgacaattttgaaatgtgtaatgtgtgactttttgatagaaaatattcgattttggcctttgctatgattcttgatgttatagtaagatttcctcacctagaaactcgagaccagactcttatgaaaatgacacgtgtactcactctcctcgaggagacctgagctgtcaatgagagacctcttgagtatgaacctcgcctgaaccagactcagcgagatgatgtggctaggatagactctagtcgcattcgtatggctcgcatagaataggaccaaggaatagtttaagactcacatatactgagatatatgcgaggactttcgagatcctcctgcaaattgtaaagattgattctttactctacgagctggtccagatgacctaacaacctcaataacccgatatggactggcatgccttaggttgtcgacttattacaagatgtccgtataagcgacttaaacgggacacagacatcctagactcgactagtcttgtatgcatcttaagcctgcgagcttatgcaagaatatgaaaaggcaactcgcattaaagaagttgcatacgttgctgtatttagtgaattaagctgaaattgtccttcatttattgtatttac

SEQ ID NO: 233747 - DNA, 666 bp, Cannabis indica
atttagaaaagtttaacacaccgaaaattatgttcaaacagtgtgttgcacgcgtgactattttattgtatacgcgtgtaaaataaactgtttgaacattgttttctatattgtaaattattccaaatttttcaaaattttgtaagatatcttaaatagctataacgtacatgaatataaaaaaaaaattaaactaaaagatttttctggatgccaaacaagttaatgatgcatcagtacatctcttttaagagggtgcattgtagaatcagccatatatatttatctatcatataattttgtatgactattcaaaaaaaacataaagttcaaactaatttgttttttatggtggttgaatttaactttaaattcaacctatatatatttatgtcattattacaattaattaaaatataacattaattaaaattactattttgattggctataaagattgtgttattgttatggttataactcgtatttactattttgatttactctaatattttaccactctcgaaatttagatactcaaattacttaaactttatggcttgataatgtaatataaatcacacaaattacaaatacaagcaatgtgggacaaatatattttttaaacaatgtgttgtttttctttactttaattttttttttttt

SEQ ID NO: 233748 - DNA, 2196 bp, Cannabis indica
ttaaaagcttggaaattgagaagattaatggaactcccattgtccactaaaatttcgtggacattatctcctccaatatttgcaacgatcacgagtgcgtcagcgtgtggatgatgaacccatctggcatcactctccatgaaggttatgtcatcgcattccttcttgagaaacttcttcgatcgctcacttaggttatttacattggtgagcagtttttcttttgcttctttggcatatcgctcttgtgactttttagaatctccaccaatatggggcctccaataatatttaagataatgtgaggagttcgtgaactactcacattgtttgtctcgtcattctcatctgcttggggatgagtttctctatttttcttgtacttaccgaattttcctcgtctgatcaattcttcgattttgtccagtaggaaccaccattccagagtggtatgaccgatgtccttatggtacttgcaaaacttttttggatctcttttgtcgtgatttcctctaattacggaggctttttgaagactccatttttctcatcaatcgcgtaaatatgatcgtgaaggaccgctagttcagtgtaattgacaaagcgtggtcctccttttctctttggagatgtttccttcttggaaggagacttggcaagctttagactttgctgcctctagggttctttcctctaggacttcaagatcgtgaccgtggtacggatgactcgcgcttctatttcaccctttctagttcagccaaggaattcttgattctcttatgcggccatggcgaagaactctaccaacaattctggtctttgggcttgcacatcttccaaaaattggttcttggcaagacacctgtaattaacatacataccaatgaagactcgggggccttctcgaccttggttacttcagcatttaaacgcttaaaataatcctataaggattcatcgacttcctgcttgatggtagctagggttgtataaggcggtttgtacatcatcatggcttggaattgcgtcaagaataaatctacgaaagtctcccaagtcgatatggacgcctcaagcaactggctgaaccaatcgtaaacgttatcttccaaggttgccgctaggatgcgacatttcgctaactgagctacttggtctacttccataattgtattaaatttttctaaataatgtatgggattagtagtaactttatattttatcgattcagataatctaaatcccttgggaagtcgagcctgtcgcacttctttggtgaaaggagaagtcccatggagtttgtaaatgggctttctctgctgctcgattattttcaacgctcgtagcaagatgctctgatctacacccctaggcatgacggtgttgtttttagttgtcgctggtgcggtcataatcataactatgttagctggaattactacctcggtagtcgtagctagtgcgttaggcgggttgacaacatttgttgggttattgctattgtttgtgccttgatctcccacttggggatcacggggctcatcgtagctttagggcatttgagaccgtgccctaaaaattgcgttgaggtgatcacaaagatcacccctgtgaacatgatatctccctcctcgttgtgtctccatagagctgacctggtatacacactaggagaacgactttgtgaggatgaagaataagatttagcattatttaccacatttcgcagttgggctctgcttcgagggttgcatcgctcgggatcctcctcttgtggcacctcgcggttagcgttttgtgtgacttattgctccctttatgtaggctagttcaagtcgagcccctcctgtccagtctgttgttctctgcgagagcgattattagttatttgctgagtgtttgtaacctgagggttattcgaatgtgtgtttggtactcgaggaggacgtcgggtcctaactcttccgttgacctcagcctacaaagcctgtatttgctcttgtagggacatatattgggccacagtcagttgaatgattccctcagataccaccgctggtgtaataggcgagaattgtcccacagtggctgtcggtgtcgatgtttctctaacatgaccgatggtttcaagaaataagttgaggggagtaatggtggtacgtcccactcctccattgatggtgtcgacaggtg

SEQ ID NO: 233749 - DNA, 3506 bp, Cannabis indica
ggtccaatctataacttttgcaaaacacaggatccaaaatggtatttacccttaaacatacatattattcatgaaataaactcttaaaactttttcaaactataaatggggatatctcccaaaatgataatacatgaaaaaaacttacaaaaaagacataactaacacgttccttattacaagaaaaaaaaaagactttaaaaggtgattgacacaaatactttcaaaatatgtactttattttgataagatagtcgagaatcttgttccacaaatactcttcgaaaaaccaaaagtaagcacgcctccaaaatccgcaaaccactaacggaacaaggagacttagaaagctcactccaaaccccattcctatgcccaatctgaaccaatattcatcatcttccctttctccatcatcattacttgcatctggatgcgttgtgtgaggatcttcaatacactttttgagcggtggtccacacaacttgttaccaacaaagctagaagcatccatgctttgcaattgcgtgcctattggaatttgtcccgacaagttgttgtatgacaagttcaagtgactcaagaatgataaacctgacaaacctgtaggaatataacccgacaaatggttccttgagagatcgagagattccaggtcggtcatactatcaatcttttcaggaatgcttccactcaaatagtttcctgacaaattcaaggattgtaatgcatcaagacttgcaagttcttctgggatttcacctgataagttgttccttgaaaggtctagggtgcataagagatataaaatggtgttgtattgactttcccttcctttaacaacaacactcgcatactctccagcctcttggtcaccgatattaaaataatatgaagataaatattgatttgacttagatgtcattgagcttaaatttttgaaacattttggtattttccccatcaaattgttgttactagcatccaatatttgaagtccgaaaagcttacacaattcagttggaataagacctgtcaagttgtttgaacgaaggacaagaaggcccaaccatggaagacttccgatccatcttggtatagttcccaccaacttattaagaccgagatcaagtccaattaaagctgaacaattcttaagagattctggtacttctccaacaaagctattattgcgaagatgcaatgactctaaatttcttaagaagccaatagaccttggaataatcccatttagattattgttatccaagtctattatttttaatgtcgaccaatacatccaacaatcaggaatctttcctgataaaaaattattcttaagattaatgcttaacacctctctttgataagatgttggatcacaaagaaaattagaaatattaacagacaggtaattatttgaaagatctagcatttttgaaattggaatacgtggtagtggacctgtcaacttgttgaaactcatgtttagtactaaaaatgaaacattatttggaaaattaggaatttccccatagatttggtttttagaaatgtcaagcataatagaacgattagaaaataaattattccaaaaccattgaggaatgacacctgaaattccagtgttggagatgtcgatttgagaaatatttttttgtgattttagccattgaggaaaatgaggacccaagttccaatttctcaattccatgacttgaagagaaaatggaggagcccaatttgaacctactttcatgcttagtttatttccggaagcaagtacgaacttgagctttgtgaggttggcaaaatgaacttcagacacatgacctttgaaatcatttgattcaatgagaagatcttctaaatttgcaagagacccaagacttattggaagtgacccacttaattggttatttgaaatggagaggtgttttaattttgagagagactgaagactttttggaattgacccacttaatttgtttaagtaaatagaaagggattctaaatttgagagagaagcagggaaatctgggagaggtccactgaaattgtttgaagaaagatctaatgactttaaggatattaaatttccaaatattgacaatggaatgggaccagaaaatttattatttccaaggtcaagaacatgtaaatttttaaaatgtctcatgccatccaagatttggccagtgaatgaatcaaacgaatttgctcccaaattcaatgacttcaactttttagcaaggcaacctgacaagctttcaaaaaccattgagacactgccttcgtaattatttcctgtcaaatcaaattcctccaaattgcaaagttttcccatggatgttgggatttttccttccaaagcattaccactcaagtctaagctgactatggaggtcaaatttgccacatcacttgagataattccatgcaatttagtttgaaaaaggttgaggtgttcaaggttaggaaaactataaaagcaattgggaatgacagagtctatattattgccagacaaatcaagatatttgagaagggtcatgttttttgggaaggtacaagggattggctctctaagctcaatagaattgtaactcaagtcaagtgtctcaagggatgtaaggttaatgtgagatggaaaatgaatatgactaagttcacaagaggataagcgtatttctcgcaaggaagggattgtgttcattgcaaaaagccagtgattagatgctttactaagattaacttgatccatgactagagattgaagtgaagaaagacctgagagccaatgaaggttatccacagataatatttcattttcatctggattgaaaaaagaagaaatagtacttcgaagagagaggtgagtcaaacttgacagatttccaagttgatgggggatctttccgtcaaatcctgccattgtgaggtttaaatatttcaaactcatcaaagaaccaatgaaagggggaattcgagtccccttaaaatcattctggctcagatctaagtgagttagatgtgtcagattaagtaaggagggatttaccttgccacttaatgaagcatcgactagtcgaagctgtttgacatggccagtactgatgtcacaaacaattccagtccatttgcaacaatcatcatcattgcttccattgttgatggaaacccaagaaattagcttgttgaagggatcgaccaagtctttcttcaagctcaaaagtgcttgcttctcactttcgatgcagagtacatgatcattagggtttcttttgaaagaagtatgagtagttgtagttggttgcactacaagaaagatgaagttgatgagaattataagaaggagaagagtatttgcaatgagtttagttgaagataataaagccattttgatggatgggaattaatgtggttgcattgcatgaatatatataacctctatttaagaatactctattcaagaatatcctttaatttgttattaaaaaaattaa

SEQ ID NO: 233750 - DNA, 1312 bp, Cannabis indica
tgatgatgagccatcaggtcttgctcaggcaaacacttcttccgaagtgcaagatacttcatcttgcctttaactttcttgattattatgctttcaaacttttagcgctgttgtctaaccatgttgcttttatttcattcagacatgtctcaaaagatgctcaaagctctaaagaagagagtgggaggaagctcgggcctatctcctctggctaagaagtctaggggtggtgagacaaccccatccagagaaagggcgccggccaaagtagtcattgacctcttcaaggagccaaccgtcgtggacccttctgccccataagtgactaagtccaaagactcttgaggatggagctcggacaagctggaatagccgaaaggcgaattcgagctggccaggagcagatttgagcagatttgggctcctacccaacctccagcactgcatccagagactaagagaggcaaggatatgctcacccacaacgtgactcggtcagtatctgaggtgaattagtagcttgctggagctgacaatgagctttccctagagctggtgatgggaggagtcctgaaggagtttacgagggtaagtcctccttgatagttttctgttatccttctttacttagctcatattctaatgctttttctgtgtgcagacaagtctgaagatggcttatgcttattccggggctaagttttcttcttctaagaatgctaccatgtctaacaccatgagggcagaagtggacttgaccaggaaggatgttgatgaagccatggttcaacttggagctgttcgaatggaactgggtgaagtcaacaagaaacttcttgctgccgagaagaaagtagctaagttgtccaaagatttagaggcttctgatcaacttgaggctgtcatgacctccgtgtccaaagaagtgaacaacctccaagaagaaagggaggttcttcgagctgtcttccgcaggttggaagcagagaagaagtctaaggaggaggagcttgaagctgaggtcaagaagtacaagttggaggctgagcaaaagagagcagaggctgagcagcagagagcggaggtgacgaggcttggagggaaggtaaatgccctagagacatcgggtctcgagattttttatgacttttgtaaagctaatcccaaggtaaattttgattacttgggtgattccaaagacatgtttctcgagtattgtgcttctcaggtggcctatggagaatccaaggtgaccacttctgcccctgaccaagacgttcacatgccccccactcagacaacagatcctcca

SEQ ID NO: 233751 - DNA, 1397 bp, Cannabis indica
atgaacagggcatccaactcccaatagggccttttacgactttcagttgcatgacaaagctcattacaatcagaattaaacacaagatttgtcacaccgagttggaatatgattagattcacggctaaaatccatgcacgagtcgcaacttcaagggctgaaactcatgtcgtgaatacttccgtcttaatcgaagacactctcccatgttcgtcaataataataacaacacctgcagtggaagaacccgagacaaaagatgcaataaagaacactctagtcttaaccaaagtacactctactgttagtagaaattgcctggcataacacaggtctagtactggagttcacctcgcgaactcttcggtttatttccttagtagagaaagaggtaagactaaattatcatagaatttcttattccttgctcaccaaacacactcacacaatgtagcagtaaaaacaataaattgatgtttgatctctgtctctacggaggaaaggaaagtagcattgaacatccactcaaccaaatcataatccgaaatgaactgatcaatcgaagtagtgtacgaataccccatttgcttgaaaaccacaatgaactaaacaacgaactcgagaacatgctaaatttatgatcacttgtaggaagacagcccgctgccactttccacggagccttaacctctcggggatatagggacttgccaaatttttgaccacaaagaagagatgatggtgaacctatgtttgttcaaagcccaataaacagatttagtgctaagttatacattttttgatctcctccataataataaattgaaaaattagcatgaaagtttttaacttgtcagaatatgctccacagcctccggaaggaaccaagaggaaattttatcatatgacaccacgacccagtatcaattaaaagctcacacactttaggagtggactcgatagacattggattgaaggccgctcttattattatcccaattatcccactacaaccacaggtcatgccaaacatccacattgtgaccaaacccatcaagtaacatttctcattttgcaagaaatcttccatttcgaagattccccttgccacaaaagaacaattcctaggaatggagacattccaaaagtttttgttgtgaagatatttgcagttaaaaatcttgcacctaagaggcttagagccaaaaaccaaattccatccaagcttagttataagggttttatttaaatctttgcatcttctaaaacgaagaccaccacacattttcggcttacaaagcatacccaagcaacaaagggcaaagtaatgatgcttgttctcataaccaacccaccaaaacattctagtaaccttgtcaatctcattacaaatagct

SEQ ID NO: 233752 - DNA, 1342 bp, Cannabis indica
atacattatatatataatcatgaaataaattatgtgaaccatgcacaaaacccaacaattacagcccttcaggcgggaatctctactgatccatcaaccgctgggggcgagctgtgggacgacttatagggtcgtccagtgagaaagatcactaagttcaacgaaagggctcaagtgttcgtttgaaaagaggaagcccgaaaagaaatgaatttgttgaaaacaggctcgggaggcaaacccagtaatgtttcaacaagtactgtctcaatgagggttgataactcaagggcttctcgctcgaagaaaaaggacaattctaaagaaccgtcaaaggataaaaagaaacgaaaaaagcacgataagtatgtgccagtgtatacaatttacaccgagcttaataaaactctggagaatatttaccttgcatatgagcaaaagtttgccttcagcaagcccgagcccatgaggcatgtgaggaacaaaagagatcctaataggtattgtaaataccataaggacattgggcacacgaccgatgaatgccgcctgttgaaagatgagatagaaaatctcatcgctcgaggcctcttcaaacagtacgtgaagagacagggcaatgggcacaaccagcccagtctgcccaataacccatacaaccaggggttacaacctcttcttgttgaaggacaggacatcctagttatttttggaatgccacatatcgcagggagagcaataacgttcaaaagagatatgtgaaagagataaagaatgggtggtcgacatttgccccagaaccttccaagaacgtaaaaactaaggaacctccaatcatatttttagaggaggatgagaagaatgtgagatatcctcacgtcgatccattggtgatcactattcaactcgaccaattaaaggataaagagggtgttgttagataacgggaactcagtgaacatcctttctaaggaaatgctgagcaaaatggggcttgaaaaggccaaattgaagctctgcatgctaaatctttgcggcttcaccggcgacagtattgccagtctaggcataatcaagcttgcattaaccttgggcgaggcacccttatccaccacagttatacaggactttctagttgtcgatctgccctcggcttacaatacattgttgggtcgtctagcattgatcggactcggggcagtgagtttgatcaagcacctatccttgaagttccaaacaccagaaggtatgggagttgtgcgacgcaatcaaatgctagctcgtgattgctatcgcatagagttatagcatagaaaagccggtcatcagttaatggcgatct

SEQ ID NO: 233753 - DNA, 1133 bp, Cannabis indica
ttttggtgtagtggttgtctaaacttaggtttatgtcaacagtagtggtttaagtacgtcattttttttaaaaaaatatatgcaacttatttttaaaaaacctatttaatattttttttgtatagagagactgcccgccaacaaatcagttatttagaccatccttttacttcttattaatattacaaaatcctacacgtacacaaaaaaatcattctatacctataaatcatataaaatactactactactaataaataaataattcaatcacacacttaatatataaattaacaatatatttaaactatgtactatatagtgagccaaaaaaattgttatgagacaaaagtgtcatgaagccgtttaagattagtgtgcaaaaaataactactatcttgaaaggatgttaaaaaatacatgaaaacttaaccagatgcataagctactttactcaatatatataaattagatttgaaataaaattctatgcatcttaccgtagacatcgctttcatctactttctcctccacactatatttaacaatactcaatatttaataatcaatccaatcaatatttcaacagtacacgacaatttgaaagacaaggccgattgaagggttgcaaagcagcgaatggagctcctattatttcgcatatgtttttcgcggacgacaattacatttactgccgtgcaaatgagagagaggctactagtgtgttgagcttgttgaatatttttgaaatggcttcggggcagaaagttaatttcttgaagtcatccatcttttttagcacaaacactcctatagctactcggttgagactgtgaggtatccttggtatgactgaagcaaacgaaaatagcacgtacttggggcttccttgtacgatggggagaaataaagatgcggttctggggttcttaaaagacaaaatgcagaagaggatccaaagttgggagggtcgatttttgtcaaaggcaggaaaagaagtgttactgaagactgtggctcagtctattcctagttatgctatgtctattttcttattacctctaaaaacttgtagtcatttggagcaaatgatggccaagtatggtggcactcgaattcaaagaaaaactcgt

SEQ ID NO: 233754 - DNA, 2800 bp, Cannabis indica
aagctttatattttaaggttataaataaataaatgttttgttttaaaaataatgagatctcatgcttagttatttttcattaaagaagtctttgattgtcttcatcttaaatggttttaaacggactagctagtgtgacgtctcgggaaatcggggtgttacaggtactaaaaacttgtttggggcccttccttctaagggcatcagtcactacattggcctttcgaggatgataaggaatctcacaatcgtaatccttaactaactctaacaaccgtccttgtctcatgtttagatatttctgagtaaagaaatacttgagattcttgtgattggtatagatttcacattttttcccgtagagataatgtaaccatatcttcaatccatacaccacagctccaagctctaagtcataagttgggtcacactgctcatactcttttagttgataagaagcataagcgatgacactatgagcttgcatcaaaacacattcccaaccctatctaaatgcatcacagtaaaccacaaacttttctttatctgacggtaaggctaacaccagtgttgtgattagtcacttattcagttcttggaaactggcttcacacttatcataccacataaatcgtttgttcttcttagttaattctatcaatgatatggagatcttagaaaatccttctacaaaatgacgataatacccagctattacaaggaaacttctgacttcaagaactatccttgaatactctattcataagatccataaaggctgccagagcattagtcaatctaaataacatcactagaaactcataatgttcgtacctcatatgaaacgcagtctttggaaagtcttcctcttggattctcaattgattttaacctgagcaaagatcgatcttagagaagattgtcttcccttatagctgatcaaacaagtcatcaattcttggcaatggatacttgctcttcactgtaagcctgttcaactcctaataatcgatactggagctccccagggcgatacactgggttgggtaaacccaatgtctagcatctcgtgaagttgaacttccaattccttaagttcagaggagccatcttgtatggtgctttagaaacaggtgctgctcccagtatcaggtaaataacaaaatctatatcccgctagggtggtaaaccaggcaattccttgagaaacacatcctagaaactctttgatcactctcacatatttagacccaactattttgagtctacttgtatcaatcactattgctaaataaactatacacccatcttgtaataagtctctagctctcaacactaatatgattggaattcaagaacctagaactgctcccacaaatacaaatggcttctaacctaccagttgaaaagttaccatctttctcatgtagtcaatactacctgcataattggataagaagtccatccccaaaatgatatcaaagtctcaagggataactcgataagatcaatacttaactccctatcatacatcatgattggtacatccctaatccaccttttggagataactaactccccactaggtaaaagggttccgaaccctagttggtaattatagcagggcctacctagtttatcaattactattgatgcacataagagtgtggtgctctagagtaaaataatgcagtataataggagttattaattataagttgacctggcatcggcatctacctgcgtgatggaaaatacccgagtagaagtagatatgaactccttctttggctcttaccttttcgactgagggcactccctcttaaagtgtccaaactgacaatactagaagcaagaattcttgttgcattctcccaagtgatgtttcttaaaacgaggacattctgggtacgtaaatacaccttgacgatcaccactacgaccttgattcccgtgaaacctcttgttgtgtctagaactgcttggtgtgaaaggagtcttccattttgaatcaagaactgaatcttaactactcctacccaaaccagaaggaggaggggcagtgactcctctagaacctaagtcccttggggatcatgcaagaactgtatagcaccttcagctcggagagccttctctaccattagtgcatatgtggtagcattgtcagtcgtaattgtcaaatcacgatgaatcttggcattaagcccacattggtatttttttcttcttagtgtaatctgtaggtactatacctgaggctaatctggccagtcattcaaacatgtccgtacactctgtcactaacattgattcttcttgaactaattgtgtaaactccttccatttcggactatggatagcctcattattatacttagagttaaatagatcttggaattcattccatgccataataatgacatttcgtgtgagcgatactgactcccaccataccagggcatcttcttagaactaaaatgtggcacatgccactctgttgctattagtgactcccataaaattcaatacccagttcatagtggttagccattgaacaactttcataacattagggcctctcagaaagatcagaggtccttgtttctagaactgctcatacaatggtattaacttgttactagctacaagatatcctgctagcaacactagtcctggagtaatacaaatatgaggaagaggaccaacctaagggccttgctgccttagcctaacgatcacctcatcttgttgttgtattctggcttgcaactcagtaagcctttgctcctaatcttgt

SEQ ID NO: 233755 - DNA, 757 bp, Cannabis indica
aaaataaaaattattagcaataagcatatagtattggtatgatacatatatgacttttggtctacatgtagagagatacaaaattattaaaatattagaaaaagagaaaaataggtattgaagataataagaatcttaggcatgccacataaattctctaaaacattcctttatatatatatactagaaaacaaagtcgcgcttcatgcgtttttgaagcataatttaaatatatatatttaatatcatatttatttaattaattataatattttaaattatatatttatatatagaaaattatagttatttaagacatcctgcaaaattttaaaaaattcaaaaaaatttaacacggtaaaaattgcgtttaaacagtgtgttgcatgcacgtgtgactattttattttatacgcgtataaaacagtattgattaaacattgttttctatattgtaaattattctaaatttcttaaaattttgtaggtataaccagggtcggccctaagcataggcgggctaggcctgtgcctagggcccacctagctcagggtcccaaaaaaaatttatcccctttaaattaaaattacacattttttttatcaattttgaaaaaatatcatatatttttctaaatgagggcccaaaaatattttttttccctatgacccactaaatttcagggtcggccctgggtataacgtacatgaatatgaaaaaaaaatagactaagaaattattttggataccgaaaca

SEQ ID NO: 233756 - DNA, 524 bp, Cannabis indica
tatgttattacttccaattacaccaccaaaatgtagatgcagctcaaagtgtgcaaaacaacaaaatgagatattcgggctagtaattcaaaatagtgttaatatcatttttgatatcatgttttgtaaaaattattaattagactatttattttgttaaataataaaatagatcatgtatttttttaaaatagtataaataaaattctgaaattaattttcgacaatttttatttttaatataataaatttgaagacaattttcagtacaaataaatataataaacgtaatcagttctattaaaaaatttctatttcaagttattattaaattttattatataaaaaaagttaatttaaagtactatttacttggcgcaggagctttacaaagcatcaaatatatcccccacctaccaaatgctttccttaagagtttgtttatcaaattaatctctccttttctcactttcctcatgtatctattacctttgttctaagataataattaggctaattaggat

SEQ ID NO: 233757 - DNA, 1101 bp, Cannabis indica
ccccaccaaaactgcgccatgagtttttcaattttttgacaagttgaggcaggaagtctgaaacaagacattgtgtaggaagggatagcttgaatgacagcctttagaagcacctctttaccagcttttgaaaataacttttcattccaaacagagagttgagaacttactctttggagaagaaaatcgaagctagcctttttcgagcgaccaaagcactggggaaccccgagatatttgctaataaaaggccctggctccagatgtaatgaatcaaagaaatatgacctgacagatggaggggtatttggagaaaaaaggatggaagatttagagtagttcacgctttgaccagtggcaagattgtacaatgtgagagcttccttaagggcatcacaataagagggagaggcgatggtaaaaaggagggtatcatcagcaaaaagaatgtgggaaatggaaggggctgtacgcgcaatagaaattcctttgaaaaaacccctttgctcttgaagacggagggcagctgcaaggccttcagaacacaacagaaaaagatacggagataaaggatctccttgcctaatgccacgagaagggaggatagggtccgagacttggccattgatattgaagcggattgtaacagaagagatacagtgatgaataagattgataaactttggtggaaaattaaacttacgaagaatggccaaaagaaagtcccattccacacggtcaaaagctttctccatgtcaagctttagaccagcccaacccagtttcccctgttttctatgattaatggcatggaccaactcctgggcaatgaagatgttgtcgaaaataatgcgctcagacaaaaaagcactttgtgcaggggagatgatactacccagaacaagctttaagcgattagaaagagtcttagccacaattttatatagagtcgtacaaaggctaataggtcgaaagtctttgagagtggaggcattagactttttaggaaccaaaacaataagagtctcattgatggcagagagatcaacaggattgttaaggacattcaatataactgcagttagatcattgccaataaca

SEQ ID NO: 233758 - DNA, 1603 bp, Cannabis indica
tttctaagctccaagcacaaaaaatcacctaaattccttaacttttctccaatccaagctttaatttcaaaattgtataatactgaagatgatgataaagagagaggaagagggggtcagttagagagggcttagaaaattagaataataatttttcaatattcttaaaattacttttggttgaataatgcttaaatgatcaaaaggccaaaataccctcatagtcaaaataagcatatttatataggcaaaagggtaaacttatcatttcatcacacacataataacacataatttgagatttctcacttatcatataaatgccaaattaaaatcccaaaatgtactttgggccccgaacccagttccgcccaaaatacctagttgtgaatatatcacgccgacttgtcaaaaaatacccgtagatagacagaataaacatactatatgataatatagtccacaagcacgatatatcattaaaagtacaattttacccttctcgggtcaaaattacaaaaataccctggtacaccaacaggatcttaaaatgcaattatcagtatcgtttcacatattaaattatataataatataatttcacattaattcatatttaaactagttagggttgctaatccgatttcttaaccttagggtattacataaccgtttacctatatatctttgtaaatattatttttaagttgagggttgtcttgcttccaatttttatatgacagcccaattatcatatggcatctcctaaatgtgatattagattgctatagtttttgccacaatactctcatttatcgttgatttggagaggaagtcttttttcttggtccatcaacttactgattgcgttcatctcagttttacctcgcttaggtatcaccttaggacactctacatctgggtttaaatttgaatttgagtctgaacctgagtttgccatatacctacatcattaacaaatataatcacatgatagctataacataacaactacataaagaaacataatcatcacaagtaagttataacaaatagtaactacagcaactaacattatcacaagtaagttactaattagacactagatctctttccttttttagtaaaatttatcataattctactaaaatttggcagcataatagctgcaattggatgttcccaaaaattttaaacataccaaaattaacaaacaaaacaaataaaataacattaacaatacaaaaattatctatccatccgaccacagtacatgtattcgcagaacctactttactatggttgaatatgtaaaatattcaaaatcaactaacatgcacattattccacccatctgatcacagtacaatatatcgtagaatctatttcactacaaatgaatatttaagatattcaacctccattaagcattgataattaattaataacaaaaggttagtgaatgtatatacctttagcaagctaaaatacaatcaacacccaattattcgaaatcttaaaaattagctcacaacctacaatatattgaaatacaacaaattaaaattttaattatttaactacttactagttatatcattta

SEQ ID NO: 233759 - DNA, 714 bp, Cannabis indica
ataaaaaacaatgattattcataggttgaaggaaggggaaaatcctagaaatgtgaatcttcattttttggatctatgggttcatatttatgatatggaacatggttttcaatctctaaaggtggtgacggatattggtaatttgatggggaagtttgtggaatctgacatcaataatttctccggggtttggagagaatacatgaggatccgagttactatagatgtcgacaaaccccttcggcgacggatgaaaattttcagagaggatcgtagttggttctgggcaaattttaaatatgaaaatctctcaacgttttgtttcatctgtggaattttgggccattctgaacgattttgtcccaagctatttcatactcctgcccatctgattcagaagccatatgggttgttcttgaaagctaattctaagcgggcgtctgagaaaataggggcgaagtggctcaggtctggagctgctgggggagtgctcgagagaggagaaggcagttctgacgtggtgactccggcgatgttcggggctggacagacggagacgatggaggaggcgattgaggggagagggaatcgtgggctggcagctaagattgggggcgtgggagttatggtgcgtgatttaagggaggaaatcgtggagggagattcaaatggcaataaggaggatattcatgtgattaatagcaatgattatat

SEQ ID NO: 233760 - DNA, 892 bp, Cannabis indica
ttttatatagaatagaaatagatgaacaatttttttgttatatattgttttataaatagatttttatttaatttgaaagtcttctataaaaatgcatatggaaattcatgcaaaaaagcacattgaggagataaggattaaattctctattagaagcgaagcttaacttgattcctatattgatgatatatatatactagaagaaaatgacgtgcgaagcacgtatacttagttttattctttgtgtaatgatacaataaataattgaaaaaaaaattattaattatattttgaaatcgagatctaacacttttcgggttataattttattttagatcaaatctatgtgcaagacacatataattagttttattttaagtgttatataagtctattataaatgatataacatattatatatatagatatatgtaatttaatttatttttatagtttaattgaatttgttttaatataaagtaattaagtcagtatagattaatattaactattctatagagttatttttatttattcaatgatagtattgtaagtttgcaactttaaaataaatattgtatgcaatgttattgatattgatttaaaaaaacggtctaacacatttcatgataattcaattgcaaattatttataaattattttaaaaacaataacagaatgttaaaatcataaagtaaacactgtgtaaaattgtgaaaaaagacaaaaaaaaattatttctttttttttttgacatgaagtgttgataattgaagaatttttttgaataaatattgtagaaaagaaaaataaaaattatgtagatattattccattaaagagttgtaacagagttcacattatttattattatttttttttcgcttttatg

SEQ ID NO: 233761 - DNA, 925 bp, Cannabis indica
aaagttgtactaaacttcagtttggtacccatggctcatttaagactctgtcaaaattttgaggtgaacttcggatctctatccgatataatggacttcagagccccatgtaatcttactatttaattcacgtataattctgcgtactaatccactgtaaaggttctttttacccatagaaaatgtgcagattttgtaaattaatctaccacaaccgaaatagaatcgtacattctcgtggttctaggtaacccaaccatgaaatccatggtgacatgtcccacttccattcaggaagcgtcagtggctgcaacaatcctacaggtttctgatgttcagccttaatctgttgacaagttaaatactgggatacaaattccaccatatctttcttcatcccgcaccaccagttgtaaggtcttaaatcttgatacatcttggtagtgccatgatgcagtgagtaaggagtggtatgagcttcctcgagaatctcatttctaagttccgcactacctagaacacaaactctagttttgtacagcagcatcccgttacctgacaccgcaaaatctttagcttaaccagctaaaacctcttctcgaatctttaccagttttggatcagttaaccgagcagcttactctatttaacagatcatattgcaatgttaaattatggagtttgcctacaacaaactcaatgccagatctgaccatgtcatctgctagctgaggtgaaatcttaaccatactagttatctgcccaggacccttttctgctcagggcatcagccaccacattggccttcccaggatggtaaaggatttcacagtcgtaatccttaaccaactccaaccaacgtctctacctcatattcaaatctttttgagtaaagaaatatttgaggctcctatggttgatataa

SEQ ID NO: 233762 - DNA, 1155 bp, Cannabis indica
agcttccaaaccagcagggacaacacccccgcgtgaaacactgccagaaatagaactagaagaacaagctaaaaagttagccgcctggttcttggaccgtttaataaaattaattgaaataggaaacaaaagagaggattgcataagagtaacataatctgaaattaaaagccccaccggagacaacaaacgcttcttttgatgcacgacttgcaccagcagcagcgagtccgactccaaaaccacaccagtaagcacacgcactctctctatcttagaacgattggatagagtctcacaaaaaaacacaacactgggcttcttttggatcacaagatctttaaggaattgtaaagtctatgggttcccaagcacatggcaattccaagataaaatattcataatgattggtgggtctggacaccagtacccaccaaactcaagttatttgaaccatttaccacttcgctcgttgccacatcaaccctcacatggaccccatcagtatcttccaaagccgttcttatcctcttcgtgtcaagaaccataagataagccttctcattgatatcctcagataatcccttatgccatagcagctggtaaaatatcttccataattatagggtccccattaacaacctttgatgttcctcacgttgaaccaaagtttcctccactatcatcggactcaaccccagcacaccacgattctcctcaaccattaccatcgtcgaccgagagacctcaccccgagctgcggtttttgctacagaaacatcgtccaaagcagcagtaaactgcttaagccatttagctccgatcatgtgatttctacgtataggtctcactcacatccattctccatacgacttgattatttgaccctctccaacctcaaaccgcgcgccgcggacaaactaataatgtcaaaaccaattgatatttgagagagtagccataccacattatttattagatcccttatatatttttatataaaaatatatatttttctccttttttttaggtagagctatttttcttttcttcttcatttttttctcctttttttttattcattttttctttctcctcatcaactttttttcttcttcttctatttttttttaattttcttttttttccttcttc

SEQ ID NO: 233763 - DNA, 2308 bp, Cannabis indica
aagaaggagaatcagcatcaaagaaaggagagaaagagatccagatttagatcttgataatgctctgctacagaaaggaatcaagggctagagatctgaatggaaggagtcaggggcggagcaaggacttgattattaggggggccaattattaattttttttgaaaaaaaaaaaatctataatgcacccctaactaaaaaaatcgctttaatacattttctatcatttttgacatctaagtaagtttttagtgcaattttttttattgatcgtgcatattatagttttttctcaccatttgtaatttttttttagaaacttcgaatagtttacagtgttgaaaataaagtttaaataattattgaccacgcttataagaaaaaatagtcaaccgtgcaaatttttaactttattttcggcactataaaaatttaaatttttcctaaaaatttacagataattttaaataactgcaatatacattataataaaaataatttggactaagaatcctgaatgcaaaaacagttaagtagtgtaccgacataactcttttagaggataaactatagaattatccaatactttgtgtaacatgtaatatctatatatatagtgcatttcccttaaaatcattgttttggcactcttatttgtttctgcattcaagaaacttttcgattttgttttcatgttcgtgcacgtttgtaattatttagtatcacttataattttttttaaaaaaatccaaattacagtgccataattaggttaaaatattttattgtattcataattatttttttatatatgcgtagtaaatatttgtttaaactttatttttagcactgtaaactatttaatttttttaaaaaaaaactttaccagtaatcttaaataaaataaaatatatgattagaaaaaataatgaaaaatttatatattttgtagttataataaaaaatacataataaaaattataatttccataaatatacatattatttatatgataatttttaatttaataaattaaatttttaattacacatctcaataaagaagcattagtatcaatcttaattatattttcataaatatattgataataataagttgttaaaatatattatactattattatatatctaaatgtttatatatagcagtaaattaaagacattaattatacatatatttgttgatttatttttttggaaaatttgaggggggcgccatggccaccatacaccataaagtacctccgcctctggaaggagtcattatattccgctgcactcaatgtaaggttttcttgaacccttatatgtttatttcattattttagaattcatattaggatattaatgaaacatacatggtagtaaatctagatcctggtaaaatagttccaacagtgacctcctgggaagttttctcaggaagcgtgcgagtgaagacaaagcacgctgaaaacactcgtgttgatctgtagggtcagtcatcaatccaggaagcagctagagtgacgtactcgtgtataagagccattcttccatgggtgtaaggacccaatggaggcttgaagcggggaagttataggttgttagtgtatgggtaacaccattcgccgatcgtggaatggcactgcaagaaccaccaccaatagcagctaataaagaatatatatctaataaaatagattacaaactaaaattaatgtaaagcttattactccaaccaattgtcacagtagagtcactattaactatagagatattgaaaccaaattgatctgtagaagccaagctcacacgaatggcaagcaactccactacattagcaaagaaattacctaacacacttgatgaccacgccaaccagaccacaccctctgcatcccctatcactccccccaattcaaaaaagcccctccccagaatcaccaaagcatccgtcggtatagcaaaggattcaggagaaggtggaatccatcgagtagctcagtttacaaatgggtttgcaaggctcaatcccaaatgaaggcctcaccgatcattcttcctaaactctgccagatggttattggctaaatctggaataatatccaatcttgactgcttgttgccaaataatactaacttcctatcattctacagccaccaaaaaattgtcatcatcaattcaaaagcctcacgagatagcctgtaaaaaagtaataggagaatatcctgcattggtccatatgcatatcgacggagtacctgttgggttttatgccttaaataaaacccattacaatctgat

SEQ ID NO: 233764 - DNA, 1708 bp, Cannabis indica
atatttttgtaaaaaccccttaaatttttagatacatcatttaacaactgatccggtcaaattaaatatatatttaaaaataatatccaatttaatttaatcacaaatatggtcaattataattgaatgatctattataattagattggatcaatttatttacagttttaattataaatacatataggctttgaaaattaatgaaagggaaagatcacaataatataaattatatataatattattatatatgaaagttggaagtatgtgccggcagcaacatgataatcatattatacatacatatactattgttcttatatttttttccttcattatctcttcatcatttattatgtattatgttataatttatattgcattgttataaagtagtaatagtgtctaataatactataatcattataatcatgagatgatattttattaataactagtgatacttataataaatattaaaataaaatatataaagtctaatatttaattatgttgtagtattgtagtattgctacttagtacttactactactctcttacaattttcttttatgttatatggtacatgtttcactcaaccttcataaaagctacacatctagctagtacaaatttttgaatttaaattttatcaattactattttttatcaactacctacctttcctattttttttatatatataacttttattatatgctccatctcaattttcatatacctactcatccatctagttcaatagaacattgttatgagatatttaaggagcttagcactacgatgaagtattattttataattagtaccaatagagattaaaataaaataagtggaattagatattaaattgcaccaatagagatactacacctcacaaaagtgttacacaccataaatgttttttagcctttttcatttcaattattcacactattcaagacagaataaagatagaaaatagaaataaaaactaagcgtaggaactctcttcaaggggaagccagactaagcatagctctttaggaggaagttagaggtatagaaccaatagtcctgaaaatcatgtgtatacttcacggagctaattagacagactactttcttggagtagcgttccagcctgtaaaagtctatcttctccttatggcccacatgagctgagacttaatattgtagaagtacaagatttcttccgatgttggtgcaacttttttgtgctgagcacaaaagatataccacctagatataaggcgatgcacttgagggataaacagaaaaggtgccattccggctactgcagaatttgacaaagtaacaccttaacagaaggtgtgcgaccatctccacatgggcccagctccagatgacgaagcccccttccgcgcacttgcttggctgctctccatgaatggaaagcctattccattacaatcctgaaacactctcaagccctcacaagatctcgtacttcctaagattattgtaaatcctaaatttgttcatatattggtccatctcccatggattattattcagcaccaattttggagcgctcttgttctccagaacttcttcttccaattcaacctcttctttttgaatcttcttagacataatttctataaaaagaaagaaaatcaagcaattagttatctaaactacctgatatatatatatatatata

SEQ ID NO: 233765 - DNA, 717 bp, Cannabis indica
attaatggtagtctcggtaaagggaaaatgggggctgcattaaagattaacaatgattatatacaggatataattaaggtgcattaattaaagaaagagaagaagagggaaggaaaaaacgacggttagaaactggaagaaaaccaaaagaaagaccctagaacgttccagagcagggagaaatttgctagtactatacttcttgaaagtctcagccccatcctgtgattgatgcaaccataaaatgttgccaaattacaaatcacctcacctttggtggggtctttaagctgaggttggaatttcaaccttatactaaatttgatattgcacctgtcaataaatgttacacagttaaaaattaatgataacaatgctcaaaatatcattcaagattagatattctatttatggtatagtcatattagaaaatatacctcccacgttgcaaattccattacattgtgccatttcaaatcattattcaagctctcttaaaacttaatatatgatacacccttctaactttaaaaggttattaggctaattggattttaattaatagtggactacaatttattggacaaattatagttataagtctcatctcatgtacttttaatacatttagggttcgtttttcaacgtcgtattaggtcgtattgtaatggaatatattgaattggattatatatatcatatttttatataatacta

SEQ ID NO: 233766 - DNA, 1107 bp, Cannabis indica
aaaagaaagaaagaaataaaaagcagcgtgtagattaaaactaaaaatgtgggcgactaaactaagcttaacaagaaaaaagggcacgtaattatgtggcaacgttatatttaacgttaaaataaaatagttaaatggccaagttatttttgatattaagatctaatttaaggtgcctaatgtaattatcccaatataaaattagtggtgagtccggaattgttgtgcataatatgcgggagttgtgaaatttgactttgtaggattttgaatttcgaagaagaatggaatgtggaaaggcattactcactgctaactataaatatttattgtttatttaattgaaaaagtactaataataaattgtaggggtgcacgccaaatttatacagtaatagattagctgtaataggcttagcttctgtcaaatattgaagaatatgaatagttgagtaggcttctttttgaaatgacattaattattaacttagtaattaagtattaattttttaattaaaaaaatttataatttcgggttacgggttataacccgaccagaaaaaaatcaaataatcaaatccgaacccgaaacccattggagtctttttcgggttgaacccgacccgaccacacgggtttttggatgatcggtttttttgacggcgggtcggggcgggtagtcaggttttttgggtttgtgggtctaaatatgcacccctagttgtaaataatgaatcaaaaagtgtattttattcaatagaataataagtatttatatacaaaactaggaagactaaataggaaactatgaagaattggaaactaagtaattacaattctaccattaatatacagctaatatatattttaacacttccctcaagctggaacataaatattaattatgcacagcttcaacccgcacactattcaaagccttagtgaaaatacctcctaagtgttctctagtcttcacatatcctaaggttttagcataacccttggcaacaagaccgacctttaagtgagctcttgttccatctagattgactttaaccgtaaacacccatttacacaatatggtccgttttcctaaaggtaaattaa

SEQ ID NO: 233767 - DNA, 980 bp, Cannabis indica
attagtttaacttgtatagaagatgtttaaaattaacttataagcggtatctttaaataaaattaaagtctatcttaatttttttcttaacatatataattttcattaacgtgtacaattgagtttactttttattatagtatttttctattaaaaatgaaatgaaatttcaaattttttattattatagttaattaatctatcaatccttcatttttttcttagtttaaaatttcttaattatttatttatcaacaataattttttggtattcattctccttttttttttataattcttaatttgtctaattatttttaacgattaatgtatatatttaaacaaaagcaaatttaatatagaagaaaaatataaaatttgttaagatagactttttattattatcaatttaattacttatcatataataattattttgatgactaatttataagttttgaatttgatatcaagaaaacctaaattataaaagagataacaaatcaatttttatttttttaaagtttaatttattgtatttagccaagttctttaagcataaatattttttttcaaaatgtagtattaatataataaaattatcaacaaaatattttaatgtaatgaattttggagatgtccaaaatgtaatattaagtaaatattatttttgaatcttgtattttaaaaattgccgactgggctatttattttgtcaaataatttatatatttttaaaataaaatataacttggaggtgttatgaccaaatttactacacattttgtatctctttgtactagaagctgactttaaattttttatcttaattctattaaaaaaaaaaatttgactaaaattaggtggagatagtagtattatattttatttttaaaaatataaggtccaaattattttttaataaaataaaatgtccaattagtaagtttacatatgttatagattattattattatgga

SEQ ID NO: 233768 - DNA, 786 bp, Cannabis indica
attagtcatatctaataaatagtggctatatttttattgaacaagttagctcactcaatttctatatgttctttaattagtcatatctaataaatatttccagtactgagttacaaattccgtctttcaggctgatcaatctggaactgtagcagaggtattggctgaggacgggaagcccgttagcgtggacacggtaacctttttctctctctctctctctctctctctgtcccgtctatttatatgtatttttatctcaattactgatctaagcaataaccactgtcccatgcagcctctgtacgtgattataccatgagtaacttgttggctgagaacctttccaaggttgttcgtgcaagtgcaaacactgtttcatgagtttaggtctgcaactgcaacggttaatgtgttgtattttcacttttgttagtacgttgtttgtttcaagtatttatttttatttaattttccgacaacaaacttattaatttaagagtataatatggcaaaatgctgaatatgttgcgcaatgagtgagtaatgttaaatattgaaatggcattgacagttttgggtagtgtaatgattttctcttcttatacatctcttttattgcgtggcttgtaaatgataacaatgagcattcaattactgaatattataccttttattcaacaaaaacacccacaaacacaaattagtgaatattatcaaatctacctatcgtaaatcttgaaacaatgatacctatcaaggctatctaattattcattttttcga

SEQ ID NO: 233769 - DNA, 1457 bp, Cannabis indica
agatgaatttattattatttctgaggtgtaaataaaatttataggagtgtgtgctttgataaactaatatagaaaaatataaacgacaattggatccaagagtcgtattagtttatctcaatagacacaaataacaccgtttcaactttttagtattcattttagtgaaaacatatagaactgattatttaaaccgagactttccccctttacaaaaggttgcatgtctgtagtttcttgttcacaaagttaaccactacacttagaccatccatcaaaggtatgctctctaaatagtttctatggtttcattttttttagtgttttttcttttgggagaaaccatttagttttacttttggaaagattagttggatgtactggtagaaaggttaaaaatagagaaatagatattgtatgcttaccaaaagaaggaaaaatagatattgtattgttaccttgtttaacagtacatatgaaaatttagcttcttgaatcgcaagtaattaacaaaatatgccaaacttgtaagtcattttcatcgaaacgtaatgttaaaaaacaaaactaatatttttcttttgtcgttttctttctccttattctaatagggttgaatacacttgtttcattatttcacatatggaactctctcactttcttttcccaacacaatttataatccgttactcattcattctaaatccgagacctttggtattgacaaaatccaaacattataaattcataacaaccagaaattcttgttcattgtaacgcaggagaatatggaacaaagtagtaggtctatgctcttcctattaatcatattgtctatgtcaacctcttccatgtcatggctttggtcatctccatcgtcttcctcctcaggaagtgaagcgtcttcccgtgaaatcgaagtagcaagagcggaattctccgtcgacggtctcagtggcgacgacaaggcaatccaaagggtcaagaatgccaaaacaaaactatcagtcggttctaactcatgttggcatgaagcttaccaagggattttcgcagcctgctccgaaatcgcaggggacgacaacgaaaagaggaagaggtttgcttgggatttaagtaactgctttcataaggattcgggtagatcttcttttccgtcatgccacaccggctcttccatgaaggagtgccttcaaaagcttgacgacaatgctattcacacgtaccgtggattctttcttgaaactaactccatttgtcatcaattacagtaagtgcaataattctatatactcgacttttaattcatttatattttcttaaatttgtttatttctgctacgaatattgtgattaattagttgttgtttgcattttccagcctgaagaaataaaaatcattatggtattttgagcgttacagacttttcataattccttgtatcttcttgatagta

SEQ ID NO: 233770 - DNA, 1051 bp, Cannabis indica
tattgtgttaagttttcactgttatttcacggttgttttttagttgttccattgttattttaattgttctgttttgttgttttacagttattttatgaaaagacagtatttttgtaaaaaattccttgtgacagtaaaattgtaaatttttgcttaaaattcaacatttttataaaaaccacatttcttatcaacatttaatgcctaaatttactcattggttatttacaaaaatatggggaaaaaatagaaagatacaattttattaagaattttttgtagttaaactctcttaattattattttatttgtacttaaccttccaatatcaaattttggtggtaaaacttaccaaactaataaactattaataaatttaaggtgtcatccatttacaacagttaaatgtcaacctgacttgcttatgagctcgtttggaacgccgtattaggtcgtattgtactgtattgtattatattgaattagattatatatcctatttttatataatactgtgttaaactttaatgtatactaaaatattatatatttaggtgtccataaaaattaataccaaatataattttacataaaaatattgcataaaatacaattcaatataatataatacaatacgacctaatacggcattccaaacgagctctatgtgtatattcttatacatgtgacacatatatattagtatacttatacaaatatttaaaaaatataaaaaattcattttaaaattaaataaatgtaaagttataaatacataatgttgataatttgtttaggttttgattttttgggtttcctttgatttcccacaaaaatggtgataatttgtacttcaatttgatggggactttacccttccgtgttctatctctttctaagtttagatttatggtttgattttaatttaggtgtcgtttggtaacacttttttaatcagttttctgtttttaaaattaaaaaagtaaaaatatttttcaaaaacatgttctataaaactgtttttacttttcaattttttaattgataatca

SEQ ID NO: 233771 - DNA, 563 bp, Cannabis indica
acaccaccaacattgaaaccacccccaccacaaccacaccaccaccattgcagaccatcgcagccattgcaacaatcactaccaaaatctagatttgaaagaaaacccatccaatcccaagaaccacaccccacctctatgctcatagcatttctttcaacatgtatgctcgttctcatcatcatcctcctttatgctcgttctcgtcatcatcctcctgctcatcttcatctgtagaaaacaacccatccaatcccaagaaccacaccccaccaaggtaacagccaccctcattaccgttgacgaaggttgactcagccaccgatggcttcagccacagaagaatcatcggggagggtcgcttgggaaccgtgtacgccgcccttttggaccatcaaggagcgcaagcttggatttctatctgcaccaaaacccagatggggtttcgctcttggactggagacgacgtctcagggtagccgctggtgcctctaagggcctcgagtacttgcacgaaagggtggcaatgagagagagaacgagaagaggagaaagaattcgtt

SEQ ID NO: 233772 - DNA, 590 bp, Cannabis indica
aaaaattagcttgaagcttcagattttattttcattcacaaacggagcatgtttagcattcaaaacttaaattatttttttaatttatttttaaaaagtgatcactcttgactctaggccacaaattttgaagctaaaaatgaaatctttatccattatattttttcatttttgctcaaaaaggcttaatagaacactaaaattaccaaaattgaggatctccaaatattttcctaaaaaacaaatataaacaaaaatcaaacataattttgcacaaaaaacataataaaaatactaaaacatatcctaaattagactataaaagtgcataaaaataaatgtaacaatcctaaagaggtaaaaggctacaagctaagctatggtgcctagaaggacataagaaatacatcattagtagggatgtagagtttaaagaacatgaaatggctatgaaagttgcaaacacatgtggtaatcagataaacataaaaaaaaaaacaatgtagtaatcagaaaggtgggagtgagacaagtatgcaaatacaagttaacagggaagaaggagaaatctggttttaaagatatggtca

SEQ ID NO: 233773 - DNA, 1205 bp, Cannabis indica
caagagaattgtatgtggtatcactactctttcaaacaatactagtccaggggtcacacctagagaatgaaatcaattagtaaagtatcaaagtttacaaaagcaattgacttaaacaaatttagactctctctattgatttgtcgcaaccctttgtaatccaccttgctaatctgatctctgaatcacaccaagtagtgaattcccttcagatattgatgtgtgcttacttcctcctgaagtaaggcttaaacaaatcttctcccgaagatatatgttcactttctcccgaaataagacttggaaaagtcttctcccgaagacccacgcttgttcaaagcttctctttaacctattctaagaatagtacgagatcataatgaggaaaccaaaacctagttgaatactctaggtttttacaaatgaaacactcttctcacaaagaaagatatgaaagtatgagactataagagaaaaattcgtttgaccgctctctaggtcctatttatagaacatagcaaccctagaaacagccacaaaaatgattttccaattgtacaaaactttcttaaaaaaattcccgatttgcaccatcaaaattgggttttgtagtagtagatcaggactagaaaggaaactttccaaaatgaaccaagatcacgaatttagacttcaaccctgccaaataaagtttatttgatttgttctaataaaggaaaaaaccgaaatcatcctttagaaaaagggaaagtcaagtttcccaaagttagacaactttccataagagaattcattctcttacaagaaatttcctaaactaaaaagagatcagctgagaaggaatcttatcttagaagaaaagagtaattaaatgcacaaaattaatgtaataaaaataatttaaatgctcaataaaaatgcacattaattaaaaaatattttgacaactaaattgccaaaaaaaagacctaacaatggttatcatgacttggataaagaaagagagatattgggtgctgtaagattttaatttgggatattttttagtgtgtttcaaagtactcttaattagttttagtttcgttttgttcaattttatgctttagtttttaatattttccagtttagtaaataaagaggaagtgaacaagttggagaaaaaataattaattaattgaagtgttgtcactagtgcaccaaaagat

SEQ ID NO: 233774 - DNA, 1544 bp, Cannabis indica
tctcgactaaaatgaagcaacgttcggattctctttttgattgaataaaaggttgctagaatgtttccattttagatgagttgactactctattcaatggatgatatctttgactctcgactaaaacgaagcactgtatcagtttgttgagaaccttggaaaataattgaatatgttttattttggtatttttgtaaacatgtttacttacttgttattttctgaacttgtgtatgaatttaattgaaccaaataatttatttatttttattgatatttgtagtgtcaaaataaacaacccacaccccaaccctcatcttttacatgcctttgcaaatgaactctatagtgtgaaaatgtttcctggtaagggcattaattcacacttaatcatgatgaatctgaagttccagaaagcaaatttgctgggaattgatttatcaaaagagcaatgggttcaattcattctcaacagtcttctacctgagtataatagattttttgtatcatacatgatcaataattttaacttatccgatgtagacaagctagacgcagaattgcgtgtttatgaacaaactttgcctgcaaggaggcctccctctagttttgaagacatggacaaaaggaaagctgtagtaattgagaatgatgcttctgacaatgctgcttcttcaagttcaattttgagagctagaatcaaaattgaaccaataaatgaaacaattagagaacaaatgagcaaacgtattcttctatgttcatactgtggagagaagggacattcggaagaaagatatcttagacttcttgaccattggaacgaaggtaacgcttttatttttgaatcatgtgttttagagaatataaaatctatatggattgttgattctagatatactaacaatgtttgttcttcattgcagctgcttgaaacttgggattatctaaatccaggagagttgaagctcaaagttggaaatggcgaattagtatcggtccaagctaagggaaaagcacgcctcaagtttcagaagaaatttttagttttagacaatgttttgtttaatgcgaattttagtagaaacttgattagtgtttcatgtttacaaacacaatttcatcaattgaaatttttgagttctatttggactatttctcgtaatggatttcaattatgtgttcctcacatggaacaagagctttatgttttaagatcggatataccaattgcgcttaataacaaacttttcaatatagctaaacctagaaagcacaaaaggaaagagattgataataaagatgaaacatatctatcgcatttacgactaggtcatatgggctatgaaagactttgtgggttaaccaaagatggtccattgacaaatgtcatcttgggtgaattaccagtttgtgaatctttcctagaaggaaaataacttagcgttctttctctgcaaagggagagcgtgccaaagaacctctagggttagtgcattcagatgtctatggacctctaaatgtaaaagccagaggaggttatg

SEQ ID NO: 233775 - DNA, 931 bp, Cannabis indica
cctactccctaatctcctcctttgagtcagcttcatctcaatgagtctgtttaggcatggtttctatacaaatgaagaaaatccaagaagtcagccatcctaactacctaacattcaaagggagctggggttcctcccccatgaactgcttggagaggtcccaactagactaactatcccaaaagaaaaactcctaagagtgattcgttccaaataggaatctatgaatgacaaagagagaaaagcatatcagagattaatggtgagcccaaaacaagcatgcttgctacgaaacactcgacttcaagaaattctaaattcataatataaaatggtttgtgaagcctaaatttatctacgatgacaatcacacgaataaaaaccttaatcacatcctgtaatagaacatccaaaacttataacagcaaacctagaaaacatagttcagagatgaagaaaccacacacctggaatcaaaagcacatatgtcagtgtaactgtcgctcaatatttgtgcccttccaccaccatacacttgacacatggatgtaccaaactcatagacggaagccaccttccacgatccggtaacacctaaaaattcataattttatccctcaacctccacatgtccatattgaaagagtgaagtaagattccaccatacacaacattctagaaagcttaggagtaaatattatccacgtttccggtagtggacacgtggaatctaagtgagaatccaaggctcattagtaggtccctcaacaatgataaactgggccaaacccaaatggaaaagtccttctaggaacatatcccagctccgcgaccatagagccatctcccattggaaaatcattcccagaagcaagtttggtaccatgagagcaaaagagtgagacatgttgttcctagaagacccttttag

SEQ ID NO: 233776 - DNA, 656 bp, Cannabis indica
ttgggcttggagcctcaagcttcacatcttacatagaacataccacccagacaagagcttataagatggaggaattaaatagaatggagaattcccaatttttgtgcaaagctctgtgaagtaattctttagggcaagtgtgccccactcaaaatctgggcccaactccaagtgttgaacctgtccgtactctgagagacgaactcctctacaattgacaacctatttcatactagtccaaggatgttacaaaattctgcttttgcgaacaagatctccatcattccgtatgccctgaaattattagtgttctggtccatctcccagaaggaatcattacaaacaacgggggatgaggaagaagctttttccttgccctctacctttgtttttctagttttttcctacagagtagctttcaggatagggtcttgttggggtccttccattgttacctcaacccttacatccttaacattcacatctttgagattaaactcatcattaaggtcagccactggaaaataaaagaaagaaaagaaaccgaagcaagtaaatacatgttaacgttgatttttgctaactaaaattgaccctcacaatattgatctcacacagaaaaaataaaagctttagaaaaataatatatgaacaca

SEQ ID NO: 233777 - DNA, 1535 bp, Cannabis indica
gatgttacaaaggagagggacaagctaagctatccaagagtactaattgaagtctctatacaacaagagttcccaaatttaatttactttgaagatgagtttggctccaatgtatcagtggcgatcacttatgaatggaagcctaccatttgctcccattgcaaaggaatggggcattcctcgggtgagtgtcgaaggaaagagggtaagcaacaagagtgggtagttaaaaaggatcatcggaaaatagagactaattttaaaatagaggctgatggattccaaatggtcacaaatggctggaaagtcaagagtaaggaacctgggaagaatattgaaatgtctaactcttatcaagttcttgatgagttaaagatagttacggatttgagggaagagaaggagattgaagaacaagtagggatgattctggatagcaaaggaggagggggagtgcctcctctttctagtggataagatccttgcttggaacgtcccagggatcaacagtatgcaaaaggaaaaaacagtaaagaacttcatttcaaggaatggagttggtttagttggtctcctcgagacgagagttaaggctccaaagcttggagccttatacgtaaatatgtttcaagattggtgtttcacatcaaatatatcgtggcacaaaggagggagaatcatcatagcatggaatcctctaagttttaatgtaagtattttaagtattttaagatggtcgaaagcccttcaagtacttcaagatgtggagtactcatgcacaatacaaggctcagcttgaaaacaaatggaaggaaaagattgttaggacttcaatgttccaagttgtgtcaaagctcaaggcattgaaaccggtctttagagagctgaataaaggtggtttttctaatttacaacaagcggacatccaagcttgtgctaggttggctgattttcaatcgttcctgcacaataatcccctcagtgatgaactacagcgataggaagcaatggcgagaattccgtatgctgaaatacatagcaattactgctctttcttccagcaaaaggctaaactatcatggttaaaagatggagacagtaattctccaatgtttcatgcatacatcagacaaagaaggaccataaataatatcctctcaattcaaaacatggaaggagaaagggttgaagaccctgttgagatttatcttgaaggatctcctaggaacccgattgcaagataggaaggatgtcaaaaagaagttggtggagttgggaccagttgtttctggtcagtaggccatttatcttgaaggagatttttcgaaagaggaggtgaggcaagcggttttcagtatcccagggatcaaagcccctggtccggatggatttagcagctcctttttttaggataattgggatttggtcggccaagatgtatctgaagcaatcctatcagccttacaattggggcagatattgaaagaagtggactcaacagtgcttactctcataccgacgatcaaatgcccaaa

SEQ ID NO: 233778 - DNA, 929 bp, Cannabis indica
tattctttataattttattaattaccggctcgagttaagtgtccatagtaagtgtgtagcattattattttttaaatatatttcaagctaaactccattctcctcttctctttctgcaaattttaaatttgacttttcagtattgatttttaaataaccccacacactaattaaaattagtttttaaatcattttaaattatatgattatttattgaatccttctcaattaaattatagaacacctaacatatacgtgtcttgcacgtaactttcttctagtatatataaatatatctattctatataaagtttcttggtttatgagaaatttatggctaattttttattttattaataaaaataaaataatttatgaattcaaaatccaaatcaaaagaaacgatttgatttaagcatgccatattcgatttctcttatctgacttctcatattattcacgacgtggtttaagaagctatgccccaaatctcgattttcatattttcatcattttggttgtgttcggagaagaagaagaagaagaacgagcgacaggaggcctgtaccggaagagatcgtccatgggggacgctggagggagagcaccgtcatgggttctggttttgttctgggttaaacgaacgggttcgaaaatcttcaagccaaatttctatatctccattttccccaatttctaagcaccgacgacgaattaggtttttgttcatttggctaattcgaccagatatcggtcggatcaaatgtgttgtcaccagagtatccgattgtatgacgccagcaccaatgtgctttgaagtgagttcaggcacggcggtgccgttctcgactgttgcttccacgatgattcttccgggtttagtgccggcgccgacaatacagtgagacagtgagacggttagttcgttt

SEQ ID NO: 233779 - DNA, 1209 bp, Cannabis indica
aaagacgtatgtttgccgagtggagagacaaagagatggaagcgttaagggctcatcatacaaagattgaaaatcgtagtcgggaagctactgtgctaatacgaaaaagcctaccaaactgtcatacagcaacctccgagtgtcatccccctgggtgagacagacgaaaatccagcgatgaatacttcccagactacaaatggtgagccgcaaaatccccggtcatgagtttcgcttgtgggcctagcgctgggcgggcataccttgtctagtaattcatcaggagaggtcatacctgatagttccaaccaggttaacggtgtcattgcacctgtcaaccaagcaaatcaattactaagatagccaggcgcttctgtattcgataggttggggcgactcatgacctaaggagcgatataaatggaaggagaggagtagacgattacattgtcacgaagatcgtacagcccggagcccgtgctaaaatccccgctcaaaaagatactgatgtgatccaaatcgactagaatgtcgagcaggttagtctagctgtgcagacacatctagacgaactaaaaaatatgttccaaggcatggctggacagagaatcaatgatctgagctggaccgagcacgttgaactcccttctctcccgagataaatcttctagcgttgccccacaagtttaaaatgccaacatggaaaatgtacacaggaagagaagatcctctttcccacctcaagtatttcgagatgcaaatggatttgcaggggatacgaggggatgtgtgttgcagaatctttcctgctaccctttcggaagccgcccaccaatggtatttcaagttggcccctagaaagttcaactcatggaaagccttctctttggaattccatgcataattctgctcctctcgccaacttttgcgcatctgggagacctggtcgaagtcaagcaaagactaggcaaacctgtcccagcatacatcaacagattcatgacggaggccaccaaagtttcgtgggtaactaaagatggaaagtagtttgcgatacttgggggcattgaagtcctcggtgaacatttgaaggacaaaaggaagaatggcccggtagactcaatgagatattttcttgaccgtgctgaaggcttcatcaatctcgaagaagctatccaatgagcgcaaggtgaacaaaatcctggcaag

SEQ ID NO: 233780 - DNA, 1031 bp, Cannabis indica
cttgggaatggtcataatcttgacctgtaatactttccctgttagtcttaaaaaccaatgttcatagtctttgatcctaattgaaaatccatgtatatatattaattcacacacacatatatcatcaatatcatatcatataaatatttatagagaaaaacagagagagagatggaaaactccatgggagtaggattcatggcggtatttgcagtgacaggaagtgttgttcttcttgctcatcaaatccacaaacgtgtcctttctgactttatgaaagacattgaattcgaattgggtcttcccaaaagaagatttggaattggtatgtgtagtttttttttttaattattttgaaaaataccctttttctttttctacctaaaattgtttttttttgttttgaatttggtttggatgaaaaaagaaaaggtctctagtggtaatgtatctggaactcaaaaaccaagctaagctgttgtcgttctaattctggtttctaaactctctctatatataatttatgtctatctctgtctgtagtttttttagttcaattacagtaagattgtgaattaaaggctctcgcaatgtgaattaaaggctttggcaagttgatagtgatggtggcgatttaaggtttctgatagttcgtggttttggccgggattgaagaggcaatgtttggatttgataattttatttggtttttgttgttctattgttcatactaatttttgggtttgtagccatattttttttttactgttattgtattttgtttatgtattttatttaagttatacttgtaatttttttgaatcacttattctatattactgctattaattataatataattatttttgtgtattgttttgttattaatttagatgtatttatattacttaaataaaatgtgaatgtatttatataatttgtaatttgaattaataattatatccatttaaattcttaatacaatttcaaaaaaaaaaaattcttaatacatatttgtattaaattaaatt

SEQ ID NO: 233781 - DNA, 1534 bp, Cannabis indica
aaaaatcatgagatattttacttaacaccataggttatagttttgtaggataattagtttaaatttattactttcaatgtttaaattcacaagttcttttttttttagatattaagtacaaacactgtttgacaactttatatacttttttaccaattaatgttccaatattttatacagttaaaataaatttgaatattttttttgttatgtaaatatataaaagtaatatgaaataactaaaaattttatttccaactgtgaaagataatagtttggagtagaaaaaaaaatcataagaggctccaacttctaattgatgaagaaggccaaaattagagtaaaaattctatattaaatcaaggtaaattaacacttatcaagaataaaaaataaatagaaattgtagtactcgaacactaaaatcaagtaatagaataaaaaaaaaccgaaagtaataaaaactttaactaagtaaagtcacacaagtttttaacgagatttattaccctttttgtggtgactattctacgagaagaactaccatttggccaagctttattaatttttaacagtggtaaaatacagaggtaattacaagaagttcacaaccagatcattttagatagatgtgatcaaatatacacacactcttaacaacttcttactgaatgttcttctaagcactccccttagatcgtcatttaagaaagtaaaacacaaagccttatctaggcatctaaatgagtgagtttaatttactttttttcatgatcgtgtatattatagttatttaagattatctgaattttttttaaaaaaaattacatagtttataatttggaaaataaagtttgaatattttgtttacgcacagtaagtaactatttgaactttattttcggtactgtaatatactcagaattttttaaaatttataagtagttctaaatagttataacatatatgattatgagaagaaaaaaaattaaattaaatttttttctaaataccaaaaaaatctactaaaatatctcttaaactttttaaggtagtatcctacagaaattccaaaatcatgtacacatgattacttatataaatgaatcttagctatagctttgcaatgatcagataaaaccatattcatgattacattcactataatatatgtatatgttttgtttgaattagtcttttccatttgaagtcaaagttttataaacccatacacttgttattatatcaaacaatatttctacatattaacatgtcataactgttggtgttgaaagttttatattggctaaaattgaaaatgatcttgagtatacaagagtggacattatttctattagaatgagaccttttagaaaaagtgcccaaaaataaatacgtgagtgcttaggcttgttttactgattatctggtatacctaattttaattttttaatatgaaaaatttggtagacaaatgactcctaacaaactttgcttggaaacttcttggaaccatcaacaatggttgtcatta

SEQ ID NO: 233782 - DNA, 652 bp, Cannabis indica
ctaataattttaatggtgcattttaacttagccaaagagagaaatttcaagctcaaataaatttattaactagaaaattggatgttttgaaagctaactatgaagatacatatgaagtttatgttgaaccttattttgattatgacgtagttgataataagaatggtaatcataacttgaaatttcttttagactgttgttggaagtctgagtacaactacaatgcacaaattgattggaattttgttgaaaaagcttataggttttaccattcatctcaatttagcaatagcaaatctttggaggaaaatagttcaacattgtttgctagtctggagaatgaaagaatgatgaatgaaaaccaaaatattttgcccactcaattagtagaggaagatatggaattcaatgaaatttttttaaataatgttcttcctccacaaattgaaataataccatcaccctcgaccccaatctcttgcaatctcgatgaggatgacgcgattactatttagaatgataatatttctcatcttgaaattcttccaatcattccaaatgtcattccaaatgaaaacaagtgttatcatactgatgtaataaacacaattgtggaggaaatttgtaaaattttctcaagtaaccaagcata

SEQ ID NO: 233783 - DNA, 1664 bp, Cannabis indica
taataaaaaaaaatataggaaaatatattacatggttaagattaaacgatgttgtggagaatgacaaatctggttgagaaagtggcatgtagttatcgatttgatcatcagtgttgaagtcatgtggaacctagatgatagaacatttaccttttaatattgtaaaattgcacaattgaatcataaagtaaataaaataaaataagagtaagtacctcttttgttgactaagtttttttttttttgaagctttggattttttatgcatcttctcaagagcattctttggacgtgaagaaccaccacgaattttcttattatttgtctttacaccttttattgttgtatcaattccacccacaatatgattttcttctttactttcaactctttcttctttcaaacatgcatcgatgtcatccgagaggcctttaaagacctccttagtaagtttataggcttttttactatctgacgctcttgttacaatatgattgcaagatttagacaaatcttggtaacgcattgccaaacatgcataggatcatctccatctataatctcagatgtactacatgtaactcccatctttgcatgttttgtccatctcttcaaaatatattgagatggtattttcacaacattacgaaaggaaaaatactttaagaatatgtgagcatagtattcctgcaaactcaaaattcttccagctacataataatgcattaactgatgagccatatttaaccatgtgatgaaaatacttaccattaggagtaagcttataatctgtcatgttcctaccgcggtacaaatttccacagcacaattataagcttttgagaaaaatcagcctcaaacattcttaacaccgcaggagtatacacagttgctgcatgattcaaaattttaattgggagggatggtgctaaattaagttgacttactctaaagtctacttttaactcttcataacgacgatcattaatcaacctctcaaaatgttcaaaaaatgcagcatagtgtgttgatagctaacatacttcttaagaacattattcatgctttcacttcgttgagtagtagtcatgtttgcacaaaaagtctctcttccatataccaaagcccatttttccttcaacttgaactgttataccaaccaatcattatttttaagattatatttcctaagcatgttcccccaagtcttaatgaattcaaattcttcatcacattcatatatgcaatttctaaaatcagtagaaaattcacgaaatctttcaaaaacactactcaggtgttttgttgcattctgatacatatgccaaatacacaagcgatgataagtttctggccattgagatcttaatgcttttgatattgctgcaatttaatcagtaagaatcgtttttggctttttccctgacattgcttctataaaagtatcaaataaccacataaatgtttcagtagcttcatcatataacaatgcagctccgaatatagtgttttgtttatgataatttaccccaacgaatatagcaaacggtcgacaatcataattttttcggtacgttgtatcaaagctaacaacgtcaccaaagttgtaatatgattccttcattcgtgcatcatcccaaaatatatttgttaacaaatcatct

SEQ ID NO: 233784 - DNA, 1008 bp, Cannabis indica
ggtacaactactctaagcaataatatcaactcactaacaacacaaataaatgaattaattatcctcgcacaattaatatccaaacgaaaaattaaatactattttaaactggatattacacagaaataatgaagattcaagcaaactcgaggagaaaaccacaaaactgagcccctagaaatagggcccagagctcaagtttataatcaacctggtgcgttggtttaaatcacacaataccaaatatgattctatcaatgaatttagaatggtgaaaaatagggtaggagatctcgtcctcaagtttaagaaccttggaagtatcaaaacgatattttggaagctcgggaatgagtgcccaatgccaaggttgacaaatggtctgatgcgttaggttctgcttaactgattttgattttgttttgaccatttatctagtttttcacaataactaagatccatgaagttaggaaagtcaaattcacaattttgcatttctcatttctaacatgggaaactcactcagaaatgaagagtttcgagtctctcatttctacaaaatagcaatatcttcgagaattggtgtccagcttcgccagaacacagaagtagactaagtgatgtcaaaatatcacttaagcatcttaaagtacatcttggatacttttacacttacctcttgtccaggttattgtcttttgttaacatgggaactgggatgtcagcctgggtgctagatatcaacttgggggctgggtcatgaactaccttcagtgaaacaactataactcactcaatattgatctgattgatgcgattcaacttacattttagagctaattaaaatctctatcaaatcatgtatcacacttcaatcataattatgaagctatcgaccacaaatttcacccaagggagtacaaaaataagcttcgggttaccatggtaggtcccgccaggctccaaaaaatgacaatcgccattagaagctaattttcaccattggat

SEQ ID NO: 233785 - DNA, 798 bp, Cannabis indica
ataattttcataattcattcgatcatcaaattgtccagcagaagactaggaatggaatgtcttttttttcctgtgattttgaaattgatattagtgcaaggcaacgaaattgaatctggtttgattctgttatgaaatagagtagaaacttacttctatttccttccctttgtttaagtcttgtatttcctgtcctgattcctgcttttgccaatttttatttattttattgttgttagtaaactataagaaaactaaaatgaaactattaagaaacgtttaaaattattttagaaactaaccatttctcaaagtgttttctctttttcttattttctaaaataaattcctgcaaaaaatagaattaaactattataaaatgatgatgcagctgtaaatcaacttgaaaaaccataacacttatctcaatttaacatagttgtggtcattgtgctttttcatcagttttatttgaatcagatcaatttccaactattataaaactaatttgccaccatttacataaatcgtaccttgtatgtctgctattttttggtacccgtcaagtgacaatccttcataatttgtaaacaattttaaaacgatattgtaagtgtaaggcaacaaaaaaaatttaaaacaggcttatacgtaacatgacgctctttaattagaatcagatcttgtttattgtttttaagaatttgaattgcgcgttggaaaccagggaatcaaccagaatgcaactgtatatgacgtagatttattttagagaaaaaatttcatatcataccttgt

SEQ ID NO: 233786 - DNA, 740 bp, Cannabis indica
aaataatttccaacatgatccccttggctctagaaggtggccgaataagagagaggggaaggagattgagtttttcttaattttctatttttgaacttaaagaaaataaacctaaaatatttactaatatcattcaaaataaaatccaattttctaaagataatcccatataactccactaaaagcaaaattatggtaaaattattactaatttaacttcttccttcaacatgaagtaaacttaaaaattaggggtaatacggtctaaaactataaccctaaaataatttgacattttcaatgtctaaattatattgctcctctatttctaaggtaccaaaccaaatctgagtgactatacaggccatatgtcgcattccattgttattgtgcataaaatatgaaaattataaaatttcacctatatcataaattatacacctagaattcaaatatatctctataattgtgaaaaaaataattaaaagtgtatttcttaaattaaactctaattatctgttaattctcaattaaaactatgcagtcattacaccaaccgtgatggttgcattctttcttcatcatcgtcatacttttgatttgaaataactaggtgaaatttgttgtataatttctccaaataaaaaggtctccaaaagttattcctgaaaagttatttgtctttcgaaagtatgttcccggataactatcctgtcaaatctaaaagaagtctcgtagaa

SEQ ID NO: 233787 - DNA, 4599 bp, Cannabis indica
attatattttaatattttttacttatttttaaaaataatttttttttttaaattgttgtattttgtaagattatgaatcataaattttatttatggtaaatagatgaaacatatacgttaaaaaaatgagactatacatagaaatattatgtaataaataagaaatttatatatatttcttttttaattttagatgaatgatgaatatatatatatattgaataataatataaaacgtgatatactaaagaaataaagcatatatagtattaagttaatttagtgtacaacaaaacaaatatggtaaatttgataatattagaatttcataatattgctccttattttgttgctattattttcttgtagcttactttgtgtggtaggtagaatgattgaaatggaggctgccaaattaaaaatgagaaagagttagaaattgtataaaaatatgtatacttttgacaatggggttttttattttttttaaaaaataaatagtaagaccataatattttaccttattggtaacagtgtcttgtgatttgtgaataatctagccaaatatgaagttgtaaaataatttgagtgcttgatccattgatttgtctgttaaaataggttaaaaaacgattttaatatttcttttctaagataaacttgtaatgtattattttaaaatacataacttaagcaatttacctttattcagtgggttgaggattgaatattttgaaatatttctttgtaaacgatatttttgattaaggattggtcttcctcctcatcatcaaggttcagtatggccaatccttcccttgtggtaactcgagacacagctacatatagttgaccatgggtgaatacttgcttaggtagatataagcccacatatttaagagattgtccttggcttttattaattgtcatagcaaaacatggtgccaaaggaagttgtcgtctgtttagcttgaatggccatcttgattcatttggagacattataattcttggtattgttacgttttgaccaatattttttccagaaatgatgtcagctctaaccgaccatttaccaagtcgagtgataatcaatcttgtgccattgcagagtccttcagtttggtttaaatttctaaggagcattacaggagcaccttccttaagacggatgtcatgattcgggacgccattaaatttcaaactttgcaaaaattccactggatacaaaagatcttcatcatttgtgttgacacttgctttgcatatactgtctgaacttaaataggttctcccttcacctgggagttcattcataatcatctcatttagttcatggaccatttcattttttggggttaatatggctctttctttcaaatatgcgggatcattatatctatgcaaaagcgatgggtatatagcttcaactattgctttgactggatcttgagatggctttatagatatatctgtaggaattttgatcaattctttttctttgtcatcatatagcgaaccatctccaatttgcaacatccatttgtcaaaagaagctattttagcagcctcagaaccacttacacttccattatataacctcatattttggttgagttgatatattttgaaatatggccacaaatatgatgagttaagagaagcatcaacaatatcagctcttgtaccttttgggacaactggcaatatttgtcggaaatcaccaccacataccactgtaagtcctccaaaaggtttgtttgagttattttcataccttgttctcaaaatatctcgtaatgtcttatccaaagcttcaaagcaaaatttatttgccattggggcttcatcccaaatgatcaaagaagttttcataagaagaccagctaatagggttccttgtcgaatgtcacaagttgactctgctgtaacatccaaaggaattcgaaagcgtgaatgagctgttcgaccattgggtaataacaaagctgctatgcctgaagttgcaacaggcaagactattttggattgtgatcttaggtatgaaataattgtattccacaaaaatgtttttccagtaccaccatgtccattgataaagaataaagtgccttcttcattctcaacagaatgtatgatagcttcataagctaatttttggcaagagtttaaagcagctactgacttctcatgaaatatctttaattcctcacagtcataatcaagctcttcattgattagcctatttcctgaatctcttattaatgaggaattaggtagaggcatgccatctatttctttcaaacttcttcccatctttaacattattgtctcaatctcaaacaatgtgtaagcttcaatttgttgttcagttagctgtagattacttattctgaatcttttcctttgcaatgaagttatgtcttctgacaatgcagcataatttgatttccaaagttgacacggattagaaacttggcaatgaaggagtatcgtgacaaataaatgtcttaattctgctccagttgcccatattgcagcttcagtcaagcagtccgtccattctttatcatcatctaataaccccaaagcatagcatgcagctttaaaagtaggatatgtcactccatttattgttcgaatactttcataggaagtgcatcctttgacgaaattcagcatcattctcatataaaaccgttctcccgatgaaggatgtgcaaagtagattcttccgattgttatgcccctttttcttctagtccatattttctcttttgaattccaaacccaacatgtagggaaatcaacatatgttagctctcgtgcatcttcattttttttgttcgtctctaaccattcagtaaactttgttttttctattccaggttggcgaaatacatcgtttacacatttagtttcatcaaatatcactgtatgctctcctggtaaatgaaacggcaatctttcaactgctggctttctgtaatgtatgtcaaattggaagattctccagcaagcttcagttgctgatatatatctacaatccaaatatgttttgatttcatcaatttgttcggtagtgtcaatagattccaatgttgcagtcgttctatcagatcctttatgaacatacttgaaaaggtatttgactgatcttgagtaattgcaaatttcaacattaatatgtgcatcaaactttacaatcaaattcctattgtaaggaactacatatcgattatctaggaatacacctttcttttcgacatgagtacctatatttaattggaaatattgatattaatatgtgcatcaaatttcttaataaaattactatagttagtgactgactatgcattgattatttataaatagacattttttttctatatgaatacctgtatttcgccttttatagactggaaacccatctgtatcaattgtcgtatgattattgatttttttgggaaaatgttttgtgcatcttccttgcatcatacatggggagtgaggattgagctttccacacggtccatgaatcataaatttgttgactgcattataaccatctggatcaatgtttctgtctggaatttctgcacttattattttatcaatatggtttgctgaaggatttttcattgtcgaatgcaagaaaagcaatatgtgtgcatggggcaagcctcttttttggaactcaattgtgtatatacctgggagaaaataaagaaaaaatttatatttagaactaattcgtatgaattaagaattatttttttttttgaaaatattcgtataataaataagttggattttctatagatggggtaaatgagaacaacttacatgcaattatttttccgaatggttgttggtttttcaaatcttccattagttgaaataactttatctcaaaaactctgcatatgacatccactctattagcatcatctttttgaccaattaaactgagcatgtcatttatttctggccactttggattgcaagtgaaagtaagaaataaatcagggtatcctgcccatttagaaatggccatagcatcttgataattttgcactctatatcggggtcccccacagtgtgacgaaggcaaaataattgcttttccaacttttgaacaatctgaatcacctctatgaacagcatccattaaaccagagtaaagttctgatctaagttgtttttggttatttcgtatccatctaaatctttcttcttcaatcgccatgtaacaatctactatatattgttgcaataatctaccagcttgaagaagactgtgcccctcatttagtctttgctgcaacctaaagcaatagtattgtctcattgtcaacttttttgtatcagattcgttctcaagttcacctctaaaaggtatgcgaagcctatatccatcttcaccataagggtgtatcaatgggtatgtcataggcataaaacttggatgtaaatctgtgattctttgaagtccgttagttcggtgctctacaataacatcccgttcgcagttctcttcattgaaatcacccactatcaagccggctacttcagatactgttggcaagttgtattgac

SEQ ID NO: 233788 - DNA, 1273 bp, Cannabis indica
ttatcacagatttgatatcacttacacaggtgcatcaaatggatcaacctccaccccctcaactaccgatcctcctcaagcttttgtgtctgaatccaatcccacatcagatccctccactgcttggtttcttgactctggcgccactcaccacatgactaatgatcctgaccaactcaactctgttaatgattacaaaggcaaagcaaaggtggttgtaggtaatggttcctctctttccaatcatattggttcaagttctgttggcactaaatttccaaatcattcattggttttgcaagatattctacatgtccctaatgttaccaaaaacctccttagcatttctcaatttaccaaacataaccatgtcattcttgagtttgatgaattttcttgtctcatcaaggacaatacaaccaagcaagttcatctgcagggccatctcagtgagggtctctatatgctacatgtcccagcatccacctctcaaagcattgcttcagcctctgttagcatcaaacctaaggctctcaatcataccaccaccagtaacccgattcatgacaagtccaaagctgtcaacatttggcactgccgacttggtcatccatctcagccaatacttaataaagttctttctcatgttgttccaaatgtaaaatgtaaacctttagatttctgtactgcttgtcaaactggaaagttacaccattttagtttcaaaagtactgaaaataaaaccacaaaaccatttgatttgattttaacagatgtgtggggtccctcattttatacttcagctgatggtttcaaatactatattagttttcttgatgatttcagcaaattcacatggttatttcccatgaaaaccaaatctgaggccagtaacattttcatacagtttaatgctctagttgaaaggcaatttaacactttaataaaatcagttcaatctgatcttggaaaagagtttgaaccattgtataaattgttcaagaatcttggcataatccaaagaattcttgcccccaaacttatcaacaacaagggtgagttgaaagaaaacatcgccatgttgttgatactggcctcacattactttcccaagccaatatgcctctctctttctggtgggaagcttttgcttctgcagcatacctaataaatagactacctactccaactctcaattatcaaacaccacatgacactcttttccatcaaaaaccagattatactcttttaaaaaaatttggctgctcttgtt

SEQ ID NO: 233789 - DNA, 729 bp, Cannabis indica
aagccaccataacactaacgcttaaaaacagatcccaagaagcaaggcattttattagaattctctttcacaccccacagaaagtgcttgaaaagcttgtcgatcagttgccttgacaacgttttgggtcggagagcataaaaatgctcatccaataacaacagatgcctaacaacactgactaaatcaattgcactctaccagaaaatgagaggtgaagggtagcccaattatgaagcttcaatttaatctcttcatcaagaaaaggatcacaatcttctgccttctattttgttggcctcattggaataccaagatacttaatagagaaataactctctgcaaaatgtattgtatctcaaattccttgtttagtcattccatcaatcccaccaaagtaaatatgagacctatttggattagctttgaggccagattgcaactactaaatgtaaggcatcctgcattacttggatggattttgtagaccccttagaaagcaaagactaacaatcttcgaagatttacacattggtggtaactggaatctaacattcgggcaataaacaataaaaactgggtgagatactccattaccaacacaaaaacaaatagagaaatgggttcaccttgccttaggtctttctttccttgatatctcccttctgctcgaccatttagcactaatgaatagcatgcccccttaagcatgtcatcatcaaaccaatg

SEQ ID NO: 233790 - DNA, 1077 bp, Cannabis indica
tgaaactacaaaaatttttaatggaaaaataaaataaaggttaaaaaagtaatttaacattataaaagcccaaaaattattgactcttttatatatagttatagataacaagctattagggatattttctccttggagatgcatctaaaattaaaattagaaaaacaagctaaccaaataatcaaccattttcccacattgtttgacaataaaattaaaataaaaaatcaaatgaaacaaaattacagcatcacagttaataatcttaagaatacttctattcagttttatgtaccactcaaaaaacacaataatagaaactattatagtatgttcattcaacttcgtagcttaagcactcgtgctattgtacaaggtacacacctacactacttacaaccctttcagttgcagagaacttgttatttttaaccactaacagcgatttgttgtcaaatcacagaataaagaagaactaacaatgaaataaaataaaataataacacatagaaaagactaaaacacttaaaattatattacaaagacaagactaaaatacttaaaattatgtcacaaagataatactaatcgcaatagcgaaaattaaattgcaatagcaaaacataatctcgaccaaaccttacttatgctgagaaaaggtcaacaggcctggccggagaaaaaaaaacctcatgtaactataaatttaagaatgagaactctagtttttttttaatttagttgatgttaaatagtatttaatgtattttatgttaaatttctttcacttggtcttttcaataatttatttaaatatagaggttaatattattgtaaaaaaaatatttgatactgatattttttttttaaaattttataaataaatacaacttttttaatgggcatggcagaattaagattattacgtgtatcctttttgggagaaactatatatatatatatatatatatatggaacttcttaatgggtatttctcaattcatggttactaacaatttaactataatattaatttaaaatattaaattattagattttgatctaataacgaataat

SEQ ID NO: 233791 - DNA, 638 bp, Cannabis indica
cgagtgagggcacgttggttaaggattttattaatagacctaagctagaccaattcttcttgcccgtggatacgagtattgttattgggtactaattgtgtctaatactttctagatgtatctgccttataattgactagcaatatcctttataataataacactttttccttaaaagaaaaaaactagacttaaccataagtatataactagttgaatcaaacgtagttcaaatttaccaaaaagaaaaagtgggacagttcaactttttcacacacataataaaacctcaatagataacataggatcatttcatactaaataaattgactaataattctagtgactatggttgttgggtgggtatcttggtcgaatggatgtaggccttttttcatgtgaaatactgaaagtcaccaataatacctaataccattttatgtatcaatattgctattgctccaattaaatatcgggtctcccatatagtttaatgtaataacttttaaaaagtatcgctagacaatcgcaaggcgacaaatcaagaggttttaggcactacaggtacccaataacaatgctcttttttcatatacgaataattaattttagggttataaaagtaagacctgtggtgt

SEQ ID NO: 233792 - DNA, 979 bp, Cannabis indica
gtgccagaagagggcaggcaccagcaacctatttactatgtaagtaaaaggttactaggggcagaatcccaatatttccctctagaaaaactcgcgttatgccatgtccatgcgtctcgtaagctacgactgtaataccctagagttatgaaatggattagcaaaactctaattagataattatgtattattgagaaattatattattatataatttaatatatgagaatttatatgatttatgctatgttatgaccccgttggcgagcaaggggcattttagtagttttgaccagagaagggtaaaatagtgaaattaatttatttacgtgcttatggaactatattattatatggtatgcctgtgttgtcttttttaggtgtgttctgacaggctggcgcggtatagtcacaactgcgtattacgggccgaattgggtacgggcttgaaatgcaatttggaatagaattattggcattttaattattgatgaataatctgaaaatttaattggagttatgtttatgtgaaatgacctaaatacccttgtgtatgtgtgtgcatgctttatagccctaggggcaaaatagtcattttgacccttatttcacaaataataaaagagttggattttgagaattgaaaagggatttttctggcttctttgaccccaaacccaaacccctctctctctctctctttaacctatttttaaaaattggggaatttcttaaaagttgcttgaatttggcttggttggagctttgagtttttctactgagtttatttgaaattcttgctgagtttattatggaaaaaatgttcttctaagctttgagtgttcttggttgcatgagtgtgaattttgagaaagtttgagtgttaattgcaagttgttgttgtgagtttattgttggttaatggatgagattgttgagtattttttaggtctgaatttatgtgttattggtgttattt

SEQ ID NO: 233793 - DNA, 1614 bp, Cannabis indica
ttaatattatttatttttttaattagttagtttcctagtccaacattattggactagaaaaaatatataatgtccaatttaagtggacttaacctatttttaaataaaataaataaataaataaataaataaataaaattgggtccttggaatttgcacagctacatatatcaatttctatttatttattttttcttagtattatctctcactaaaagctaaaaaccctaatatttctcatacccagccgctcttctcaaaaatagtctctttaggttcaaaaaaaattatctcagcagtaatagatcgcactagagcaagccccaaacagaaaccatgaatctcgccgctagcctcaaaaatcgcagtctcctcccttcacgttggtttctcttccgacggaggtgggctacaccggtcatggacccaaatggagaccacgagcttcatcgatggctcccttctctctttctccatactacgaagccctgccacgttctctctgtcgttctctcagcccactccgatgcatgtcaatcttattggtctcggtctcttccattgtctctatctccatcgccttcacctagcaaggagtatctcgacgatgaagccatcgtccgctgcccaaacaaagatcaacgatatcgtccgccgcccactgtgaaaaatgtgttctttttacatttgattcttttgctttatttatattatcattattttaggggttttaattatgtaagtgatttgtatatgtttttggtatatttgagtatgtaatcttttttttaacttaaaattttataatctgtttagtatatattttttttgtaagtgttattgtattttgactgcgtggatcatccttatttttgccttttggtgatactgaaagatgtgcatcaatttacatgtgtgatgtggtgagatgagcactcgaatgagggcaaatatgcatttggcccaaggtgcccgtgagtctagtgtcttccccaacaaaatatatgtacatgtactactacttgatgatgataataataataatattattacatattatttatttaaattattaataatttatattttttcaaaaaatatatatatataaaataatgtccggtaaagttggactacaaaagagtttctattatgggctccattattatgtctattaatggtggactagaaatgtttttctagtccaattatttttgactagaaaaataccttttttatgtccctggatattatgtccacaaaagggactccaaagacttatctagtccaactttgatagacttaaaatgaggtttttgttccagaagctttttggggcacagaatccgaagggttactatggctaagaattttcttgaataaattgaggaacgatttgctaaaaatgataaggttgaaatgacaaaacttcttggttatttaatgaacatgaagtataagggtcaagaaaatgtaagggagtatattatggaattgcatcatattatctcaagattaaggacacttaagattgtgctttcagatgatatacttgtactcatagttttgtttaacgcttcctccacagtttaactaatttaaaacttagttaca

SEQ ID NO: 233794 - DNA, 1278 bp, Cannabis indica
ccaccttgttgtttctctacaacacttttaactagtagaattatcttattccaaactactttctatttcccatctaaaacctggataggctattccccatataataaatctgtgtgaagttcaaaatcgttataacttagaatatggatcacatctgatacatgctttctcaagatggagatacgaaacacattatgcactctggacaatgcaggatttgaagctagttgataggctatctggcctagttactccagtataaaaaggtctaatgaatctagggtttaacttccctttctacatatccctctcataggcaatatctggagaaaaatagaatctcccatttggaacttgatattcctacgctttgaattaccgtaggttttttgtgtactcaatgaggcgagcatacaactcgaattcattctatagcattataagttccttggatctttccaattaatcgtattcttttctcacctgcttcattccattgaataggtgtcccgtatttatctcatactacacttattaaagtgtctaaccaatagtacatttaattattatttttaaacaaacactatgtcagggggagagattattctaagataatctaacctttatcaaatatatcctcagaatgttttctaatattctattaattctcttaaattacccatccttcaagaatgaaaccttgtactattttcactttaatctccatggttctcaataaccttcttaaactattaatatcatagccaaagttatcgattttgggatttcacaacattaaactattccttcgtataaactccatatcctcatttactatataaattttctgcactaatagacatcatattaactcggtatgtccaatcgctactattcggtcgaaatcataagatcccactaaatataattcataattatgtctttctattcttcctatgggatctcctaagttgatgcaatcttactagttgctgatgtactgatttaacttattaacaagctaaatgtttatttttaatagatatctaattatagtattccttacttccatccactcatatatactcatcttgatgccttgtaaatcttcacttattaacacatttcttcctcttgataatttttggaatgattgctaatttcgcatcctaatacaaatctttccagtgtatattgtcttcactcgtacgctttttgagattactccccgaaagatttttcatcttgagattactccaagttaagtatgcttaactc

SEQ ID NO: 233795 - DNA, 1104 bp, Cannabis indica
aaactttattgtcttgcatagacttattctctttattcatggcatcattccacttttgagagttcaaactttttcatagcctgataaaattgatcggatcagcttccatcacacaataactttcctcatgttcctgaagatatactatgtattcatctggattagtagtattccttctttctctagtggatcatcgcaaaggcacttgttcttgaggttgttgattttgtacatctagggtttggtgggctatgtttggttgctcttgatctaaaatttgatcaatatcaggattggaattaatcctaaacattgtcaaaagcatctattggaatagaaatcaattcatcttcaagaagagtagttgattccaaatcctcctaaaaaacaaagttccttacaatacttctcccctaaaactcaatatcctcgaaaaacattacagttgccatttaaaaaatattccttactttgggatcataaaacttaaaacccctagatagctcaaaatatccaataaagtagatgctcacagttttgggttccagcttcttttcatttggcctataaggtctagcctcagctggacatatccccaaatgcgaaagtatttaagactaggctttcgtcccgtctagagctcataaggtatttttgcaactactttagtttgtaccctatttaaaatgtaggttgctgtctaaagtgcctctcctcagagtgattctggtaaggttgaatgatcatattccttaccataaatttaagagtatgatttcatcttttagaaacaccattcatgctaggtcatcctagcatagtgtactatgagaaaattcaacactcctctagatatctggaaagaagatcctcgatgttgttcacttgatccgtcatatctaccatagtattcactaccatagtcagacctaacttgctttattcttaaaagatttgaacacgcccaagacttgagagttttcatgaagtcactactagaaaatcgggtaatagtgacacacattgagtaactctaaaagtgtatagtgacacttgaacgcgcgtcactaatgagggtgactggcaaaacagtttttagtgaca

SEQ ID NO: 233796 - DNA, 1928 bp, Cannabis indica
tcctccttggtacacatttctataactccaatcatgtctcgcaatagctcgaactttcctcttggtagtgcctttgtgaatatgtcggctgcctgctcttcagtcttgcagtgcttgagctcgattttttgtttgcttctgcttccctgatgaaatggtacttgatgcttatatgcttagttcgactgtgaataccggatttttgccattgctatagctgatttgctgtcgcaatagatctttgtagcttcttcttgtaattctcccatgtcttcaagtattcttttgagccatatagcttggcttgtagtcattgctgctgcaatgtactctgcttctgctgatgattgcgcaacagttgcttgcttctttgatgcccatgaaaatattcctgatccaagtgtgaaggcatatcctgacgtgctcttcatgtcgtctatggatcctgcccagtcactatctgtgtagccaacaagttttgagtcacttgtaactccgtaccatattccgtagaattttgttccttgcaagtatctgaggattcgcttggctgctccgtagtgaacttgacttggatcatgcatgaatcttgataggagactaactgcgtacattatgtctggtcttgtagcagttagatatagtaggctgccaattagacttcgaaattttgattcatcagctttcggtgagccatcttccttcttgagagctttgttattgtctaatggagttgatacagtcttgcatccctccattttgaatttcttcaatagtgtctctgtatacttcttttgtgagatgaagatcccatcttctttttgagttatttcgatcccgagaaagtagtgcattaatcccaggtcggtcatctcaaaatttttcatcgtgtcttcttttaactctttatcatcttctcattattgcctgtgtagatgagatcatcgacgtataaagaaacaattagtgtatcattcgtaccttgtgtcttgatgtataatgttggctcacttttgcttctcctgaatccttgttcggtaaagtagctgtcaattttgctatactaggctcacggagcttgctttaggccatataaagccttttttaatctaagaactttatcttcttgtcaagcaacaccttaagcaattaacggcaagcttggaattgactgttgagcgtgaaatggcacgcagtaccagattttgaagcgacttgagaagattaccacaagatgctccaccaacttccagatttccatcatgaggacaaggtggatgtttgggagcagggtgatgttagacctcctattcaatataactaggagaagagctttgccacatgtctagttagttcttaagtggcggactattattttatttttggctgattgtactaaataattaataagcccaagtcacctttttggggggatataattagtgcattagagttaagtgaaggggggaattaacttgtatagagtagaaattaatttctggtttgggagtttccaagtaactcgaatacttggcaagattgtatctttctatattctttaaatcaaataaagtaagtttttcatctattgcctaccacactcattttatgtcatgtgattaatcatttttgtcacatcatcaatgtgcaattcttgtcacacccaaaatgaatcattttgaggaatttcatttttagatttgagtagggaatggaaagcattgatgtggagattggcattttatttttttcctttactgtgagagttttgtagtgtaattattcgctaaaatacagtgaccacggttttcctccgccacaagtgagggctctccatacataacgggggtggccagtctaagacaatggctactttctcttttttcaaaagaaaaaaaaatcatgcttgcagagaaacaaaaaaaaaa

SEQ ID NO: 233797 - DNA, 1985 bp, Cannabis indica
gacatgctaagcagtgcaattggattttcttaccttgaatccaaaatcaggtgtgcaggcaaacctgagtggaataatgctcaacgattcggggtcctatgtcatgacaatgaaacttcgtgaacaagttaaccaaatcctaaaataagccctaaattcacaaccggacaaaccctaattcctactggcttagaaataggttaaacatcaataaaataccctaaactaggttctggaaaaacaccctgagcaaaaaccaaatttgaagaaaaactagggtttcccctgctggccaaccggttgaccagttcttgcagaaagggaaaaaccctggtttttcacatcaaaactaaaccaaagctttttcaaacctgctcaaactttccaaaataattctataacataaaaacaacatactcaagcattcaaaactcagtaacacatcaaaatatcaaattcaccataaatgggtgaaattttagttcttgaactcaactcctccaactcaagacttagcagcctaagaatcacccaatacacacacaaacaatcttaatttaaacttagatataacctcagaacccaattaacaccactgacttgaaaccatataaaaaatcaacaaaacctaacctaaaacttaagaaaacagtgagaaaaggagggaaaacttatctcaaagctttaataacacctggggttagctaattcaactagaaaatggtggatttgatgaagaaaactcctttgcttcagcttgtttctagggctcgaaggggaaagagagaaagaaaaaaaagggttttgtgattgaaattttcttttctctttgaataataatcctcaacttataatctaacctaatattataaatctattaactaaaccttaattcggcctaaaaacttactagaaaccacaaaagacaaaattactataaatcttggttaaagacttcaaatacttaagttatttattaatctaggggtattttgatcaaactaactatctcaattaaactaacaactcaacattctaaactagtcttgtacaattccaatataactcattatttattgttgtgacatttctgaccaatccgtcgagttttcacggtcgtcgaactcgaaaatattttattttaaaaaatggtatataaaatacccacataatttgataaaatctctgtaattaataaattacgttttatttattcatttactcaatatttcactaattaactcttaattagcttaagtaagattataatcctactctaatgcccatataattacatatttaataaaaaaaataatgtctaattaaatattattatattttttcaggatattataactatcctttctttataaaaatttcgtcctcaaaaaattacctgaacaatccaggatgctgctcccgcatctgcgactctaattcccaagtcgcttcttcaaccttactatttctccacaacactttaactagcagaatagtctagttccacaacactttctctttcatacctaagatttgaactggttgctcctcgtacgataagtctatctgaagttcaatgtccttgtaactcagaatatgggttgtatcagacacatacttctgaagcattaaaatatggaacacgttgtgaactctagataaagtagggggtaaggctagccgataggctacttgacctaccctttccagaatctcaaacgaaccaataaatttgggacttagtttccctttctttccaaatctttgaatccccttcactggtaaatattcgaaggaaggcaaagttcccaacctggaactcaatatccctacgcttcgaatcaacgtagcttttctgtctactttgtgaggcaagcatacgagctcaaattttctcaatggcctcactaattctttaaactgcgttgggtccaagatacctccgtttaccggctttatcccaatgaataggcgaacgatatttt

SEQ ID NO: 233798 - DNA, 1177 bp, Cannabis indica
ttttattttccattctcgacgagtttcccacctttgaggtttatttggttgtggaaaactatttgttcgattaatcatcactttcaagaagttctacagtttatagcacttggggcgaatttgacccttcctgttccagaaatgacatattggaatgaatttgtcattttgtgactgattccaagtgacaattcttctcccttcaaacttcaatttagtgggtccagatggaacttgactactcacagaggaatctggttcgttaactgtagcagggatgtctggtttctcatcatcctttttggtcagatcgacagttgaggtgagtgaattctcaacagacaaatcgtttccctgtttgtacagcattttgtaacctaaggaggtacgataaccataaggtttccggagttgtagggtctgattgatagcagctgtgcctgggggaatgaattgcagtgcttgtttagttctaatcagatctgtagtgagtttatatatctcattctccttctcattcagaagtctattaagattcttaactgtgtcctctaacttacctttctcagtctccacttgctccaaggtgctttttagacctctaatctgtttagtcatgtactcccatttggcaaacatctcctcgtaagcattttgtctacccacattgtccccttctgatgtagtggaaactgcatcatcttcagactcaactgagtgataactttgggccatgaacgctaatacttgtttgtcttcatctgtgctttcactggcagtagaattcttttcctcttcactgtcactccatgttgcagcaaggtgttatacccaaaatttggtaagcacattagaggaagacacgtgtcgagctgggaagaacgaagaactcaaacacgcaaacgcaaagtacacttagcatggaacaattcgttggaaatataattcacaggatatgtttataactcggctggctgaataggcttctgcgagacagaaacgtatgaactgctaacttatgtattgatgagaaaccatgtgggtgcacgtgtgcatgacgaggcctcaacctcgctgcgtgaaagagaaacaacaacactaaaaacacttagtgtctattatcaattatacaaaccgagtatagatagtctgggaagcaagataaaagacagcgagg

SEQ ID NO: 233799 - DNA, 802 bp, Cannabis indica
tattgggacccgtggttggtggatcattgggtcttctctttcgatcattggggtcaaaacccatacccggacaaaaattggaaaaaagcttccaagaatcttttcaaatgttgcccttcattcgaatttgatcttcaacacccttattagcaagggctaattcaaccacttcagcattagatcaaacaacccatggttatttagcagccataattattacccaagcaatatgttcttctaagcctcggataaacttggcctttctatcaacctcagttgctacttcgtcataagtaaacttagccagtcaatcaaattttgtggcatactcaatcactgtcatactaccctaaactggttgtatgaattcttctaccttagcaacccgaataaattcattgtaatatttctcatagtgcaaagttcggaacgtatcccaagtcatagtatttatgtgatgaccttcccacaaaatatggtcatcctcctgcaacattaatatggcacaactaaccagatcgttacccttgactgaaaaaagtcgaagatagatgttatcatactcatccactgttccgccttttgtggattagaaccaccatcaaacagtggcgggttttgcttcctgaactgttcatacaatgactctaaccaatttcccacatcttgtggcacaaccacaggtgccgaagcaataaggacatgagtaggctgaacttgctgctccctcaactctctaatctaatttccttgctattgtattgtctcattcattgcagcatacattttcttccagttttgt

SEQ ID NO: 233800 - DNA, 855 bp, Cannabis indica
taaaaatcaatctctaaattattgattattgaagataacatctatctaaaattgtagataaaaaatctttttttcacaaattataatgtgaaatattttagttaaaatactttatatctttatatattaaaagtgcctatgtaacggcaattattggtttaacagaatatgctttacaaataaaagaatattctgttaaatttaaccccaaaaataattaaatttaaccctaaaaataatcgtccacgtttaaaacccttcactggcggccaactccaaaaccctccttataaagagaagagattagagatccacacacacagtactcattattaccattcactttcactggcggccaactccaaaaccctccttttcttttgaattctgatattattcttgacttgggttttcctttgatgccatatttgactccttcgtattctaatggctacttctactcccgataatgaagttcccaacgcttctcccatccccaaagaagtagagaagcctccgattgagcccataaggttgcccactgttgaggaaattcgcggccaagacatttggaacaactgtgctgttcgtagtgtctttagtggagtcatgggtatgccccaaaataaaccctttttcttcttctaatctgtttttgtttatttgctcctttgtttcagttttatacttctttatgctttcattacctggaaaagtttggcttgtttgatctcactgtagccgaatctgtattcagtgttatattggtgtcttaaactatgtacaattattaaaagatgtaaaaaaattaataccattgttaaacaccaggagtatgttcccttttcaagtttt

SEQ ID NO: 233801 - DNA, 1860 bp, Cannabis indica
taacaatgcctttctaaatggaagcttagaagaagacatatacatgtgtcaacctgaaggctttgaagaccctgaaagacctgattatgtatgtaagctacataaatccttatatggattgaagcaagctccaagagcttggtttgacaagttgaagaacaccttgctggattggaattttaaaaattccaaagttgacacatccttattcttctatatcagcaacaatatcatcatccttgttctaatctatgtggatgatattattgttactggtaacgacaagcaaaaattgaatgagtttgttcaacagctaaacaaacatttcacactcaaggatcttggtgatctccacttctttcttgacattgaagttgcaagagatgaaacgggtctctatctcactcaaactaagtacatttaggatcttctaagggaaaacaatctgcagcatttgaaaccctgtccaacaccacaacagctgggaaacctctgtctattgatgatggaaagaagatgaatagtccaacagtctacaggagtctcatttgagctctctaatatctatgtcatacacggccaggcataaattactctgtaaattaccttagccaatttcttaaagctccaacagacacacattggaatgtagctaaaaggatcttaagataccttaagggaaccagaacacaaggcatccatatttgttgtagtgacagaatgaacatcacatgctattccgatgcaaattgggccactaatactgatgacaaaaaattggtaggaggttattgtgtttatcttgatgatactcttgtgtcatggtcttccaagaaacaggctgttgtgtcccgatccaacactgaatcagaatatcatgcccttactcaagttagtgcggagatagcttggatagaatctctacttgaagaacttaagtttcctcagcctgaaaaacctgtcacctggtgtacaatatgagtgccagtggtctggcttcaaaccctgtatatcatgctcgaacaaagcacattgagcttgatatacactacattagggacaaggttctcaacaagaaattggaggttcgatatataccatctgcagaccagattgcagattgcatgacaaaggggctgtctcactgaagatttcagtatctcatctccaaactcggtgtgaaatcatcaccctctcgtttgaagggtggtgttaagaatgatactctgttttagtcttcttttatttactgtaattaatagtgattaatgtgtgctaatcattgtttagttatatgtgtgtgtgatgtattctgttattgtggtctcccttattccaacattaggaccacctgtcccttctttattggtgcttgtattattgatcagagtatatgtagaaaatgttccccacagcgtccattgagctgagtttttatttctacattttgtgtaaagtttaactatggagaagtattaagtaagtttgtattgctgactcaaccatagaagttgagtaagagcatctccaagaatactaaaaatttacccatcatttaaaaatataatattttattttatctttattccatattatatttggaactcttacttctaaaaatactctaatgtataacattatttaaaaatactataattatgctttcacttattatatttaatatatatcttaatttttaactataacaacattctagttttaattttttattaaaaaaaataaataacatgctataataaagtatttatgcaaattttttctccaattgtataatacctcaccaagttttaccattccaaatgctttaagtagttggaagaagcagctaatgtacaaatc

SEQ ID NO: 233802 - DNA, 874 bp, Cannabis indica
atttttacacttcaaaacaaatttttttcttgcatttctacggaattctacacaaaaactcctatagcaactaacgaagtaacctaaatcgcaactaaaattcacataacaacccacatagaagccactggagaaaccatcacagcaatctaaaccgtaaatttgaaaaaaaaaaagttaaaaaataatatataaggtaattctcctaaaaatcaaaacaaaaaatacaactaagtatacgtgcaatgcacgtaacaataacctagttttaatgatatgtggttataagcaaagtctagtagttctacatttttttttacaaagtggaggtcctaagttcgaatctccctctctaatgcaattttttattttcaatgatataagtttttattacaattttttttataaattagtaaattactatatcatgaacttatgtgtgtcataaactttaaattacttattttaatatcttaagaagttactaaatttatcattttttagtagttttgcgttttattggtaggattaagatagattcaagatatttaatatattttttttcatcttagaaacaatagccctagccgctctgtttatcaattagtgcctttgactttccacttttcttcttttgctaatcttgcttttttggaagattgatgatttctccacgttgcgtagtgttagccgattgagaatctactgacttgctccatgttgcgatcagaacaaaaacatgagaggagaacttccacatcaacgtctttttctgtgaggggttcaagagcagtcgtctgagagtggttcgatttggctcaacgacgtccttcgtttcagatttttgtttttatttattaatttactattatta

SEQ ID NO: 233803 - DNA, 1250 bp, Cannabis indica
tgcttatatgatcttgagaatgaattttacttgacttttaatttatttatatatatatatataaaaatatttgtataagttttggcatttagttgaagtcttatattttacactgagttttatttgtattctttcagtttagcattaagaatttttcaccaatgacaagtaaaataatacttggtgttctatataatttgaatttcatatttggtcttatgaaaagtattttttcttgtagtgatactaatcctgctgaaatttctactgatttcagcagcataacatctataattcggacgttcccaaaaattttaaacatgcaattaatctattaaaacatccacaataatacaaacaaacaaaactataattaacagtacaaatattaccacccatccgaccgcagtcatgcaattccagaacttactatggatgaaaatctaggatagtcaaactcttctaggatttataaaatatatatataaaaaaataaactttgagtagcttaccaattccaagctagcgttcaagcaatttctgcgaaagatactaccacaattgaaaagctacattgtgaataaaagtagtgatgtgaaaaattgtatatttggtcgaatagccaaaaatgcaaaaacaaaaggtacatacatacaatatatatatcatactagacaagaatattactcagatagaaaatgacaatacagaaacaagaaatcattttctcattaaaagtagcaacaaaaggcttcaaggtatctataacctctgccacttatatttgtactacatttctaaaattgatacaaaattaagctatgtcccatcttgcagatactacatttggtttccttcttagctgtccatttgcctatttacaaaattgtgttaaacttttttcaacctgattctccctctctgtattttatctctttctccatcagtatgatacttaaaatgtgaaatgaactattaaaagtattttaaattattttgacattatattcaagataaagagtatggaaacaacaaaagcaaatttttagacagatctctacaatgagatatgttcaaggttattaaatttaataaaggtgaaaggactacaaacaaagtcttgtaaacctcaaaattatcgttcaagcttcttaatataaataaaggggaaaagagtacaaaaaaaatactgtaaatataagattcagaaaccctcacttaatataaccaagtttaaaaaccctaatttt

SEQ ID NO: 233804 - DNA, 2217 bp, Cannabis indica
gaaaactactaactggcataaaaatgcatctcagaattcaataataacagtataaataactatttaaatagctataaataatttcataattaaacataattaactgctaatttccaaattaaactaagcggtctttacatattcactcggtttggtactccccgagcaatcataagcgatgaagggagtcacttctacaacaaacagtttgaagcactcctctcgagatatggcatccgtcacagaactgctctaccgtaccatccacaaagtaatggccaagctaaaatttctaaccgagagataaagatgattatggagaaaacagtgcatagatcaagaaaagactggtcacgaaagttagatgatgcactatgggcgtatagaacaacatttaagacaccgatcgggaagtcaccatatcggttggtgtttggaaaggcttgtcatctgccggtagaattagaacataaggccttttgggccatgaagaccctcaacatggacttgaaagctgcaagagagaaaagattgctacaatagaatgaactggaggagtttagaaatgatgcttacgagaatgcgaagatttaaaaggaacgaacaaagaaggagtttcaacctgctgggcagcaagttttacttttcaattcaaggttggaattgtttcctggtaagctaaagtcagggtggtccggaccatttacagtggtcaaggcatttccttatggagtggtagaactgaaaggtgaaagccccaagactttcaaagttgacgagcagcagttaaatttctacttgggaggtcaatttgaccaagccaagtccgccatgattctggcgcctctatgaagatctcagccaacgttcagctgtacgacaaaaaagacagcgctattgggaggcaacccaaaattttcttggtgttttagttgaactttcgtattttgtcttcttttagttgttattattatttctgttccattttggtttatgtttagtgaactagtgaatcgaatttttggttttctcttcatttttgtactgtttataaaaaaaaaagctttttttcggggtatagcccagtggcagcggcgagatacatagtggctgcggccataaaatttgggcagagaggcaattttttaaggcttatctcaccgcgacgagaaggattgccaccgcggctataaggcctggacaaaagcgatgtttttcactcgtatcttgccgcggtgagcccacttgtggccgcagcgagattggtcaggcggtttataaagagggaaaatcacacattttcaaaaacacatctttttatcatctaacccaccaccaccgaaaaactcctccccatagccacttttcttcatctaatctcattctaaaccctttttcttcaaatctattcacaatctttcatcccaaatcatgctaaaccacttttcctctcatcaaacactcttttcctttcaaaatcatacccgaatccctaaacctcacccaaactcaaaatttcactattcatcatcttctacctcaagaacttcaaggttttcttcaatggaggtagagtgaagggggattttcattgaggtaacaatttcttagactctctatgcaattattagtgaataattttggattgttggagaatcttgaaattttattgtgatttgtgggatattgttcattacattattttgaagagttgtttgtgacttagaagtgttatttgtgattgggttgttacccggaaagtgaatttttaaggggaagtgctgccgaacttttcttaaattttgagtgttagaatttttgagagatgggtcctaaaagagctagagtaagtgagagagggggagcttcttcatctaacccacctaggggtcgctctaatgttgagagggctagatttgtgaatattgaggcacaagagtgatttctgcaacttaaagatagacccttcatcgaagataggggtatagacattggtgaccctagacaaactagaaacattcatgctgtatttgagcctatcagagagaaaatcataaataggcattggactaagtttttggatgtcactaagcgaaacaaccaaaccttagctttagaattcttggccaattggccagaaagagaggacgacaaggtcaaagtcagggggttaaagtgccggtttccacagccgctattcatgctgtctatgactta

SEQ ID NO: 233805 - DNA, 962 bp, Cannabis indica
aacgggagatcaaacctaatcgttaaatttaacagaatattctttttatttttaattttaagtatattctgttaaaccaaaaaatgtcgttagataagcacttttaatatataaatatatatatattgaaaaagaaattaaggatatctctaataaggtgttaaaaatagtgagataaagttatattttagcatttttctaaaaattaataatttaaaaagatattatattttgtgttaaatttaacttatatactaaaatttgtactaaagatacaaaatataatactttgccaaatttgatacaataataaaaatatttttttagtctataattccttattaatcattaataatagccttcaagacatgtttttttttttaatttataatattactatgttttattttttaaatatttagttacaaatattataataaatataggggtatgattttgtcccgttattgtactttcacggattgtaatctgtgatgtacggcagccgtcagatgagtgagttatttgatctgacggctgagattgatcaaggagtaattaacgttaaaaagtagaaacgtaccctgacactcatttaatgtatcaattcatctaatgtaccacggaatacattccgtgaaagtacattacgggacaaaatcatatcccaataaatataatatataataataattatttattttgtatgctaaatttaacaatatatttacatattatattgaaaatagttttaatgtgttttcatagcaattatgtttcattaaaatttggtttgggaagatgaaaattctcataaaagaggaatgttgtcattaattgtgtaattttaattgtccttttggatgtcaagtatttaaggatgcaaaaaagagtaaagattggtgaagcacgtggattgttcggtttgtcattctcatttttacaatggtcccatctcatct

SEQ ID NO: 233806 - DNA, 553 bp, Cannabis indica
atctcaaataactcaaagaacctttcaatactaaaaagcaatctccaagaaataggcattagttggctaggagcgatttgataccaattgaggatcgataaaacaaaaggtggaaaaagaaacctgaagcctcgaaaaaaggtatgcgaatacatgccacaccaatcaggaacatcccagtctattctttcctccctcctaagtagcctcattttcatattacggggaatgccataagccgatctcatttgagctaggagtggaaccgtcaatttagagccaagattaatgcataatatactctgtgatttgcctaggaaactcggtccatcatcctcattcactaattgagctaacccaattactgggacttcttctatgtctaccgctaacccaattgcatcatggtcatctacatcctgaccataatactcttctgcgacggtgacaggagcgagagacgaggcatccagaacctctcaatcaaaatcgccatccatgtccgtaaggaccacaaaatgccaaccattgctatcaatatcggaatgtatcg

SEQ ID NO: 233807 - DNA, 864 bp, Cannabis indica
atatgaatagatctatacatatctttatttttatgtacaatttttgtcaagaaaacacgaaatgcagtgatcatgcgttttcttagtttttttttttttgtgattttagcgatatttcacgatgttcttagcgacatgtagcgataaaagagtgggtgtgaggttagtgatgaagtttctcgatatgtagcgatgggtcgcgatacactgtagtcttgtgttatgttaactctttttttcaattttgtcgataatgtcgtgatgtttgtcgatatatttagacgtagtgtctggccaagtccaaaatgacatttatcgacaaggagcgatgtgtcgcgatatagttgtcgataatttccacgataaatagtgatgcttttcgcgatagtttgtgacatattatttatctgaattaatttttttgttatttttgtttgcagattcaattgtgtttgtggttgtactgtatgatggggcttgggcagttgaatgttttaactgaatattcaataacccaaaaagtaagatgttaatatttgaggttgacactactatacagatgcatgaaattttgtatgaagagttggatatagaccctcttgtgtatgaactaaaaatagaggtgtgttacatgtatatgaaaggcaatatgataccgccagaagttttagtcaaagatagttaagtaagattgttcttaagaatgaacgtaaaaatgagtgtggagaactattgggttttgtgccctaaataaaacctatttcaatataatcatattaactaattaataaagatcagaaattattttatgttgcatggttcacatgatttatttcatgtttatatttaatttataaattctat

SEQ ID NO: 233808 - DNA, 754 bp, Cannabis indica
ttgagcccctttattcatgaacgtcccctcatctagaacgtaaagatcaccacactccctagcactgccaatcatcgtccccaaggccggattctgaaaaagacaataagaagaaaaaaaatttgcagtacaatttagtgtggctgttagtttactaacagagatgagattgcatgataatttaggaacatgaaggacgttaaataatgttagattattggagagctttacatctcctataccagcaatagcagaaagagacccatctgctatacgaattttattatttcttgcacaaggcttataagaataaaaaaaactagaacaactagtcatatgatcggaggctcctgaatcaataatccaagtagtcttaggctgagtacaaacaaaggtgtacaaaaaattagaattaccatgttgcaccaaagaacatggcggcttttcagagttggaatgtaagagtttcaacagttgctctatttgttcctttgtgaaaggagactgtccaggattgagtgactctggagaagaatcagtaatagattgtaaagctctctcaggtcgacttggctttccaccaggtggtttgccatgtattttccagcaagtgtcacgagtatgccaatattttttgcagaaatcacaccacaacttctttttcttgtcactgttggactcagttcctttgacaaacaaagcagaggagtcattatttaaaataggggctggttcattactggacattaccttt

SEQ ID NO: 233809 - DNA, 660 bp, Cannabis indica
ctccaggtaagggaaattccaaaatttacgaaattaccatattgaatttatactgtactgagtttaatttgtgaaattttctcaaagtgaaatactaaaatttatagaataagtgattatgatggtctcaatagtgtaaatttatgatcgttttgcgaacatacaaagttattttgttaataaaaactttcatattgaatttacaaaataaccatattgaattgatattgtgctgagtttaaattgtgaaatttctcgaagtaaaatactaaaatttatgtttaaaaaacatactaaaatttataaaataagcgattatgatggtgacatagtataatgatcatttatggttgcataatttaattcagtcgtttgtacgtgtaaatttataattgcaaaacaatacaagttattgctttattgaattctttcacttttgaatcccaaacaatttgatttttcaaaattccatggacactatatgtgtaagaaaaattactaatttgactgttagtgtaagtagattacgtatttcgtttttgaatttctgttagtagattcataatgagaaaagtgtttcttcaataaaatttaaaatgagtaatttaatttgtattgtgggattcttactttcttaaaatggaatcttgacatagaaac

SEQ ID NO: 233810 - DNA, 964 bp, Cannabis indica
ccctcagttcttcttccatagtcctcaatctttgactacgattcttcttagcagtaactaggttgatatatatgtatgtatatatttcagaaaaccagtaaacatagagacgtcgtcgactcttttctaacttattttctgcgattcggtgtgcccacgcgtcccttcgccaagcagtgaccacactcctccgatgaacttctgctatccgacgcgatcacgattcccatctcccatctgtactctaatctggaacacgcccaatttcctccaccaatcgaaggtgtcgtggtcggtgtacccctgttgctgcggtattcagtgccatcaccgtcttcttcggcgttggagttctttgagttgccttcgttgatgtagatcgagaatccactacattcgatgaagccacactgatcttctccgccttcggtgttcttcaagctgccttcttcgtcctagatcgaaccgacattgattgcgatctacttagattggatccagttgaaatgtcactgccaacaagatctagagccttctccgatggtacctgagccgagggagccatagatgtctctgtcaatgagcaatattgctcaactctaacatctcattcctccatgagatgctctttaaattccttcaattgagcatcaaagaatcgatcaatacgacgatccaactccatcaacatcttcgcaagatctattttcttcatggctgagagttcttacggtgaatctttcactgtaatttctctcaatgaaagcaccaatttttagataatagttctcttcgggataggacaaatctccgaaatgcactcttcgagacagtgccaatctccaattgaaccaaagttctatttactcattccatatcccataatagctatacaattatatatttatagtgattcacaccctttgcaaattaataataaacccctacactatttcatagtgta

SEQ ID NO: 233811 - DNA, 1866 bp, Cannabis indica
aggtgcatgatgacctgactttccacagacaaaacaactccctttttcttaaaggtagtggtgacatgatttgttggcataccttttattttaattttgagtttataccgaattcgcctttgctgccatttctctcgctttggtaacttggagttccttccagttagcatattcaataatgatgtgagtaatcagatttgcaagggacagctgcttatgcttgtgctttaggtgactcttatattctttccacgattcaggaagcgtttcaactaatagtctagtcaaaacattttctggtaggaagatgctctctgccttgagagcttcattgagtttgagatactcattaatctgaaccttgatatctttgttatcctccatcctccaacgatcaagattgccaaccacgaacttttgttttccagcatcttcaatagtgtactttgcaatcatagagtttcatatctccttggcttccttgtaagagcagtatacatcaaacaaatcattagaaagagtactcaaaattgtgtgtctacataccttattggcatgagtccaagcattagcattggtgtttgttttctcttcagaaagcacccaagcaacaacatgtatatcacagagtgataagactctttcttgccatcttttgaaaaactaaccatcaaacatttctattttagagatgtcaggcaatggcttggagaatggaacagcagcagcagatgaagaaagaacagaaagattgattgctccaataccagaagatatatctccattaatcgccgcgatgacagagagagtactaccaacgggaagagaacctaaggtattatcaatagcagcaacagtagtagcattgggatttataaatcctcaagattgttagaaaaatatcaattgcaataataaaatgataacacctcatccgtgcaaacaagacattctccttaaggatttactaagtaatctcctaggattcaacaggtcttctgattacaatgagagaaccggaaaaacagaaataacaaaaatataataacccaaccaagaacaattatatgtataaataatatgtaatatatatatgttgtatttgttgtgtgtgatatatgttgtatatattgctatgttcccttaagtactatatacacagagtactaatgttcaaaatgaacgttgctcttaatttttgagaagaaagtggatatagatgctaataaataggaatacagcacacttcaaatatattaccaagtccaaaactgaaaaagccacgttagccacgtttcttcttttgaaatatattatacatatattcatatagttataacttacaacacttcaaaagttgactttcctttaaaaataggttttggtaaatgattaattagataaacggctatttgaaaagcatcagaccaatattttaatggcatagtggcttgagcaaggagagtgagtccagtctccactatatgcctgagttacgctctgccctaccattttgttcagaggtatgaggacaagagtggtaaaagaagatgtcatgttcattgactaattgagtgaatgattggaactcactaccccaatcagttcttaactgcttaattttcctctcgaattaattttcaacaaggttttgccatgttcattgactaattgagtgaataattgaaactcaccacccaatcagttcttaactgtttaattttcctctcaaattgaatttcaacaaggtttttaaactgtataaaagcagctaaggaatcagacttttgtttaagtacatcatttagagccaaagtcttgccaaatgtgagtttaagaataacttttcctttaccaagaacttga

SEQ ID NO: 233812 - DNA, 1051 bp, Cannabis indica
ttcgaaacttcttgtaagttgtacctcttaatcaagttgatgaggaatatgcaatttggacttacagttgtgtcttcaaaatcgatccaccacacataagaaagattgtgagctattaggataaagtgtataaccttattcttgttgagttcttaacaggtgagcaagaacaatatagagagaaaaataaatttccttttctctctatagattttgaaattataaagttaaaagaatgttctgatttctcaaatcaggttcctatttatagtagttaaatctctttaattaaattattatttaattgtttaaataaataaatatctataaagaaatctcttaactacttgagagagtatctcaataaccttgaaatatctataacaacttttcaaattagatatttacctaattaaattaattaaataattaatgaacttaaaaagacaaatccaatagggataggaccaagcctaggcgcctaccttgtctatttaagacaaagttggtatcttttgtcctgaaacattttgtcttgacaagttttgtctcgataaattttgtcttaaccattttttgtattttttcctatttaatttatttgaaaaaattatttatttattaaaaaaataaataattactattttgccaattcaaaatagattttcttcgaactctttatacaactctttatccctacccttgacagtattttaaggtggcaagtcggggaccatggacatataattctaagcttcctccgaaggtgaagcatttcacatggaagattagtcattcttagatcccaaaaaaggtggcccttgctagtcgaggtatgcaaattgagaagaaatattttcggtattctgagaattgtgacgaagatgtttttcatgctttatggggttgttggggtaacttggatgtttggaaaagcaacgggttatgggatgttgttgttggattttgtgccctaaataaaactcatttcaatattatcagatttacttactaataaagatcagaaataacatttttatgttgcatggtt

SEQ ID NO: 233813 - DNA, 2406 bp, Cannabis indica
tgaatacgtggcagagggcaaaatgaattaaagaaaaagaacatgtgtcagcaaaataatggcaaagtaaaaataacccatgcaagcaaaaaaagacgtagaggatatataaagagggatcacgtagaagaaagaggggattaggaactgaaaaaaagaagaacccttaaaaagaaatcttgactgtttcccgaccaaaacattcattagagtcagaattcttattgatgtctctaagactattacgaggaaattactactaactttaagagcatttctcgtggaaagtggctcaacttcaaatatgagaatgtacctaatatctgttatcattgtggtatgcttgattatactcttaccaagtgtgtctcatctttaaagaattgtgatgattatccttacccacctcctctcccttaaaaaatatcttttatatctcttgctaaatctttgttcaatcgtagtccgtttgacttgtccaactctgttccctttcaggagatgtctattcctcttttcaattggtaccaattattggctggtgtttttagtcaattctactactaaggactctgaggctagaccttctatcacttctctattgattaccttagaatatggggctttgaattccaactctgccaacctcttgcatatgcttggtagttcgagttatgaggctcttattttcaacatgtccaataattttagggaggaaattagtttaactcactcgggccatgactattacatttcttctgctcttcttatgagtgtaaactattccctccctcttatgttttcctcgggagctgctagagctagtccgtctgagaaccttgcaattcctctttctaaggttcaggatgtcacccttcctctaaaatttatggacaaggctaatttggggtggaagaggtatgctttcacctcccatgaaaagggctcgtgctagtccttctgctattgtgacttcatctgctgttgctgcgtctcatgaacagtcgggtgttgtggagcaatcccgcctaaaaaatgagccctttaagttggaatgcttgtgggttagggaacattcaagcattccaaaagctctcccttattgtgaataaaaataaaccattgtttctttttgttatggaatccaaacttatggctggtagttgtgaaaggctgagacttaaactgtcttttgatcgtgcctttgaggttcctaggaaaattgagggggttgtctttcttattctgtaaggatggaattaatgtcaatattttgaatttctcccttaatcatattgactatattattaagtttaatgagaatgttaatgttcacgtttcctatttttattgctccccttatttgcaggataaagctcatagttggactttagttaataggctttttggtaatgatccacttcttccctagcttattattggtgcttttaatgattacctttctatttatgataggaacggtaattcggactcccttgttatgctatcaccaatttccaaaattttgttatcaaattagaccttcaacttattcattttatggggaattatttcacttcgaaacatggtgcctctcatgagcgattagattatccctaaattcaaattaagataattttttttgtttatatatataaatgtatatttatctgtactagatttctcactcattttattgtccttagctcctagtcttgaagaaataaaaaccaacaacagaaaaatatcattatacacacttcattgtggcaaactttgataattatgtgtcaagagaatgtgagaaattaagatttgtgttcactctagcaaagacagttttgtttatctcatcttattttctgtctgtaataaccacattttacaggagaattacctcaaatatcattttttaatttttttttcaaatttacgaattgagtttctcatgtggttctccggtgggttactatgtggatattggttgcgatttaggttgctccgttggttgctatgtgggtttctacgtgaatttccataaaaatacaaaaaaaaaaaaaataaaattgaagtataaaaataaaaaaacctattaagtttatcacatttactttaaggtttattttctatttaggctgtttgttgctctctcatatattaaatattattacattacataaatattttagtttgagtttcttgccaagttgtagctagttagaatcagtaaaaactaaatacaaaataaaaaataaactcaaataatataacaaacaattacaacaacataattaatcaagttaaaacaataaaaccagttaaataacaaaaattgaacataaaataaaaccactttcatcaacaacataataaaaaaaaaacacaatggaagaaattataatctaa

SEQ ID NO: 233814 - DNA, 1752 bp, Cannabis indica
tcatggcatggctggacagcgtaataatgatcttgagttagaccgagcatgcagaactcccttctcaccagagatgaatctcctgccactgcctcacaagttcaaaatgccaacgtggaagatgcatactaggagagaagatcctctttcccatctcaagtactttgagatacaaatggatttacaaggagtacggggggatgtatgttgtagaatcttccctgccactctgtcgaaagcccctcaacaatggtatttcaagttggctcttggaaagtttagctgatggaaaaccttctcttcggaattccatgcgcaattctcctcctcacgtcagctcccattgcatttgggagacttggtcgaagtaaagcaacgaccaggcgaggcactcctggcatacattagcagattcatgacagaagcgaccaaagtttcgcgggtaatcgaggatggaaagttatccgcgatactggggggcattgaagtcctcggtgaactttggacagatataaggaagaccgggccggtagactcaatgagtgattttcttgaccgagccgaaggcttcatcaagctgaagaagccattcaacgagaagaaggtgaacaaaagccgggcaagtcgaaggctccttccactgggacatccgcccaacttcccaactattccaataattcaagctcaagtggttcaagtaacaaccacaagcaaggacacaggaagaaaggaaagtttactgataaatctagacagactccctgagagaatcatgccaaatacactacattcactattctgactgaagatatagaaagtgtatatatggcaactcagtcgttgatctcttacaagaagcccgggcccatgaagaatgataccaacaaaagggacatgacaaagttttgtcggttccacggagactacggccacgacactaacgagtgttacaacctgaagtgggaaattgaatttctaataaagaaaaacaatccgcatctgcagaagtatgtcaagaccaactaaggtcagaacaaccaagatttgctacctccaccagtagatggacacttacaagtcattatcgtaggctcgcacattgctgtagatccgggcaaagctcaggagaggtatgcccggacagcacaacacgagcaagaagaagtcatcttggccgtggaagaaaggaagcccaaagttccatgagcaggagagccaaccataactttcaacgatgaagacgctgtcaaaattagatttctgcacaatgacccgctggtcgtggaagtctagatagccaataaaatggtggccagaacaatgatcgacaatggagcttcttcaaacatcttgttcaagactgcttacgaaaagatgggactccaactaaaagatcttactccatgcctccagcctgtctatggtttctctggtcaaggagttggacctctaggacaaattcggctacccctcaatgttgcacatgctccgacgagcataactatcatggcacagttactaatattggatgttccttcagcttttaacgtaatgcttggccgaccagccctgtatgacttaaaggatgtcacatcaatattacactcgtgcctgaagttccaaaaaagaatggggtagggtgtctcagagggaaccagtagtctgctcgggaatgttacaaccttgcagtggcaaaggctaagaaggaagtgttgggttttatgccctaaataaaacccattacaatctgat

SEQ ID NO: 233815 - DNA, 822 bp, Cannabis indica
tctcggtttgggtctggggccagctccgagttaggttctatgtccgggtcagggtcatggtcacagcctttctcttattcgaggttcctgtactggcgattcttgttcaagttccaatttcgggtcccgagtccaggtaaggtctgggttcgggtcctagtccaagttcacgtcctggtctgagtcccagatttggatcctagtcatgtgtcctactctagttctggttcaaggctcttgtcctaggtccgagtttgggttcgggaccaaaattggggtgcggttctagctcccatccccaattttgtgtcctcactctgattccatgtttgggtctaagtttgggtccaagtttgggtcccgagtccaagtctgtgtcccgatttgggtctaggtgtaggttggagtcttgggtcttggtcttgacacggtttcgagactaggtccaggtccagttatggttcaaagtcgaggtctaagtccttgttcttgtcccattcccaaattccgatctacttctggttcagttccaattttgggacacagggtacgagctcgggtttgggtctaggtttgggttggggtcatggttcggctcctagtctgggtctaggtctggggctgggtctctgatccagactccgactacgagttcggtcctagccctgggtccagatccggatcccgatctcgggtcccagtctggttccatttctggcgccgggtcacgagctgggtcctaggttcaagtttgggtttcgggtcgggtcttgggtttttgtcctagttccgttgccaaggtccctatcccgattctaggtc

SEQ ID NO: 233816 - DNA, 1073 bp, Cannabis indica
aatcacgtaatacgcctatgttacttagggtgttacactctatttccagctcctttcaaaaacatggtcagcaagatgggtgtcaaagatttatacactccaccttgagaggggctattaggatccttagcttgattgttatttcagttaggttgttagtgtaattaggcacgtgttcttttcctttgcatcaattctgttattttgttatactagaattttgtttcctttccctttgtatcaagagctttgctctatatatattctgtatctcttattcaattcaataaatgagaataaacgattcactctgttctttaattctcacagctaataacttgccaattcctttataattatttaatgtttcgttaaagaaaaaagaaaaaaaaaataaatttaatatttgtttaatctcttccagtacgtgacactatacatgtgatttatttgtagaatttcttttttgaatagtatttgtagcattactattgataatattcttcaaattttatagttaacttttcttacttatattcaacaatatccatgttttctaacttattgttttgccatttttttttttggaatatttatgtactagtaaataacctgcgcttcacggcggatgttaatttttttttaattatatatataaaattaattatgtattttatttgatgataactaaataataaaattaaattaaatttcaaatttattcattttccatataaatttttaaaaaatatgagaaattagatgtaaattcaggccaactcgatccaacgattagaatttgggtgttatatatatcctatttaagataataacggattctatgtactaaaaaaattgaaaaaaaattacagttttataaaatttagtacttatactgctaaaaatattattagatttatgctacttataaatttaaaatattaggtacttatacctttatttattcaaaaatcttgttgtgattctctctcatgaaataagccattatttattgtgttatctctatatctaaaaataatattgttaccaaacttgatgtaataaataattaa

SEQ ID NO: 233817 - DNA, 1288 bp, Cannabis indica
gccaacagtcaagatacaacctctctactctctcgtggagcatcataaaccatacaacagcaagaggtaaatactccaactaattctaatgatgaaaaaaatgaaaatttagccatgattctaacctgcatatcagccagctcctaagctagatgttacagaccaaagggctacaatagtgccctcacaatctcatccaatggtgactagagccaaggcgggcatttttaaactgaaagtgtacttgggataagctatgtggaatatcagccatatggaaccaagatctcttgaggaagctctaagttctatagtttggaattcagtaatggaaactaaaattggagctctcaaggctaaaaaaatctagactcttgtgccaaggttggatagctataacttggtgggtaacaagtgggtatatcgaataaagtggaatgatgatggctcacttgaaagacacaaagccagtcttgttgtgaaaggctttcaccaaagacttggtatagattttagtgagactttcagtcatattattaaagcatcaaccattcaaattgtccttactattgttgtattaaaaaattgggagatcaaataattagacattaacaatgcattcctcaatagttagctagaagaagatgtttacatggtgaaaccatcaggttttgaggatccaagcaaaccaaattatgtatgaagcttcacaagtccttgtatggtttaaaataagcacctagggtctggtttaaccaactcaagaaaaccttaatatagtgaaagtttatcaactcaaaggttgattcctgtctattcttctttatgacatttcaaataattctaatggtgttaatttaagtggatgacattagtgtcacaagaaacaatgctcaaaaattaccttgaagagtcgtttgtctaccttggacagacttagtcgatttaatcataccaactcttccttgtgtttgttgtgtggaagtggagtggagagtcattctcacctcttctttagttgtatttacagcagtttggtgattcatcaagtgtggctttggatcggtattactagccagaaaaaagagctccatgatgtcctaaaagggattcggaaggcaaacgtatttagaggcaaaagaaaggttcttttgagtgtcattacagcaacaatatattctatttggcatgctagaaacaagattctttgggagaaaaaaccctactattaaggtcacttttaattgtattgctaatagtgtttgtgctagagtgaactctttgaaag

SEQ ID NO: 233818 - DNA, 2065 bp, Cannabis indica
tgttaaatttttctaaattttttaaaattttataaaatatcttaagtaattataatatacacaaccataaaaaaaaatacactaaaaaaaatatctcaaatgcgaaaacaagtaaaagtacattaatatactactttaaaaaaaaaatacattataatttcataaatacaattaataatataaatatatattaattaaatataatataatatatataaaaaaaaattaaaaaattaaaaaaaaaaaaaaaaaaaaaagtaggatgtcgtgtgctacagtgcacggcaaatatagcgtggactgtagcttccaccccaaattcaacatatatatgcagcctccttggataagaattcatcaccaaataaaagatttggtgcatccttggtgatgctcttagagtttgtggtgttcaatatactgttatattttaggagagtgattacatctagctctacctcaaaatcttttctcgatttcttagactattttttgttatgatgaaggagggaaaataagatcatggtgggagtagaattgaggattacctcttttctttaataactaataaaaaataactccatattaaaattcaattgaaacatatctgcttttaagtgtaatgtgcataaaataccttcaagatttaatttcttattaaatcctcaatttctcccccaccgagagttcaccatcacattatttttatattttgtatgagtttttttttaatcaatcattacttttttatgtaattggggtctcttttatttcactgtttaaattttatatataaaagtatatctaaaatgaaatgtcttctaagtatttgttcaaatgcattctatctctcttcatatgtataatcaaataaacagctaagggtaaaatggagattttacttataatactgggtataaattaaataatatataaggaaaggtaaaaataaaaggaggtaatgaaaagtgggtatggggtgcaattttctcaaaagggatttatgtttaggctaaaaaataaaaataagttttttctttttattaatgttatctatgtttttaatttattgaatctagctaaatagttttattttttatttttattttaagattcttaactaatcacaaatttatttttttaaaattcaaaaatattaaattataagaataattaagcactatttttgtaaaacttttacatttttacgtttaaaatattcttacggtgttttataaaaataatacaaaaataataaaaaaatacataaaagtaacaggaaaataacattcaaaaaacaacaaaaataacatacaaataacaaaaaatcaacaaaagtacaacataaaaatatatcaaaaaattgtatttactgtaaataaaatcataaaaatatttgaaattctgtacaactgtatttttgtaattttttgttgtttttgtgtattttttgaataattcttaaatcatattattgtctagaatttctctcaaaatatatgacaatcctggagtaagccaagtgatgatgggccccacactacaagacatgtcatcttaaccactcccagagattattgtttcaaaggaataataagagacttgtcgtctccgagagggtctacctggacaagagtatttcttgtctcatcctctccgcaagtgaactaaacccatagaaggatatagaaggacaagcggagtgtagcacactgctcaaggctaaatcactgtatgtgcatttaatgcggcaaggggaagagcatccgactccttacgctgaacagacgtgctcaaggttaaaactcataattttctaatttcacgatgtcccatacatcaattgacgactacatagtgagttatcaaatcatgagtaagaaataagtcaaatctcaccaaacacctataatagcccaaatacatcatgaaaaaaaaggtaatcatgccctgattgagactcaaatttgtatattttaagcttttaattgtgtgtataaaattaatttaattaaatacttttatgattttaattgtaaaattattttaattgaaatatttaatt

SEQ ID NO: 233819 - DNA, 1276 bp, Cannabis indica
atctcattttgtagtcgcttttacaatcaaagttattatcatcatcgtatcttacctgtagtcgcgattacatttaaggtcgttgtcatcacagtatttataacgtttggatcatgagactctaactgtcacaatcacccctctttgggagtccgacgtcctcgaccacacttttggctgggtcaaggctctgatactatttgtaacgttctcgcttcaagcttccattgagctcttacacccatggaatgatggctcttatacacgagtatgtcactctggctgcttcatggaaccgtgatgactgaccctacagaccaacatgagtgtttccagcatgctttgtcctcactcgaacatttattgggaaaacttcccaggaggtcactcatcttgaaattacctcaagtatggagttctttcgtgataggctactgaaaataaaatccaccttgttgatatagcttgtaccaaatcaatccatttaagtcatcatcaatgtagtcccatacctacacaatctcggattaatcatcacacatgaccttcccggcgatgtgggattatacaactccagctctttccctttcgaatcacgggactctgactatcacagtatctcacttgtaatcgccactatatttaaagttaatatcatcatcgtatctcatttgtagtcacgactacattaaaagtctttatcaccaccatatctcaattatagtcgtcactatattttaacacgtatctcacttattacaactttaaaaagtatttattttgtaaatttttatgcatattaattttattatcactattattttaattttaataaaaaaacataaataaagtactgaagaaggattttaactctcagctttaaattactctttcattcattcaacaaaatggttcaaccatcataattctctcaactttaaatgactttttttttttgaaatatgcgttcattactaaaataaaagttagacctcatggtcactataaataatatttactagaatagatggcacgattaccattccagttaagttttgggcaaaaacccacatagcaacattatgacccgcaaaattaccaagtttagagataaagacaaaattacaactcaaaaattatttagatagtctaatacaattcaaaatataattattaatgcgccaaacagaaactttcctttgcaaagccttgataactgtatcaaaatcgcactctctataatcacaaaattttgcttccactccactgctctttc

SEQ ID NO: 233820 - DNA, 2299 bp, Cannabis indica
tttgtagtggaagaatacaatattttttttttcaattaaagaatacaaatagttttaatatcataatagaatattaatatacacataaataataagagttacataagaatacaaatagactttttttaattaaagaatacaaatagttttatcataataataggacattaatataaatataaatgataagagccatacataaataatataaataatttttttagtttaaagaatacaaatagttttaatataataatagaaataaataaaaaaattgagaaaatagaaaaggtaaaagaaaactatgtgtgatgacacatggccatttttttttctttttctaattattttgtatattattatgtatgtttataataataaaataggtagtaattattttagaatactataagttcttagtttaattttttgtatatatatattgattgttttcttacttgtaaagcaggacctgtgatgttttagttgagaatatattcttactcaagtaaaaataaaatggtttattatgtaataaatactaaatttatatatggtatttctttataattaatttattttattccttttctgatatgatcttcattaatctctccagctaggatgagtgatgtctaaggaaaatttgcgggataaacttggctttgatggagccttattcacaatgctaactagacatatcaagatttcatgtgcacacttttcatatccgttcatataaaattttgtcattaatgagtttttgtaaggaaactaattaatgttttctctctgtatccaagcctttggagctcaattttaggtgctatttattcctataaatttcacctaaaccaccaacaaaatgttaaactcttccacttcttaatttcttatatttttagaagagagttttttcttttgtaaatgatagttgttatgttattcattggtgagtttttgtgcctttgagattacttttgtgtgaattaaactacaaagtgaagaacgtgaagaacaactttcaagacaagattcatgtaagtcttgctttaagaggaggcaagcactgttatcttcgggagaatatttctacaagtcttacatcgggagaaaataagcatcactatcttcaagagaagatttctatacatcttgcacgagatgaagcaagcattcatcaagtaatttgaagggagttcaaatattggtgtcttaaggagattcattcagcaaagaggagtacatcaagcttgcggtaaaattattagagagagtctacccaatattgcttcatcagaaagaagccagcagcgctatctttgagagaagatttctacaagtcttacatcgggagaaaataagcaccactatcttcaggagaaaatttctatgcatcttgcacgagatgaagcaagcattcatcaagtaatttgaaggaagttcaaacattggtgtcttaaggagattcattcagcaaagaggagtacatcaagcttgcggtaaaattattagagagagtctatattttgtttaagtcaattactttttacttgttgaaaaatttgactaatgaatatcttttgacgtgaccacgtggactagtagcaatgtgtaaggattattagttccacgcataaaatattatgtgtcattttaatttctgcagtatatttttgatctatcatgttctatttctgatagaatagatttcgattctattcataaatttaatgcaactataagtttgaaatgactaaaacaacactaccaatagtaaaataaaatacttataaaaaggataaaataaaatatcgtagaaaaaaaaacaaccaagtattacaaattcacaaaataatagtcaatataaatataactaaaaaatatatattttaatttattaatattctttatatataaataaatatagataattttgtagtatatattaaatataattaagctaaattaatttttaattagattttgagattgacatccaataattaatcaaatccaattagattacaatttttaacatccaatctaattcaattataatttgatatctattttttttgtaattgggttagattagattacttcagttcggttcaattagattgtattaaattctatccatccctacgagaaagcatgataaaataactactataaacatataaaataaaaaaaaaaaatcttgtcactcttacaaacatgcagcataaagagagtagctagagttattatacacagattactcataacaatctctttattataatagaaattatct

SEQ ID NO: 233821 - DNA, 1872 bp, Cannabis indica
agtctgatgtatagccaatacatataatactagtatacttttgctaatgcactggaaaggacattccatatatctttgtgtaagtaaactttaccgatgattatctcattagtgtaaatctagtacactgataaattgtggtactaaatagtttgaagcatataatcatgattatattccaccgtgtagacaacactacaatcatgaataactatatgttcgagatttaatagaatttatatattaaacatataatcatgaaagtaatcatgtgaaccatgcaatacaaaatgatttatgatcttttattaattagtaaatctgattatattgaaatcagttttaattacggcataaaatcccaacacatgatcccactcattactcaattaacccatatttatataataactcttaattattcataattaggtttatgagatattataattatctactgcttatagaaattgtcctcaaaatttacttgaacaactcgggatactactcacgcatatgcgactctaattcccaagtcgcttctttgactttgtagtttctccacaatactttaaccaatggaatggtcttattctaaagtactttctccttttggtccaaacctgataggttgttcctcatacaataagtttgtttgaagcttaatatcgtcataggtcaaaatatgtgtcagatctaacacacacgtactttctcaacatgtagatatgaaacacatcatgcactctggaaaatgtagaaggtaaagctagctgataggctacctggcctactcgctccagtatctcaaaaggactaatgaatctagggcttagctttcatttcttcccaaacccacatatacctttgataggcaatactcaaagagatacataatgcctcacttggaactcgatatccctacgctttgagttagcgtagcttttctatctactttgtgaagcaagcatacgagatcaaatcttttcaatggcttcactagtcctctgaaccacttatgtcgaaggtaccgtttcttactgacttcatcccactgaataggtgatcgataatttctcccatacaacatctcgtaaggtgccatgctaatggtaccctaataactgttattgtacaagaactcaatcaaaggtagaaattgttctaggaaccctcaaaatcaatcacacatgcttgcaactcttctaataaatgaatactctctcaaacaaaccatcaatttgaggatgaaaagactatactaaatttcaacgtaattcccatgacaatctataaaatctcccaaaatttagaagtaaattcacagtctgaaacaatcgacttcagagcaccatggagtcgaactatttcctttatgtacaatttagcatattaatccacagtataaattgtacgcacaggaaaaaagtgcactaagttggtaaatctatgcactactacccatatagaatcatataaccctgtggtcttaggtaaacctaccacaaagtccatggttatatcttcccacttccattcgggcactctcaaaggttgaagtaaacatacttgcccctgatgctttgctttcacttgttgacaagtcaaacacttccaaagttactcaactatgtaacttttcattcccgacaaccattatagtaccttgatatcatgatacatcttcgttgttcccagatgtaaagagtatggagtaatatgaaacttatcaatgatttctctcttaatctgatcatctactggaacacaaactctatctttatatcttaacaatctacttggtgtcaccaagaaatcctctgtagcatctgtctcaactttctttctatgctcaatcaattctggatcact

SEQ ID NO: 233822 - DNA, 1268 bp, Cannabis indica
gtaatttgtttgtattattatatgtatctttgaaaagggtatatatgtaatttaataagaaaaagcccaaaatattgtggcttttatataggttatagattatagatatagggaaaaaaaattattttgtggaaaaaattccaaaaaaaaaaaaaaaaatcttttcccataaaataacgttttttttttttgaaaaaaatcatagtttttacaaacttgtacgaaaaatacattaactatcatgtaattcaaagtacactagggggcaatagctcgtttggtacgccgtattacatcgtattgtattgtataatattatattaaattgtattttatgtaatatttttatgtaagactatatgtggtattgacttttatgggcacctaaatatataatattttagtataaattaaaatttaatgtagtatcatataaaaatatgatatataatctaattcaatataatacaatacaatacgacctaatacaacgtaccaaacgagctctaagtatttgctatggtgagtatagtatgattgtgggataatatgtaaacaattcattgttttgttcaaatttaaaggtggaaaagttttaatttttaataagtcccacatgaatttaaggaggaaagctaaaccttttgtagatttgagatgccccatgtttacttaaagggaatgagaattaatggtatggtattgattcccatacaattgtttactaaattttagaaagggaaaaaatagtggggcccacacaaattaaagagaaaacaaaaagaaatattctcccccatttttataaggaatacatttcctttttctaacttaatttattttaattttaattttaattttattaattaaaaataaaaagacaaatatgtcatttaaaaatctataaacagaaaataattatatgttttaataatgataattttgtcaaattaaagcatttcgattaccttttctagttatataaacaaaataatataatttattctgattctagttacagtttagtaacacgtcataaatacactccctccacactttctcttttaactcagaagccaaaacaagaaatattatttcacttcaacttctttcaaaaaattgtgttctattttaagattagagcccaaaaagctctagcaagcatattcgattcaatttgaatttattagaccatttctaatgcaatgtataaatattgtgcttaatttagaacaaaacactaagagcatcactgatggagtataaaa

SEQ ID NO: 233823 - DNA, 1171 bp, Cannabis indica
taggagattgaattaattttgatgccgtgcttaaacttaaataacaggagcgtttaaaacatgacagtaaaggccgagctgttgaacacaaataataaagaaaacgttttaaaacggcaagtggacccaaaggccttttgactaactttagcatagcttagacttacagctgtaagactccaaatccgcttgtacagcaataggcttttttgagtcactcgaaaatcaacggctgaaatggtggttcgcaaaaagcaaaacctgattgaattaagggatataaaaatagatgaatatttttatatttaaatagtcaggttaaggatgacttcaacgtcttccacgtcgaatgggcccactccagcctgtaagaatctcacgtgatatttgttgaattcctttgactttttcatacaataccggaaagctactcttctcactcgccccagtcctcgcgtcactctcaccattccatccacttaatgataagaatttcagtcattcagttgcaattaaagggaagattctcattacattgttgaaacaagttacgaaacaaacccatagtggataaatattagaagtagtcaagacagcttactataacaccatctcgaatgatgtaaaaaaaattgttaaatttaacacaaaaatgagtaaaattgatatgtacaatgacaattaatgtaaaaaattattattattaataataataaataaagtgtaaatgccttttataaaatagtagtaatattgtaataaaaaatatatattaaaatcacctactaatgctaaatagaagtaaatataggtcaatcttgatgcggttgtatttaccgaaacttctaattatagtgttgggtttgtggctagaaacagctctagtggtttatttgtggaaggcggcactaaactgtttaatggctcggtgtctcctgttgtggccgaagcatattggagttcgggaggccttgagttggattaaagactgcatggcttcatgtgacattggaaacggattgcatctcggtggttcaaactattcgaagcactagttatgctttctacgtttggcaaagttataagtgattgtaaaaccttgttatgtactttgcgtaatgtttctttttattttgtaaaatgatcagcaaatgtagtggctcactccttt

SEQ ID NO: 233824 - DNA, 532 bp, Cannabis indica
gatgttaatgaaacatacttgttagtaaacctagatcctgtaaaatatttctaacagctgagtatggtcatctcagaagcattgagttgaggacctaggcagggtttgttttgaatctggagaacagaaccagtggctcccaaaattgttcaaaatataatacaagatttcagtgacgaacatatataaaagttttaattttaatatccaataaattcaatctgaaataaaattaagatagaattttcaaattaaatgaacattgataatagagtttttaaaccgtaataagagcatgtttcagatgttcttttcaagtttcacgtcaagtgaaatagatctaatagaaatattaaacaatagattcaacttccaatgaaaacgattgaaaatacaatctataaaagaagtaaagaaaacagaaagagtaatacgagtttctgcatacctttttcagatcatcttaaattttgatccttatcaatgaaatcgataccttaatcaatatgctcacacagaaaactgaaaattg

SEQ ID NO: 233825 - DNA, 773 bp, Cannabis indica
aagaggggatctggatgtgtgctttttagccaaaccttgttttgggaggcataacttaagctatcatccagactgtgcccttctcttccatggccgcttggaggggaatctttccaaaagttgacagaggctaggttaaatttgacagtggtctcctggctttcgtcgagaaaagcccttcctgcactaaaatttaagtcaaggcttcatatctagaattgtaggtggaaaccaagttgggtggcagactttaagcggttcctccttccaagagggagggttgaagtcgcgctggtctctaagtaacatttccatccataagtttggaatgtacacttttgccacaatagagaccacgtggcgaaggtgtaggtgtctatggaattccttttaaactgtgcaacatgcttttggtttccttgaaggaaagctaaacctgcgccataacttgagcaactattccaggctggggtctgctttgacacacaagagtcacgttgaattttgatatggcagactttgtttttggcgagggaaggctaaagttgcacaaaaatctgagcaatgactttgatttaaaagaccaaaaggtgaaacatcattgggcgtgcgataaacttcaaccagtccttcttttctagaaaggagagttgaagacctatcgtacccccagtgatctttcacacacaaacaactacgtgcacgcgagagtcatgttgaacttttatgtggcagacttcggctttcgcgcgtgaggaaaggctaaagttgca

SEQ ID NO: 233826 - DNA, 1616 bp, Cannabis indica
ccattatggtctcgaacaacaaaagcacctccaaaccgattttgtccttcaaagatagacgcatccacattgatcttgatactgttaacttcaggtttaatccaatgctcgaccccatcataggactgaagagtagtccaagatgtctcaatttgagttttttgagcattttgccattgatcaagatagctttttgcagacactactatcgctgaaacattaatcgattttccttgccaaactacatcatttcgtgcgccccaaattgcccaacaaagggcagcagctatgtgttgtttttctgctgtcaaagagacaaaaatggtcatgcaccagtccaagaacctgctgccagccgtgagtgcagaagtccctatacccactctttcccatacttgcttaatggctcggcaagtgagcaagacatgagaaatggtctcatcaaactcatcacataacggacaacgagtattgacggggacaaactttgaagcaagctgtgcaagtgtggggagacaactagagccggctctccacattagatttttaattttcgggggaagcttcaaagaccacagaattttccaaaaaacggaggcatccacatcattggttagacctttcaactcttgtaaagcatggtatgcactcttgactgtgtatagaccagtcggctccttacaccagaaaacaaaatcggttgtttggtcattattgacaggaatctgcttgatcaaactttgttctcgatcatcaaacaaatcttgtaaaatttcttcatcccaagaagaaccatccatggacaagagattacaaaccttagcgtgctggagagccggatgagaggatattacaaaaggatggtctttatctggtagccaaggctcgttttgaatgttgatcaaagtgccatcaccaactttccaacgagcacccgcacgtataagagcttgagcttcccaaacactgcgccacacaaaacttgggttatttcctataccagctgagaggaaggttccatgaggaaaatatctggccttaaagatccgagagacaagtgaatccggtcttgtaatgaaccgccaaccttgctttcccaagagcgctaagttaaaatcacggagattacggaatccaagacctccattattcttgttgtggcacatacgatcccaagacatccaaggaatccctttattttcctttgaagaacttttccaccaaaatctagccattgcgctctcaatgtctctactgatctctaaaggaagcaaaaatacattcatggcatagctagggagggcttgagctactgatttgattaacacttctttaccagctcgagacaagatttttgaatcccaactttgaagctttttcctgacccgatccttgagaaatcccaacacagctgtcttattacgccccatagtactagggagacccagatacatgcttctatcatctgcttgaggcatttgaagtagcgtagtaatatcttcccgtacgtgattcaccgtgttcgtactataaaagatagatgacttccccaagttaactttctgtcccgaagcgcattcaaattgatgtagaagttctctaactcgagttgcttc

SEQ ID NO: 233827 - DNA, 1323 bp, Cannabis indica
atttgctaaaagaatacatgttttactcgtcttacaattatttttctctattaaaataaaaaaataaatacaaagttacattttaaacacaaaaaacataaataaatccttatggtaattcatcaagatacctttttggtttttaaatttaaacgttatacaacgcaaaaacaccttattttattcaacttaattctccgatgacgataagaaagttgtgcactttgtaaacatcaaaatgaccacaaatatagtagatccagttggtattgagtccaagatgatcaataagtcaaacaaaagaagaagaagaagagaataaaagaagaaagataaatgaatctttttgttgattagcgtttttattaattaatatctttatagcagaaaaagaaaaagaaataaaatgataaattaagtgagcacgtcaaaattgtttataagatgttcagaatggtcccagatgtaaaaattcctaaaaagttatacaacttaaatgtgcaaaagatgtggcataattctaaatttaattaaatttataaagaaaagagaaagccatatgtttaaaaatagttggaaaaaaaataaaaccctatcgaaattagaaatagtacagctttaacattttcataacccccaagaatttcaatttcatgttgctaagattctactctagatcagggttagtcattgttggattttatgtctcctaatattgaagttgttgttaattatcttcttgtctctaactgaggctatttttttggtatattgaaaaatacttcttttatttgtcaattaactaaatttagtaatttactcctattttatatttaattgaaaatatctcttttttgtatgtattatatttaaaaaactctgacataaggaagtcatacacatagagagtatgttgaagtgacaaggataaaattggtaaagtatttaaaaaaagatctaaaaatcatagactttaaaaaagtaaaaataaaagaggacaatataaaaaaggtatagagtctaatttcccctatttttttgatctaataagtctatctttttgggtatatatcttctacatataattaggaccggccctgaacataagcgggctaccggccctaagcataggcgggctaggcctatatctaaggctcacctaatttatggtcctaaaaaaatttgtcctcttttttaaattacacatttttttcactaatttaaaaaaatatatattatatcttttttaaatatgggcctagaaatatttttttctaattatgaaccactaaattttaaaatcgaccctgcatataaatgtaa

SEQ ID NO: 233828 - DNA, 1084 bp, Cannabis indica
ggagcagttgtttggagaagtactaagcaagcggcaacatcagactctaccatgaaggccaaatacatagctgtcactgaagctgctaaggaacttgtctagctaagaaagttcttctcaagactttgtgttgttcctggaatggaaaaaccattggttttactttgtgataataccggtgctatagtcaacagcaaaaagcctcgaagccacaagagaagcaaatacatagagaggaaataccacatcatcagggaatatgtggcaagaggggacgtattggtggagaaagttgatactgaagacaacttaactgatccattcaccaaaattttgactgtaactacatttgaaaagcacaaactgaatctaggattaattgaaatgtactagttgttttatgttagtacaagtgggagtttgttgggctttgtgccctaaataaaactctatttcaatgtaatcttttatgttcatttatcaataagaaaacagatttattttcattacttatttaatgtgttatttagttcatgtgatcatttattcatttgatttgatttataaatttatccaaatccttatcacattaatattcttgtttattgtgttaaacacaatgaaaagtaatcaagattgtgagattaaatgtattcctatgatttatcagtacacatggtttaactgataagataatctacaatgtagtttacttgcacgttggataagtgttatgtcatttccaaggcattggttaaagtaagcttggattggatgtatggagtatgcatcagaagtgaccaacattgagcttggatcagatataattaaacttaccgtaatatctattcaattcaatatcacctagttgatcttagatcaaaggatctcaatcctgagatagtttggttctagttcagttgcattatttatgttcttcaatctattcattaaagtcgactaatgtatcttctcatgacatatagattaaggacatggtagttcaattgagcgggagcgctaatcatagatacagaatctatagcttctatctggacatggaagtaaaatgatgatttccttc

SEQ ID NO: 233829 - DNA, 1183 bp, Cannabis indica
tagaagaaagtgaagctagagggaccactgacggtacagatcctagtgatgctaaagggaccaatgatccttgtggtcctagtgatgctagaggggccaatgatactgattagtgatcaattcacttcttcgaaaagttatggtaaattcaaggagaatttttttacaagagaagacatggaggatcatagtaattatatagcaatgggcggcacaccagatggggagttacatcaaggaaagttttttagagacaaagagcatttaaagattgatgttgtcttgtatgcaatgaagaaagtttgatactactgtttggcacgttacatgtaatgatacagattgtgggtggagattaagagcgaagaagaacgtactttctaacatgattgaggtgactacatttgaaaatgtacatacatgttcccttaatctttgaggaaaagataaccatcaagcatcatctttgatagttgcccacctaattaaggataaattcacaactgacagtttgaatcatttggcctttgatataaggagagaaatgcaccaggatttttgggatccaaatgagttatgaaaaggcttggaggtgtagaaagaaggcattacacctagttcggggtacacctgaagattcatattcaaaattacctaattacttgcacatgctaaagttgagaaattcaggtaccatcacagattttgtggtagaggattgtccctttaagtattatttcttctctctgggtccttgtaggattaggtttagattttgccaacctgttgtattatttgatgggtctttcttgaagaccaggtatggtgggcaaatgttgtgtgcagtggcactggatgcaggcagccatatttttgatagcttttgctgtagttaatagtgaaaaccacaactcttggacctatttcctaagaaaattgaaagaagcgattggtgatgttgagaacttagccttcgcgtcggaaaggcatcaaagcattgttcatgctttggagaccatgttccctgatgcacaccatggttcatgctaccaccacattattatgaacgtcaaccacaagttcaagactgatgttttcacaaatcatatttacacatgtgcctacacatatttaaaaatagagtttcactgagaatttgagaacattcaggcaatgaatgttg

SEQ ID NO: 233830 - DNA, 957 bp, Cannabis indica
ttatctaaaagaacataaaaatataaaatagcatatattctcacaaaatagaaggaaaagaactatatataggtaaaaatacatacacaaattaagctaaaaaaacataaataactctttattcaagagttatcagcctcccagaagtgggatatgccttctccccacgaggtcagcaggttttttgatttgaatccacccctaagcaaggtaggtcgaggtacttctatttctctcaaccagacctcaagtggttgacgggcatcaaggataaggccattagcaaaattgggcgttttgttgatgaatacttcatggtggatggcatgggcaccacccatacacagttccagaagatccccagatatcaccgccctcccttcactcttgttcttaaagatagagctcaatggcttgctcaactaccgcgggatgacccaaatatcatctagttgacctccgaggacagctttgtgaattatgggctctatccgaaggatttcattcctaagcaagtgaaggggaggaagaggaaatctggtgctggacgggctgagagagctcatcaagaggatgagctgattcatctgaagcgtgaggctaagttgaagggaggtttaagggccaagcagtatgcttaagagcccttcaatcctaaagatgaggctgaggaagagcaggtgactccgctcaaaaggaggaagaaactttcggcccagcccaggcccgttggacatgccattcgaattagggagcctagttcacctgcgcggccatcttctcccgtgctaggaaaagggaaagctgctatggcagagataagagacttgtcaggtggcgatggactttcgagtcttgcccggaaaatcgtcttgcaggctactccgtcttgtttttaaacttcttgggtattatgctttatgcttctgatgctttttctctaaccatgttgttttt

SEQ ID NO: 233831 - DNA, 710 bp, Cannabis indica
aaaacttaagttaatattcctacaagtttttttttctttcattctttcatgatataccaatagaacataaagacaatatttcctagtgaaatataactatacctcaaactcaaactaataatatttcatgtttttttaatttctcccctttcactcattatataccatagcacattaaaataatataccacaatcttaaacttatatgtatactaccttttgattttttttaatatactattagacataaaaacgatataccattgttcaaaataagtatacaaaacaatttaaaatattataccacaaattaaaaataatatacaactctttataatttttttatttcttaatatatcatagtacataataagaatatataccgcagtgtaaaattaaatatatcagaaacttaaactaatatcctactcatagtttttatgttctttctttcattcaagtatttcatatcacataaaaatgatataccttagagaaatatgaatatacaagaaaactaaactaatgcacttttattttttcttttccttcatgatatactgtgccaagagagaaggaggaagcgagatggtcaaaacacgagagaatgagaagaggtagaaagctagggttaattacccaaggtgtaaattgtaattttatcattaaaattttaagtgataggccattttgctaaatatttataaaaa

SEQ ID NO: 233832 - DNA, 915 bp, Cannabis indica
cttctaaatctaattcaattagaaccactgacagttccctcccttctactaacactgggagagaccatacccatctcttggagattaccacttctctagtaggtaataaggtaccaaattcacaagacatgatatcacatggtctactcaatttctcaatgattctactagaaatgtatgaatgtgtggcaccagaatgaatcaaaatagtaaacataataccaccaatagatatctcacctgtaacagtcgaagggtcagcctcagcatctgcttgggtcaaagcaaacaccctagcagaaaccataggactctctttcttagcctcgggcttctgtggctgtgggcagttgttcatgaaatggcctgctactccacatgggtagcaaacactagactggcattcacccaagtggtgtctcttgcatttcgagaatttagggtaaggctgccaaaccttatttctgcctcaacagaaaccctagttaccttgaatttttttgtttggacccacaatcagtggtccatctggtttcctctttcgatcactggggctaaagcttttactcactctagtactagacgaggtcttccacacgtccttcctttgagtactttttttacgaatcaagcttttatccccctcagtagtgagagctaagtccacaatctaggggtaggtcttcacgacctttgattgtttggctaccataattacatctctagcaatataatctttaagacctctgatgaacttagctttttcttgtagcatcactggccacttcatcagacgcaaacttggccagcctgtcaaacttggtagcatattcagtcacagtcatgctaccctaaactaatcgtgcaaactctttagcctaagcaacacgaatggtgattagtggtcaaaaatat

SEQ ID NO: 233833 - DNA, 1424 bp, Cannabis indica
atgatctgaattgttttagacaaacaacaaaaaaaaaaaagaaaattcatgagggggaaaactttgaattgcagagttggaattgcatacctaaaggaaaagtataaagaaaatggtaaaattttgctaatatatagttaatatatgcactcttgagaatcttttctcaaatcttaattgcccctttctgctaatttcaggtcatggctaaaatcatttaatttttttttggtttgatatcacacccagttctaatttgtgatactccatattatacatttataaaaacagtataaaataaaatatactaaacccaaaacctaatcaaataaactttaattaataatttacaatcaaaatcaataagaatttcacataataattaaccccaaaaatttggtttagggcttcggtaagccaaagaaaacactattatatacttgtaaaagaaattacaaataaattatcaaaatcaaaatagaatgatacaaaaatacctcaagcagagtcctagcttggagaagagaatgcttagataaatggaggagcaccgatgggtcagaatctctaaaggtggaaagcactatctctccatcaattactggaaatagagaattagggtttttgaattcttacttctttgtctgagacatataaaataaaaaatgaaaatacacataaatatatacctatatatgtgtggctacaaaataaattattgaattttcaaaaacaataaataaataaataaatgagttattgccacatcatttgccaattcattagaaaaaaaaagagccaaaatttttaggaactaaaaaatggagggaaaataaagcgccaaatttatgtgtggataaacaaaattaccaacatttaatttccttatacacttgtatttcagtcacacttacattttccacacatattttatcaatatgtgtgggtaaatccaacatcgaacctacacttattatgtgtgggtaactatgtgtgggtgaaatctatgatttcttgtagtgtcccttcattggggatacctgaaggaaaacaaaatccccaatctagaattcaacatctctacgctttggatcttcgttgcttttctgtctgctctatgaagcaagcatatgagcttgaatctattcaatagtctcaatcgttctttagacagcctcaggtccaagatacatgcattcatctgcttcatcctagtgaatgggtgaacgacatttccttccataaagcatctcatatggagccatgccaatggtactataataacacttgttatatgaaaactcaatcaaaggtagatatttgttccaagaaccttcaaaatccattacacatcccctcagcatatcctcaagtatctggatagtcctctaagattgaccatcggtttgaggatgaaaagctgt

SEQ ID NO: 233834 - DNA, 1514 bp, Cannabis indica
gattggggtggtgaattccaatcattttctgagtgtgtcgtgcaaaatggaatagagtttcaacactcttgtcctcatacctcggctcaaaatggtcgagccgagagaaagcatcgacacatcgtcgaaatgggattgacattacttgcccaagctcatatgcccttaaagttctggtgggactcatttcaagcggctgtgtatctaatcaatagattaccaacaccggttttgaaaaatcattccccctttaaggttgttcatggtaagaaaccggattacaagtttctcaaagtctttggagttgcttgttatccgtgtattcgaccctatcaaacacataaattccaatttcattccactaagtgtgttaacttagggtatagtgacgctcataaaggctacaaatgccttagctccacggggagaatgtacatttctagaaatgtcatatttaacgaagggattttcccttcaaatctggttttcttaataattacaaaccagaacagcctgtttgtgttagtgtgcccatttggtcgagtctatttcagtctcataaacataaacaacctgctcttagtaactctgaggtttctgtcacaccagcagccgcatcccaggtccctggagaagacacaccagattctaatgaccaaaaccaggtaaatcaacttgacacatctgatgttgcatctggtttcttcgaaaatttaattactggtgtgcagaacagtcctactgcttcatcaagtaatctggacagcagtactgctactgataaaccagaaaactcctcacaagaaccagtgcctttagctccctcacatcctatgattactcaagctaaagcagggatattcaagcctaaagtctatgtaggccaatctcagtggaattgtgacaatgaagagcctactagtgtcgaagaagcacttagacacaagggctggaatggggccatgtcgacagaaatgattgctctcaaaagaaatggaacatggatcctcgttccaaggactgaaggcatgaatattataggcaacaagtgggtctacaaagtgaaattaaatgcagatagcacttttcagagatacaaagcgaggttggtagcaaaaggcttcaatcaaagaccgggaattgactttggtgaaacgtacagccctgttgtgaaggcttcaactgttcgaattgtcttaactattgctgttgctaaatcttgggatattaggcaacttgatataaataatgcctttcttaatggagatctacaagaagatgtgtatatggagcgacctcaaggttttgtggatgtatctaaaccaaatcatgtctgtaagcttgtcaagtctcttatggattaaacaagccccaagggcatggtatgacagactaaaggctactcttgtcacttggaaattcagaaactccaaggcagattcgtccttatttttctacaaaatcccaggtctagttatcatggttctaatctatgtggacgacataattgtgac

SEQ ID NO: 233835 - DNA, 768 bp, Cannabis indica
ttctccacttcatgttagagtgccccttgtctctcggaatcaaagggtttccccttctatctcttagctgggttttgggacgagaactagattggatatccacgagggataaaatgcctcgcgtataaagtcgttgaccagcaacttctccacttcatgttagagtgctccttgtctctcggaattaaagggttgccctttctatctcttagctgggtaattcggatctacattaaaatgatggcatataatcttagggtcaatctctatcatatctccatggctccaggcgaattgatcatggttcgccttcaaaaaggttattagctgctatttcagttgttcatccaggttcttcccaatgtaaacacactttgtgggatttcttgattctagaacgacttcttccaactcttcaatgggttttaataattttctttcatcttgaatctgaggatcaggatcttcatccttctcaccttcatcagtcaagactgccattagttggtgaccggcttctctatgttgcagcactatgcgatagcattcgcgaactagcatttgatcaccttgcactacccccacacctactggtgtctgaaacttcagagataagtacttaatcgaactaactgcccctagtctgattaatgttggacgacccaatagtatattatgttgggttttatgccctaaataaaactcctttcttataatcagatttacttattaataaagatcacaaataacattttatgttgcatggtt

SEQ ID NO: 233836 - DNA, 3599 bp, Cannabis indica
aaaatgatagacttaaaaaaaaggtaaaaataaaagaggataatataaaaagggtatagagtataatttcctcaagtataaacgggctatatcagaaccaacctaactcatagcaaaaaaatatatttttttaaaaaattatatattttttaattaatttagaaaaatatcatattattctttaaataaagactattttttttttatagttcattaagttacagggtcgactggttacaaaaatatattgaaaaaattataccttatactctttttatattgttttcttttatttttactttcttacatgttccacaacttttggaacatttttatagtttttatttataaaaaaatacaaagtattatttttatattattttaaatttatacaatcttgttcatacacaagttttagaaatgaaaaaattcataaaaatcacttctcttttaaaatttaaagctagctttagagagtctcactcccattcatccatatctcagaaaaagactttcccgatcccaattttctaagacacaaaaccccataaacgaaaaaaccacaaacgaaacccaacgccgcactagatccgacgagagacaccgccgtacatacgagcaccacaaacgactcctctttactcctcatatccctcgaagtaatcgcaagctcaatccccgcaaacaacagcaaaacccccaaaaccccaaccggaaattcactcagtatcgccaccagcgacgtccccatcaccaacccaagcgtcgacttacacgcgccgagtatagccacgcacgcgccgcttcttccgccgaacttgtactgacccgccaacccccctgcgccgtggcagcacggcatggccccaaaccagcaccccaccacgttcatcaaccccaccgtcacggaaactgaagtcgccgtgaaatccttcccgggaaagaggtccgaagagagcttgcagacggcgatgacggagttcagaacggaaagcgggagttgagggattgttccctttacgaacccgtccttccacgcgcggcgcgtgattctcactgcctcaatttgtgaaggaccgaaatggatgtcgtttacgagtttgggttttcttacgaaagcaaaaacgacacctaataagaacactaaaaacgcagaaggaatcgaaactaacttaaactttttcttcaacttatcgaatcggttaatgggtagaatttcttgttcttgatcttctctagtattgttttcaatactatctgaatttgaatttgaatttcgggttctctgttcttccccggcgccattaataacgacaatgaaacaagcacaaacaagagccaaaataagtccatccaaacccatccatggcctcttaccaatcgatttcgatttaggcaagttctgaatattccgtacatatttcaccgcagtcatggcaaacgacaacccctgagcaagctgaatcccacgaacgacactcaatggaatcagcttgtaaacgagttgcattagcccagtaacacccagaacgaaaaggactccacccgttaagatcccggcagccataatctccggaataccgaaatcggggttggataaagctacggcggcgatggatttcattggttggactggcatggggacgccgtagatagcgcctgtgattatgttgtagattccggtgaagataagggtggtgccgaggttgagatctctggctaaagtgagggcaagaatgatgggtatgtaagtgccaaggtctcccatggcgccattgagctcagcccatttggagttgaagagtagattggttcggagttggtggaggagtttggccgggagagtgagtggtttttcatcggaggggttttggtgctccatatcaatatttgattatagtttgaagagaagttggcacatacatagatttatttataaattgtgtctttttttttaagaatatgccataacaatttgaaaatgacattagttgaaaaggacaatataattcttagcaaaaatttcatgtcaaattttggatatggtataataatgaaaatattgtattgaaatattatatgtttagtgtgatctttcgcttgagtaagatttttattgggatggtgtggctgattcgatttgaaaaagtccttccttgtttgcaagttttttaaaagccaaatcatgttttgtaagggtggtgtttgatccttctaaagttaaggtttgttctttgttattttgcttcatctttgtaattggtcttctgacttgtttgactaaattatatgcaaaaaaaaaaaaaagaacataacaaaaatcaaagcattgattgtctatactatagtgtctctattaacctctaataatgtcacattactacaaaataagcatttaaaaatacttttttttacaactaattgataaagagtcgatactatagagtgtagttaaataaaattttgtaatacccgacgccatgagtgtcttttatggttttacatattataaaataatcaacgaaatttatataaccctaatcaattattagtctcttcatgcattttaagtcattttaatagataaatttttcgacatattaaaaaatgtactaagagattatctattaattgaaaactaatgatatgtcaggctatttgcaaaaaaaaaaaagagttttacatttaatcattaatatatacaaaatactagatttggtacaaaatatatgttgtaatgcaatctaaccaacatagacctatgaatatgattgaaattaataagttgtatttgattttttattctttgaagagtgttttgtgaaagcctgccgccgatgttaccaaaattagtaatttatctttagtgggcaatttacaaacgtaattggcacttaaattatttatttatttattaaaaaaatgatgttatgctattgtattaattatcattatcttcaaagtatggatgaaactaatcaagcttaattttagttaaaataaaattccaactattaaaagaaacatataagcgactttaagttataacttataatcaatatttattctttttaaaatgttactaacaaaaagtctactatatataaagatgcccgttatatataaacatttaaagtgtataattagtaatgaaatatctagtgtaggctttaccacttaatgaaatatctagagattagagttatctgttaaaaggtgttaatatatgtctaactaaacaattagaagaatatgaataatgatatatattaagaaacataatataagatttaggtttatatatattggggaataggaatatcacaaagggtggtggtggtcataactgggatagagtcaaactttacagttcggggcactatatttgataggaattaaatatgctcatgactggcctaccaaagattgatatatataaaataatatatattggtttatatataggttaatattatgatagaacgtaactataatataatataaggtatatattttataatactgtttgtatataattaagactttatatatgtaaagtctttttttggcaagttagttgacaaaataatttttccatt

SEQ ID NO: 233837 - DNA, 913 bp, Cannabis indica
ttctccttcagtgttgactgcatctcctcttgttttaaaactctattgactaagttgttgagttcttctttgaatctcttgactcgcaccctcgtcaccaggccaactggaactttacttgtatctttagccttagtgttctcatcacatagtatccactaaaatccctatagcctataatcttggatatatcaaaaggctcgattggttctaaatcccagctcgcccctatatgacctgccctatctccatagtatcatattggtcagctataccataatatgactcgtgattattaacctggacgtagaatccaggataccacttttcaaacttatgagcaatgcggtccacgagaagggaatcccaaatataaaaattaaggtggaagtcttggaaggtgactaatgtacaacgtttacctctaagtacagtgggagaccaaccacatggattacctcgggatgctcctgcacgggcatcccgaggggcagtgttttgaagatattgtgcttgagccaagggatcccaagccttatcctttttttagaacagtaatctgctggcaagaaaatacttgggaatgtgtaatcacaagtatattccttatcagcgagaaggcccaccgaccgcaggttggcctcgttcaaaggaaactcgcatggccaaagaccataggggagagttattaggagcctgtgcctactaaccatctcgggggtaggagtaggcctcatcaagagagctgtcaaacaaacaaaacattggtcaaaaaagttgaaaaataaggattggtataaatgagtaagaggaaaacaataacttacaaagtgtgcgaaaggtggttgtgccgatggggaaagaccaggtgtgcaaaaaaagttgtccttgaaggatactttatttggcaagt

SEQ ID NO: 233838 - DNA, 720 bp, Cannabis indica
taataattctaactaatttttttaatgatttaaaatttaaactcatgtcaattatcactaagacattaattcatgcatctcaaacagatgtgggcataatttttggaatttttttgtatgattttttaattttatttatttatttaagatttgaaactatgaaatctgcaaaaattcgattgtgcttaatgggcactcaatgttgctcgatgtctaactcgacggagccttaaaaatcaaaagttttatgaaaagaataattttggtcaatagggggttgatactgctcgattttattcaatgcaattattacaagagacataaattttaatttaagtgtatgtttcagatgattattattttgaatttgtgcatgttttcaagatatacacatttaagatatttgtagatacaatttctgaaagtatataatttgaaaccccgatcaaaagattcatttttatgtcaatgaggcttagtattatctaatatgtcatatcccagtttttagtacgcaactaaatatcgagtctcatataagtagtgacttttattaaatatcgctaactaattgcagtatgtgtaccttataccaatgttctttccaagagtgtatttacatatcttaaatgtatagatcttaaaaaataatacttaaatttaacaaaagaaaaagaaataattacataaaacacaatttttgtaaaattatatttttac

SEQ ID NO: 233839 - DNA, 1310 bp, Cannabis indica
atattatattattataaataatataacaatattatataaatatatatacatactataaatgtgtgtaatttgtatacttatgcaagtgtggcatagaaagatggtaaaaatagtgagagatacataggaagatgtataaatttatgggccctaaatttatatctctgaaaaccaattatacatcctatacataatatagtattaaatttctatattatcaatataaaattttctaataattataaataacaagagcttagccacttgagccgctcaagtggccataggtgggtgtgtgagtgttggaggtcctgggttcgagtctcaggtaaaacatggctgtaatatataaacgcaaataacaagagcttattgaataagtcattttcattcacaattatttatggtttattgaatatatgacatacccaaactctttataatttccattggaaactagataattaagttattttgcagtgaatttggaaataaggttgtgtagtaattatttaaatttatttttgtttttttaatgaattaaatttattttgaaaataaaaataattaacccaataatatgttgaacaagtacgcattttgcaacacaagctcaattgacacttaacagttaaaaaaacaccctacaataaaataataatgaaaggattattgtcgtcttttttatctattatttattaaaattatatgtgtaacaattataaatgataaagaatttttcagacaactctaaattttaatataataatatattataaaaccaatcaatcatacacttaataattatattttgtactccataataaaaattattggagttcgtttagtatgtcaggttgtatagtattatgttggattgtattaatattatttaatacaatactatcactatgtttagtattaactttgcattaatagcttgtgtaaaattatattatttatattataaactcaactccaactccaaatcccgtttagatcagggtatggcgtatgggaccagggccggggttgggggcttgtgccaggttcaggcaatacaatacaacttactaaaagctgtgtcaaacgggccataagtgccataacgaaaataattgtctcgtttggaaaattttctcctaaatttaacatattttttttttgtttagatatttaattaaaataataaataatttttactagaatgttttcttaaaagtgtttggacaatcttgtagaaaatagtttctcataacatcttttgagttgaaaaaagacaatctttaaaaaagtactttttttttttt

SEQ ID NO: 233840 - DNA, 1107 bp, Cannabis indica
cttttattttttctatgtgaaatttacactgttaggctcaaaattggttgacaaaaatctacgttgacacatatatttggtttattttttgatacattttttaaaatacaaggataatttttttttcattttttttaattgacacaatgtgcatttgtagatattaacacattaatttatattacctattatattatatatcccattttgaaatcataatattttaatatttatactattaatataacaatttatttaatttctaaaaacttaaattatcattttaactatcactaacccaaaatggaagaaaaaaaattgaacgtatgaagtcgtaacaacaaatttcatgaaaaaagttatttagtaataatacaaagggataaatcaagttatcaaaactaagtaaaaagaaagattgaaatacaaaaacatgttgagtaggttatattgttttgcatattgcaatgaggtaaatattttgttatttttactgttgctttttatatgttttttttaaattgtttaatattttttttaacaaaaagataattttattcaaaaattgatcagtacaaagacaaagaggttgtaaataacagccgcaaaccacaccagctctctacaatttttacaacataccagtcacctttttttgagttattaactgctgaaccaagagctctatacttaaccactctcttaatttttctactgataaaaccagtattcaaacaacaagcactaaacacacaattgttcctattttccaaatgaaatacaaggttgcagcctttaacacattgagcacctgttgtttcaaatcacaagaaggctttagtttataatccagcagctcctggattgacttcggccaacagaacttcccaaactagctactaatgttagctacgagcaactttgttaatagacattccatgaataaatggctgtgagtttctctttccagctcacaaacttcgcaaaactttgaaattgtgggcaaaaatttattcaaatggtccctagtaagcagattgttattacaaatctgccagaagataaatctatgcttagggacaataagtttatgccaaactgctttag

SEQ ID NO: 233841 - DNA, 1017 bp, Cannabis indica
aaaaaaaagaaaagaaaaacaatgatcttttccaaagttaaggattttgtgttttattcttaaagaaaagaaagaaaaaaagattttggttgttaatttgtttagtgtcattcatttcattgttgaaccttttccttaacgtaaaggagagagagatctagcctttaataagttgtgttttgattctgcaaagaccaattcctgtcctaaccattaaaaggtacattttttgttttactcctttaatcctttttagttttactatctctactaaaccattctactctttcttttttccaaaggtagcattaaaattggttgctttgcttgagataattgttctcttatatgtggtcaagtcaacgcagcaagtgtgaaccaattgatgaagtgaccataaatcacatggcttgggtaatttcactaactattcttttcattttctttttaataataaaaaaatgaatttaccgtgcagaatatgtgattgaagtaaagatgtagttttggttacatatttatttgggaaatttttaaaaatatttattttatgttttatttagaattttactaattaaaattttttattacacaaataattttgtaaaattttaaaattataaaaatgtactttacttaaaacaaaaaaaaaaaagaaattaaatttcacaataattataaataaactataaaataactaaaaaaaaaattaaaaaacgtatttttataaataaattataaaatatagtttaatattttgattgaaattgtatttttataaataaaagattttaaaaaataaaagtttgtgttaactatatatttttgtaatttttttttaaaatttttggcaaatattctatttattattattttgtttggtattgtcaggttctttcactttaacttgtgctttacttcagatctgcttggctccttaatatataagtttcatttcaatcataggttagtaatatcatttttattttatttgtttcttttactcctttttactat

SEQ ID NO: 233842 - DNA, 910 bp, Cannabis indica
ttaattaagtatcaatttttttttaaaaaaaatttactagattttattaattaatattttagactttaactagattcggaccctcactgacctgtcttaaataaaataaaaaaataaatatgaaaatgaattttacaaatttctatttttaaaattaaaaaaaaaaatgattatagaatgtattttttaatcacaaaaataaaaatattaagaagatggaataataatgaattaattacttacttacacaaaagaaatagtaaataatataaaaataccatggaattcctaattcccctccccgctacaaaatatggcaatcatacaagcaatctaaattcaaaactaggcagtcccttttcaaccttctcaattttctaataatcctaactaattcaatcatgtttttcttaagaaaaaagaagagatattaaaataaatattccctacgtacaaatcatcattaatcctcatctaggactagtttcatgtctgccaaactaatttatagccatctgatgttggagatccaaaccatttccgagtaaccaatttcaacctctcatccttaacctcacagaacttttggtcccaagcttttggctccacggcctcgaaccctaacccaggtgtccgatcattggaggctagattagccttctctttccaatcaacaacatatgtggaaacccttctcctaaatttgttctgaaactcactccaagcttggtacttgtagtggttcaccacagctttgttcaggctcattgtcacagtcttgtaccgatccttcattctaaaatggtgaattgcattgagtagtgaggcattcactgcattcagtagcacaatagacttgtgtctctgctccacagatcttcgacacgtgtacccttgagtcacaccctct

SEQ ID NO: 233843 - DNA, 920 bp, Cannabis indica
aaaggatttctcttcaaaagagaaatttacaaccctttaacaattttaagaacaatttctctatgctaaacaacttcatttttggtacaagattaagtctacttttgaggagctctttaattctactatctatacaactcagattcatacactttttttcatttatacacaaatgtcggtttagccaaataccataaattgcacattctaacacattcttatgaacaacatataatttttatggcacattctaataacaaaaaaaaacattaaaatattttttaaaaacatattgttctttaataacaaaaaattaaaataacattgcctattaacgtaaagccaaaaaaataaggtcattaataaatacctacacacatgacatacataaagtagccatcttttctactatttttttttaataaaaaaaattacatgtgtacatactaggactgatcattgggcgatttaactgagtttcagattagtgggcttcgggttcatgagttttggatagaaaaaaagtgaactcgaactcgcccgattacgtgtcgcgagttggcagattcaggttggattgacccaatcaactatttattattttatttttttaattttcacctaattacctataaacatacctacttatatataaatatataattaaatttaaatacctacctaattatatatataaatatatagtaaaaccatgaaatttagtggaatatatacattaacacacagaaaaaatgtatggctatattaatatatattgtattatgtaatttttttaaggaatagttaatattattatatttgaagtccaatatatgataatattatttaatattaaattattgtattgaattaaagatttatatattattacaataaaatttaattatatatattttaaa

SEQ ID NO: 233844 - DNA, 1239 bp, Cannabis indica
ttttcccactcacccagcatccaagttgacgtcatatgtcaacctggacactggtccctgaacaaccttcagtaaaacagtcataactcactcaatattgattccattgacatgattcaacttgcatttcaaagttatttcaatactctatcaagtcatgtctcacactccaatcgtaattctaaagttggtaactccgaattttgccctcaagaaagttacgaatttaagccacaagttacccgaagtgaatcccgtagatgcgattcaagtttcaaaaattgacgactgacctctgtagtcagtttcaccattaaatcatcatcaacggtcaaaaatagcctaaatgtatttttttttatatattttttagaatattttattattattttaataggacccctgtcctataaaagaggatgtcctctaactcatttttcatattgaaaaaagtacccataaggtcaaagtatctctctctagaaattagactttgcagacttaattattttttttaattcttgtgagaaataaaaactcgaattagacgtagctccattacccatcgcgacatggggagtgaactactataaattcttgtgtatgctctttacaacttttatctcgtctataaatatgaacgagttggctaaatttctgtctcgacacatggtaactcgcagaattataataatttaacaaatcttttcaagtgtgtattttaggttaaatttaatttaatgtattttttttgtcaagaatgtaattttttttttctagtaatgtaatatttatattattacgcataatatgattttaatttatcgtgttttactgatattatagtattattgtcttgtaaagtagttttacttaaatcattaattatatataataattgtgacaattttagtaaattaatataatatgaaaaaaatgtattctatttattaaaaattaatatcataataaagaatttttttaggggtaaatactattttagactccgtattttgcgaaatttactaattagactttctattttgttaaatgacaaaatagattctatattttttaaaatggtacaaataggacccttgactgattttttgtcaaaataaaatttaataataatccgatctaaagatgttatgataaaactgtttacattttctaaatgtgttcgtgttatgaattatttttaagttggttatattaaaaaaaaaaagttgttaataa

SEQ ID NO: 233845 - DNA, 1600 bp, Cannabis indica
agtcaaactaagaaacccaagctcaccattgtagtcaaattttgaaccagcattttatgatcaaatgggagatgaacactagctttgattgcaatgacagtgacgcttgagtcccctgtttaatcatcaagaaaagcaactaagatccctctttaacattgaaaaagtaaaatgaaagcatacaccagtacatcccaaaagaaaagggaatagcttggtagttaagaggacacaaaattaccaaatctaaagtcatcaaaacgatatagcaacacagaattattaaaatcaaagcgtaagaacataatatcaagtacaccgaagaacaaacaaagctaaaaaagctaattataattccaaacatccataataattttattaccatcatttttcacaccaaccagtaagtcggtctcttctccagctgtaaccactgccaaaaaagagagagacatatatcaactccaaaagtttatgccacgcaaaacctaaaatttaactcttctttcttgatcatttaaaggcagtctaacctcgtgcgctattctttgggaagacagacactgtatcaatgccaggagctgggttgaaaatttcatcaccaaagtcctggacatcctcaccaacaatcccaagatcactgctctcatctacagtctcagaagcagcttcatcctccgcactcgattgagccctagcaactgaagaaaagaaagctcaacatgttaaaagcatgtccattgccaatctaaacaggtcaacccaacatccaccaaacaattagatggaaattcaaatctgcagaaaattaaatatagaaatccccatgcattcattcatcgatccaatataaattttgtacaaatgctataccccacgattgaactccaaacggagaaactaaattgaaagaatattttgactgaatgcgttgactaattagcactccaatcatatcaaagttcacatttaaagaaatcaaacactccagtccctacccctttccccaagcaaataatccctaatttcaaataacaataattcgatatcaatatatagcgcaaccattcaaaacccaacccaagaaaaaaaatgttaggtagtccaatagagcgagttgaatcagatctcatcgatcgaaccaaccaaccatgcatgcacgcaacaaaatctagcagataatatgatttatacaataaactgacaaaacacaaaggtaatgactggtaagtccatagatctagatctaagaaataaacaaaaataaaaataaaaacctcgaacgaaaggggatgcgacgagaagaaaagccaggaggaaaaccctaaattggttcatcgtcaccatgagggaaggaaaggagaggttgggctgtacggcttttctcttcttcttcttcgattgagagattatggaacacagaatccaagcagaaacaaagctttgataatcgagtcaaaattgacaaatttgggattttatactgtatttgatttgctacaaatgcttaaacgtggcgtctacagcctcaacgtcgtcgttttatagctggtgcctctctcaaatgtccacctaaaagcccatggataacttcacaccc

SEQ ID NO: 233846 - DNA, 1080 bp, Cannabis indica
aattgtgtttcctttttattatttttttctttttttaaaaaataaaacactaaattaaataaaaataatctcgactgtagaggttttttttttacaaaaattaaactttgttttttatttaaactactgctttgtttttttctttatttttttttgttaaaaactaattatttcaataaaagcagcagaaaaagtttcatcaacatcatcttaaaaaaaaatataaacaaatataatctaagaaacatattatataccttaattactatatattatactaacccaacaataattcactaaaggacaaaagaaacatatggcaaaaagaccataatgctcttgcctaagccaaaaaatacccttgtcctctaagggtattttggtcaaacctaataccttgaatattcctgacattcccaatgtctatctaattttctccgctattactaaatattaaatcataagaaaatgtgactttatcagccaaacgtcgcgttccactgttactaggcatcgaatatgaaaaatataaaatttcatatatagcataactaatacacctagaatttaaaattaaagtctaattccaaattaaaccctaactatctactaattctcattctaaaattaagcggtccttataattatctccccgttaaaagaattccatcctcgaaatctaacttgaacaactctggatattgagccctcatatcagactccaactcccaggtgtcttcctccaccttactgtttctccagagtaccttgaccaaagttatgatcttgtttcgaaggattttatcttttctgtctaaaatctgaactggttgctcttcatatgataaatctggctgaagttctaggttttcataactcagcacatgagtgggatccgagacttattttcgtaacatacaggcatgaaatattttatggactgctgaaagtactggaggcaaggctagacggtaagcgacttttgtaaaaaaaataattttttaaatagttaatttatatataatattaaagagagaggtaagtgtattaagtgtagttacattaatttttttaaaaaaa

SEQ ID NO: 233847 - DNA, 1181 bp, Cannabis indica
ataaagaggaatttcacaatatcaaggattttgtgattaaagatatgtaatggtggagaaaaggttgtattgaatacaacttgtcagatcctattacggagagtttactacatactacacttgatctggatattaaggtgttgagattatttgaaatgcattttttgttttatattagtgcaagtgggagtttgttgggttttgtgccctaaataaaactcatttcaatataatcagattcactaattaataaagatcagaaatcgcattctatgttacatggttcacatgatttatttcatgattatagtgttatcagcacggtggaatataatcgtgattatatgtttaaaaattttagtcccatgatttgtcaatacactggatttagactgacatggttatcagcaataaagtatacttacaccttggataagtgttatgtccttttctagggtattggcaaaatataccagtatcggatttatggattatacattaaattggaccgatattgaacatggataagatatcataaacttaccgttatatctttctaagtcgatatcactaattgatcttaggtctatagatcttaatcctgagatggttggttagatcttaattatattatttatgttcttaaagttgttcattaaagtctagtcgactgagcacttacatcttgggaacatgatagttcaaatgagttggagcgttaatcatagatatggaatctatagcttctataagtatttagaagtgaaacgatattttccttcgagcttgactttatagagataaatgattgaggcctcatttcagtaattatattagtttacataaatatcatttataggttgtattatactcgaaattcgattgtacttcagaaagtgacacgcgtcattctcgtgggatatgaaccaatagatttaatgataattatattattaaatgtaaaatgaaataactcattaaatatagaataaatcgagtgtgtccgtaatttgttggctaaatagtataaagtgagacaaggatatacaaactatcagttcatgttttgacgagagaccatcttgcctcgaaaggcgcaatatcgagtgagctataagaaacaaatagcaaggaatctatctcgctccattgacgagacgaattggttattagaacactta

SEQ ID NO: 233848 - DNA, 590 bp, Cannabis indica
ctccctaatgtgtaggctattctcttgggtctgattctattagggcataaagcgggcgttcagtgggaagtatccgacgcatccacttttattttctgatggaaaaagagccggggcgttaccatcttcgtcctaggaaaattcattccttgctggctgacttagagacttctcataaagggtggaaggaaaaattctttttcgcccgaggccctattgagtttgtttctaacgaccctacgaccccttttattaatcggagctggggggctcccggtaatctccttacctctattattgggtttttattattcaacttctttccctctccctttttcttttaccttgggttattcgggtgtactactttctattgtcgtacatatatggtgtgtatttttcatgttttcccattaagggcgtatttgatgttgattcgaatgggggtgtttttgcgcagttgttgctgataacgaggagacggtcatcggtgatatttttactgagaaggttcggaaggtcacagccttagatcccaagcttcgatcaatcaagttccttctatttcgtgaagccttaatcgagtcctc

SEQ ID NO: 233849 - DNA, 1440 bp, Cannabis indica
tcacactcttcttctctcccatccaaaaatacaaaactatcatccgcgaagaagagatgagaaactttgaccccatctttgccaaatctgatgcctcggattttcccctctctctccttcgcttggattaaacatgaaaggccttccgaacaaataaggaaaaggtatggggataatgagtctccttgtcgcaaaccccgagttggatgaaaattccctatcctttccccattcactagaaccgagaaagatacacttttaacacatcgcatgaccttatcaatccattcctccgcatagccaagccctttcatcatagtaacaaggaaactccattcaacccggtcatacgcctttgacatgtcgagctttaaggccattttcttaccattaccgaatcttctagttttcatgcaatgaagactttcaaacccaataatggcattatcttgtattagtctccccccaacaaaagcactttgctcttccgaaatagcttggtgaagactatctttcattctccccgctagacatttggccacaatcttatagattacattgcatagactaatcggccgaaattcggacatttgtgtgggcttctcgctttttggaattaagcatataagagtatcgttaatttcatctaccggctgcccttcatttaaaatccccaaacacaccttggacacctcctcccctattgttggccaatattccctataaaaaagaccagacatgccatcatttcccggggcctttagaggatgaatagcccgcatagcctcatagatgtcatctgaagtaaacggttccagcagcatctcatttgttgaagtagaaattttgttgggaataagcctttgaaactcatctaactcctcttgggttgctgggttggtttggaagagatgctggaaatacttacaagccacttgtcccaccttcttgttaccactaacccaatttgcattgctgtccagtagcccttctattgtgtttttcctctttcgggtacttgcctttctatgaaaaaattttgtgtttcggtccccctctttcaaccaaattgcacggctccgctgcttccaaaaagcttcttctttatctaataaagcattctgttttcgctctatgtcctttaagtgactccaatcttgtggatccgttctccgagaaagagtattgattttatcttcatactctttcagcttcatgtgaagctccttcttcttcattttattccaatgttgcagggcgtttccacacctagctagcttcagccgtagttctctagcagtaccagtaccactttcggccccccaagagtcatgaataatctccgcacagtcttcatctttagcccacgcactttcgaagtggaaccgagaatgccatttggttctaggaatttctccttgattacttttgagattttgc

SEQ ID NO: 233850 - DNA, 853 bp, Cannabis indica
tcatcacttaaagaaagaagaatagtcaatagcattaacaattgagtaattgaacaaactggattcatatcctgaatttctcatccatatttgaacaacctttattgttttctttaattttctgtcaatatttattattttctctcaaagattatttttcaaccaaatggaaacataagtctagtttaatggcaatcaatttcaattcctgtgagttcgacctcacttttgtgagtactacttgatacgtgtacttgcgtagttaacaataatcgtaacacatctctctctagtttctctctctagaaattagagctttcacacttagccaattttcttgcaatctcgtgagaaataaaaactcaaagtagacgtagctccattaccatcgcgacatggagagtgaactactataaattttatgtgtgtctctaaattatatacttacattcattattcatctcgccagtctagcgagctgatgttggtcacttttcaacttcaacagtgatggagatactcccatagattatgtgaatcctactactcaagcaaaagcaagagtcaatggaaacctgtcagaagcgcccagtcatcctactacgaagacttaacataccgaaaaatatgttgatggaaatcccatcaatgaagatgacacagaagatccagaggatgatcctgaggatgaagatcctaaaggtgatggaaaagacaaagaagatgagtattactatgagccagatcctaagtcattcaaatggctaaagaacttgctaaaaccataaagaagctggcgaatctggagaaattctcccttcaaatgtgagaaactgtaaagaccgcatatgat

SEQ ID NO: 233851 - DNA, 1402 bp, Cannabis indica
aaagaaacccagttttatttttttgtgtgagacaaaaagtaataaagctagaattgactatgtgggccggggcctgggctttgaaggaatgtttactgttgaagcccaaggtaggagtggtggtcttgctttattatggaaaaatgaaaaagatggtaaaataattggtttttctcaaaaccatattgattttatggtagaagttgatggcagcccaaagtggagacttacaggagtttatggtgaaccccaaagacatcaaagaatggatacttggaatctcttaaggtccctattcaataattcaagggatccgtggtgtgttgtaggagacttaaacaatgtccttagccaaagtgacaaacgtggaggacaaccttatcccaattggctcatctccgggtttgaacaagctataatggagtgcgacttattcgacatggaattggttggttatccttacacttgggaaaaagggaggggaacacctcgttggatagaagtccgattggatcgagcacttgtttcttcttcgtggcttcaaaactttacgcaagctcggctattaaaccttgaagtatctccttcggatcactcgccaatatttttagagttcattgctccggatattttcattccaaataggcgtttccgttttcgaaaatgcttggttaaaggaaccaatgtgcttggagattgtgaaggattgttggaatgcctctagccttgcttcggtagcagagaagatttcttgttgtgctgataagttggccatttggggaaagaatgtaaccggtaactttaaactccgaatcaagaattgccgtgatgaactgaaaaacttgaagaataagagggatcctatctcggttcagcggtataatgagaagaaaaaggagctgtttttggtgttggatcaaaaggaagcattttggaaacagagggcaaagcaattttggttgaaggaaggcgatcagaacagtaaatatttccatagagcggctagtaatcgtcgaagtttcaaccaaatatcgaagctcatggattctaatggtatatggaaagattgggagaatggattagaggatgtagttgtggactatttctcttccttattcagtgcttcgcatgtgggcagtgacatggtgattcaatgtatccaaaggaaggtgacatctcagattaatgaagaactacatcaaccaattgttgctgaggaagtgaagaaagccattttcagtatgcatccagataagagtcctggcccggacggtatgacacctgcgttttaccagaagtgttgggaggtcattcaagttgatattatagccgtggtgcagaaatttgttacttcaggggagttggattcggcttgtggggaggcaaatgttgtgttgattcc

SEQ ID NO: 233852 - DNA, 1154 bp, Cannabis indica
catcattttctcgtaaagtgatcgggacatgttgttcttcaagaggtagattatcatcttcatcataccagtctcttgattgcgttgcaagcacgacagaccattggtcgtttgcaggatctggcacataaaaaacttgtgtggcttatgatgctagaacaaatcaatcagttttgtgccctaatcgatttagattaactaatgtaaagcctaaattatcattttttactgcactatcacttttagcccaatcacataagaaaacaggtacttgagtaatgatataatctaactcccaaatttctttaactactccatagaaagtcatgttacattgaactggattacgatcctttgaactcgacacttgcaaagcactagcgacaaggctaataccactattttgtgtggttctgcttttatcacgctcttgagtggtgaactttctgccatttacagtatatgatgaaaacttggtgacattaaaagaaggaccacgtgaaagccatcgaacgatgtcggtcacattattaggtgtacttctcaattcacatactacctaataagacacaaaaactaattaaaatacacattacgcgaagcaaatatacaaaaaaagtgaataacacatctaataccttatttttaaaccaactactaaaagtacgataatgttcatcttgcaaccattttttatttcttgacttagacggaaactttgtcttaatccaattgaaatgttcccttcaagcacatatggtatatcgttagataatacttaatatattgaaatgcatattaattaatacgggtaaagatacacttactcaatatatggttgaatatcatttgtattttgcaacactagtcgatgtgcttcatctaattcatttttgccaacagtgcatacaacactacctcgccgattgacaatattacttgattttacttcatcattaagcccaatactttgtacaccagacatgtattcagaacaaaactcaactgcctcttcagcaatataacattcaacaatgcacccttcaggtcgacttctattcctaacatatcccttgagaattttcatatatctctcaaatggatacatccatctgaagtagactggaccacaaaatcgtaattctctaaccaag

SEQ ID NO: 233853 - DNA, 573 bp, Cannabis indica
agaaaacttttttaatatttttttctttatgatgttataattatttagaacagtttgtaaattttttaaaaaaaaattcgaataatttacaatatcaaaaataaaatttacatatttggtaaaaacgcaataatttttttttatacgtgtagtaagtatctgtttaaattttattgtcggcattgtaaattatttagaatgttttgaaaatttataagtgatcctaaatagctacaacttacacgatcataaaagaaaactaatttttttttatgaataccgaaacaaataagagatctactagaacaaccctttaaagaatttactacaaaaattttctatttcctataaaatatgttttgttattaatgtgtgtgaataatttataacataggtaccaagtactggctggaatcattgaacaaagatttctagaacctttgttacatcaacacaagcttgtacttagtgcaatttgctttgctgttagaactggcaacactttcttaggctcactaatgtaagtctctctatattacttttcaatgtttatttttctttttaatttgtttt

SEQ ID NO: 233854 - DNA, 737 bp, Cannabis indica
tcttccaacatcctatttataggaaaaattgagtgattaaattaatcaaaataaaataattaaatgattaatttaattgtgctgggagaaaatagataattaggatatgtgaaagagtattagaaaaaataaatatttgtttcgatgaaaaactagtgaaaaagttagggtaaaaataaaataggaatatttatttaggtgaagtaaattgggaagataaaatggatatttaagtgtaagttgtgggaaaaaaatggatttcttggcttttgtgtgtgattttcatatgtgaaatagtcatttttttattcctttttttcttctcagtaggacacttggtgcgctgttgttggatctggcggctgagaggcgcttgcgtgtcatgctacggttggtgcagagctaacagcctgggacctgcgtggaaggtggcttggcaggtgggtctagcttcacacgcttctagtcgggtgtgggagacacgccctagcagggcccttggatcagtaggcaaacaacttagattgggtcaaagagctgactgagagtgagttttgcaaaggacctcatctgattttcttttgaaaattgtacttttggctccatttctctaatatttcttcaatttaatcccatatgttgtccaccaaatacacctaaaaaaatataaaaacaattaaaaaattaaaatacaattataaataattaacaaaataattataaaaataacacaaaaa

SEQ ID NO: 233855 - DNA, 818 bp, Cannabis indica
atttaattgtgctgggagaaaatggataattaggatatgtgtaagagtattagaaaaaataaatatttgtttcaatgaaaaagtagtgaaaaagttagggtaaaaataaaatagaaatatttatttaggtgaaggtaaatttgggaagataaaatggatagtttaagtgtaagttgtgggaaaaaatggattttttggcttttgtgtgtgattttcatatgtgaaatagtcatttttttcttgcgctttttttcttctcagtaggacacttggtgcgttgttgttggatctgggggttgaggggcgcttgcgtgtcatgctacggttggtgcacagctaacagcctgggacctgtgtggaaggtggcttggcaggtgggtctagcttcacacgcttctggtcgggtgtgggagacacgctctagcagggcccttggatcagtaggcagacaacttggattggatcaaagagctgaccgagagtgagttttgcagaggatctcatctgattttcttttgaaaattgcacttttggctccatttctctaatatttcttcaatttaatcacatattttgtccaccaaatacacctaaaaatataaaaccaattaaaaaattaaaatacaattataaataaattacaaaataattataaaaatacacaaaaaatttataaaaataaaataaagctaataaattcaaaaataattaaaacttactaaaccaattaaatactcaagaactaaactatgtttttaataaaaatgtgataaaataactctaatttctagagttatcatttaccattaggaatactt

SEQ ID NO: 233856 - DNA, 1034 bp, Cannabis indica
tctttaacataatcatattttaatagttgccgaaaatctcggtcaacaatacctaagttataattttggaacttttgtaggtacctggctgttaagtattaagtaaatctccacgtggcaattcctaattggtccaagtcattaaatttttattttaaaaaaaataatttaaatataccaataagataatgacacatggataatgacttaatatttaacagttaggtacctatagagtttgaaaaatataacttagcattattaccgccaaaaattaaacttaggtatttatttgcaactaggatttaaacttatgtatttttgctgcaaattactccataaaatatgaaaaacatgaaatttcatatataacataaagaacacacctagaattcaaatatatctccgtaaattcataactcataattaaaaatttaatttcaaatcaaaccttaattatctgttaattctcatattaaaattaagtggtctttacagattgtctaaatgagatgttttgagaataattagaaagtttgtgcgcacataaggttaatcaaatgtaattgtcattggaattaatttgtagtccaagtgggagattgttgggttatttttaataatccaatatgtgggcttaagacaatttatttgagctaacattctaaattgagctaattaagtgatctaattaaatgagcccaataaatatcttatttggtatgggctttgtaatgtataataccaatagtaaacctaattaaggtttatgggactctatagtttgctaaggttaatcttaactactctttttctttattcccatcaattgagtgagaactcatagagagaagattagtctgtagtagatcatatgctcattatcttatttcatatctaataaaatcatgtatatcttctatcttattaatttatagggtaatcttaatcgtttaagtttaagatgggaaatttgaatttgtatgcttaataagtaataaaattggaaaactaatagaatagtagatataatt

SEQ ID NO: 233857 - DNA, 606 bp, Cannabis indica
gggggggtggggggggggtggggtttccactaaaaaaaatgaattttagagattagttgctagcgaggtaaaagttttaggagttttgcctcaatttattgtattgtattgcattatattatattagtattatttaatacaatattgtgtttgatattgacttatattaataggttgtgtaaagttataatatatttttaataaactcgaccctaacactgactacaggtcaagtcctaggtctagttcgggtcttgggaggtccagtgttcggtcgggtccgacatctgacgtcgggtatgggtccttgatctggtccagggtctgggatctcggtcccaattcgtggttcgagtccctggatctaagtcaaagattggggttgatcccaaatcctccataaatattataatacaagttaatacagaccattttgttatgtattaagtaatacaacttacattatattaaatttttagtcgtaataattaatacaatatattattttattcaaatatagtattatttattatttaatacaatacgattacctaccaaacatactattcatctcttctctgtacatttcttatgttaatgtttaat

SEQ ID NO: 233858 - DNA, 815 bp, Cannabis indica
tcaagtatttaaagagtttaaagtgagatctacttaataataagttctccatcaaaaattataccaaacataaatttaattttacgtttttttaataaattatgtaattttattaatgacaatcaactaaaataatggttggaatatctctcttgttggagacacggtcaggattagaattaaaaaacgagtcaaatatttagccattttatttttagatcgtttgacaaaaaaattaaaaataaaattagatgaaaaagattgcaacatcacaattgttaaccttaagaacacctatattaagcttcatctacactgctcagaagacataacagtaaaaattattgcagcatgtttattcaagctcgtagcttgagtactcaattattgtgtaaggtatgtaactgtactactaacaaccgagccatcaaataacaaagaagaactaataatgaaacaaaacaaaacaaaatcatgtcacacaaataagattaaaacactcaaaaccatgtcacagagacaagattaaaacactcaaaatcatgtcacagtagtaaaaattgaattgtaatagaaaaatacaaccttgaccaagacgaacctatgcacagggatggccgacgggcttgactgaagagaaaaaaaccttatgtagctataaatttaggaacaaaaaatcctattattttatttatttatttatttaattttttgcaacgtcttgaaaactattctatacgacattctttagttttacattcttaggtcatctccaatctggttaatattttgtattgctcaattaggcttacctg

SEQ ID NO: 233859 - DNA, 2971 bp, Cannabis indica
taagagagatctctcccccagcagtttgcaagtcacatgattcaacaggacgaccctcatccctatgggaaaggttgggctctcggttaccttatgtcttgacactgcccagagcacgttcaaatattgcacctttgtagtggtggactgtcccactccctacaacaccattctaggtaggctggccttggtcgacttcagagcaatcacatccatccgacacctatgccttaagtttcccactcaggaggcaggagtagggatagtgagggggaatcaaggagaagcaagataatgctggagtgcatttgtctatcctaacgatacaggggtcgggaccaatgttgacagcagagtaggacgaattggaccctcgtattagttttgaaacagcattagaacccttggaggatattgaggaagtgagggtatgtgacctcgatatctaaagttattcgtctagggaaaagactagaactgaaggagcaaagtaacatcatagaaaccataaaggcatccacggacgtgtttgcttggtgtcatggggacatgatcgggataagtccccacgtgatcactcatgtcctaaatgtcaacccagatatgcctctgatgcaacaaaagagacgtctgctatactcggtaaaggttgatgccctggaaaaggaagtggataaattactatacaacatttttatccgggatgtataatacccagagtggttggccaacccggttctggtacctaaaccaaacagaacatggcgagtctgcatagacttcatcgatcttaacaaagcttgcccaaaggattgcttcccattgcccagaatcgatcaaatggtagatgccaccttaggtttcaagctattgtcttttatggatgtctattctggttacaatcagatcaaaatgcatgctaccgatcaagagtaccagtttcacgatcaataagtgggtatactgttatctggtcatgcccttgagattgaaaaatgccggtgcaacctattagcgcatggtcaactatatgttcaagggtctcctgggatgtaatctggaggtatacgtagacaacatgctagtcaaatccaaaatgtgcatgggccatgcagacgacctcacagaatgctttgaggtagtccggaggtatgtgatgaaaattaatcccaaaaaatgtacttttggcgtcaaatcaaatttttttttgggattcatagtgagtcaacgtgggatagaggcaaaccctgaaaaaaatataagccttattgagtatgctttccccaaagagacacaaggacgtacaaagcttaaccgagaaggttgttgccttgagtcgcttcatctcccgctcaatcgacaagtgcatcccgttctttaacatcttgaagaaatttcaaaagtttgaatggactaaagaatgcaaggaagcattcagaaagttgaaagaacacatggctaagccacctgtgatgtcaaaacttattcataagaagacttatatttacatttagccaattctaagaacgcagttagcgcagctctggtccgggaggaaggaaaggtttaacaactggtatattatgtcagcaaacgcatgataagagctgaaatttggtatcccctgatcgaaaaattggcttttggtctcttgattgcatcaagaaagctcaggccttacttccaggctcaatccatcaagttatttacaaatcacccactttgacaagttttacagaagcttgaggcctcaaggaggctcctaaactgggctatggagttaagctagttggacatacaatacattccacgcatttcgattaagggacaggcattggcagactttattgtagaatgtaatcagacagaggttagcgccagtgtgctaactcaggatgtgcccacgtggaaagtgtatgttgacgaggcatctgatgaatatgggtcaggggctggaatagcaatgatctcacttgacaggttacgactccaggctaccctacggtacatgtttccagcctctaataatgaggtcgagtatgaagccttaatagtaggattgaaattggacaaggttgtaggggccaacaaagtagaggtgtacaatgattcgcaattggtggtcaaccaggtgtcaggggaataccagacccgagaagaaaagatggtcgcttacgtatcaatcgttagggaattactgaaagaatttaaggaatacaaagtggagcaaattccacgaggaaaaaatgtccatgcagactgcctggccaagctagcctcagatagtgagataaagaagctaggggtggtacttgttgaacaccttacggaacctagcattaggtgtaaagaaacagtggctactaatgaacaagggtcgagtgggatggaccctatcattaagtacataacgacaggagaactacctcaagaaaggacagtgtccagaaagttatagtacgaagctcatcggtatttaatgatcgacggtattctctatcgaagggggctcaacatgccatatttaaggtgtgtgtcaaatcctcaagctagacagatcatgcaagaagtctataagggattctatggaggccacactgaaggcccaagcctctcaaagaaaatattaagacaagggtatttttggcccacagtgaagaaagattgtataaactacgtccttaatgtgttccatgccagaggtttgcaaatatcccaagggccccacccaatgaaattactttgatgactagcccctagccctttgcggtatgggaaatagatctcattggctccctacccacaggaaagggtgggataaaatatgccatagtggcagtggattattatacaaagtggacgaaggcaaaacctgtgaagactataacttccaagaaagccttgaactttgtcataaagaacatcgtatgtcgatatggggtgcctcacaaatagtctcagacaatggaaa

SEQ ID NO: 233860 - DNA, 935 bp, Cannabis indica
attacattgaaatggagttttatttagggcataaaacccaacaatttggtggagttttgagattttgggtcatttctacttttaaaatagaggtcctttttgggaaaaccgtctaccattttctaggcagataacccaggaaaatggcctaccatatttttagggaatttttctcaaaattttgtttttgatattttctcgatatttatggtattgccacactattcattgataaggaagcttttcgtttcaagtttaagtccccaaaagtgagttagcgagtcacttaccaattttacttaaattgtgacttagggccttcaatcgtcgagcagcagtttctactcagggttactggcacacttgggttcggaaataatgtaagattagtataatagtttcatataagtatacatgtttagcgtgcatgtcatttgttgtcagaataatatatcaaggtatcagtgaggtacacatagagttgcaccgagatactaatagatatttgttaagcaaattagtaagtcgtcagattagtatatcagggtatcggtgaggtgtacatagagttgcaccgagatattaacaaatatattctaggcttttagagatgatggattggtgctgtcacattagtgtgactagagtactgagtataagctgatactatggtaaatcgtactttttcaagaacgtttctaacctagttttagacctgtaggtaagtgtatgggcgcttggttataagtcggttatatgtttatatattatgcttttcttactgagttgccgactcacaattattatttgcatgtgcaagtaagaggcagaactaaaccgaaatgagtctagaactggatgaagattttacatatcaagacaggtagacctggagtgttcgggtctttaggacagtttaggctcactttttgttg

SEQ ID NO: 233861 - DNA, 1326 bp, Cannabis indica
gtaaaataatttccaacacaggacaccagagaatcaccaaaataaacacagtaccctataatgaatcttctatgatctgggcaacagacacagtctgcatttgagtatcgcaccagagagagtctttcacagtagccaatgtggagtccattatgaattgtccccttcaagtacctcagcacccttttaacaccactccagtgactagttgttggacatagaagaaaattactcagcttattgatggaaaatggaatatcatgcgatgtatgacttacatgttatagtgctccaatagcacttctatacacagtgggattccatcatgttgtgaaagggtttttacagtcaccatagaagtaggacaagttttaatgttcagcatatcatacttctctatcagtttagtaatatacttggtttgagtgagatacaaccctaaatcatctctgtgaacctcaatttccaagaaataatgtagagaattggtgtctttgagagagacatgcttgttcaactttgcaatgaaagaattgagttcatttacattgttccttgtaataatattgtcatccgcataaattaagccaaagataatagtttgatctgttatgtataagaaaagggaaacatctacttggaaatgtctgaaatgccactacagcaatatgtttttaatcagtcaaacgaggctctgggagactactttaggccatacaagacatgtttaatttatagacataattaggtttttgatactacatatcctcttctaggtatccattcaagaagatattatttaagtctagttgccttattgcccagttatttttttttagaaaagtatggtatgtttttttttgaacaagaagaagattctttattcaaacaggcaagaacaaccaacgaatacagagcaacagcagtccgagaccctgcactttaagaacagctggaaattacattaagaatgtagctatctagtttcccttttcccccattacaacccattaaacatctagcttttacacaagatttaatctctttactcaatatactagctgtcttacaactcagctcaaaaatacaattattcctgattgtccaaactgtataaatggttgccaaaataactgtgttgataattctttcctgcatattgttggctgccttagaaaaccacctgctgaagtcgactagccagtcaaaatggccacaccatttgctaatctcactaatcaggtctcgggtaaagcatcagtgaataaacaggtgctggtgcgactcgttttccctgcagcagaccgggcataagggagaagagat

SEQ ID NO: 233862 - DNA, 1306 bp, Cannabis indica
tgcaacatggagaaataacctgcctacttctgcattagtgatttcctcgcattgagctcctcttagtgcaactgagtgtttaatggatttgaatgaagggctttctggcatgtctccaacttttctctggctttgattatttcagcaagtagattgcaagtagccttccttgtttatctcctcgaatacctgctttagactcttcaatttacacaccagctaatacatttttgttccataatgctgtcgagtccagacttccttgactctttgttcaaaatctttgtgtgatctccacatccaaaagtacctaaaaggcttttccctgtttggcattccggatgaatgtggagtaaggctggggagtggtcaaaagtgctctcagtagcaaaaaacacttcagcagtaggaaaagcatcaagccatgcttgattagctaatactctgtctattttggaccaaattcgatccccaccttgttgtttgttgctccatgtaaaaaagcaaccagtatatttcacatcctctagattacgcctcaatgcactcaatgaaatctctgtcagcttgatatttaactctatttccaattctttccttctttgccaatatgtcattaaaatcacccattagcatccatttctcagttgtgtaatactcctgcaattccttccacaatgatttccttcctagtctataattaaaagcatagactagggtgatgaaacaagaaaaggttccatcaactgattgaatagtcaagtgcatagtctgacttgaacaagctactatatttacatgaaatacaatagggttccaagccaacactattctcccacctttatgccatggtaagtttgaagagaaacaccatccttgaaacacatttgagtacaaagccccaagtttgtgagctttgactcttgtttcaaggaggccaacaaaacctacaccttgagccataataaaatgtttaatatggctctatttgtgaaggctgttagcccctcgaatgttccaacatatcattttatccattgacaagagagggccctcccccctctcctatcttatcactgtgaggcatagtactatttccatcattgtgctttgtggtctgcccaatatcctcaacttcttttaaaacttgaaagctattcccagtctgtgtcataaccacatcagaggattctttttgccttccaacccttagtaacttgctgaaatctttctgcatctgttttaggaatcccctgttccactactttgcctcttttgtcatcttttacaatccactctttcttcc

SEQ ID NO: 233863 - DNA, 1520 bp, Cannabis indica
ggacactgtatttcattatgttggaaacctttaaaatgtaattaatatgtttaattttttggtatttttgtaaacatatttgctttacttgttattttctgaacttgtgtatgaatttaattgaaccaataatttatttatgtttagtgatatttgtagtgttaaaatgtataacccacactccaatcctcatctagtatatgcctttaggaatgaacttcaaagtgtgaagatgactcctagttagagtatcacttcacacttgctcatgataaacatgaaattccagaaagcagctatgttgggaattgctttatctagagagcaaatagttcattttgttctcaacagcttatcacctgagtttaaccaattttttcttaacaattggaactcgtctgacatagacaagttggacgctgaattgtgtgcttatgaacggacattgtcacttgcatggaggtcctagaggtccttctccagtaatgcagataagggctaaaagaacgctgaagatattgagaatgattcctccgacaatcctactacttcaggctcagttgagaagaatagagaaagtgattccacttcctcagattatttttcacaacagattgaactagcaataagaacaatccaaaaacagttaagcagacatatcattcaatgttctaattgtgaacaaaagggacattttaaatcaaattgtcccagacttctcaacactaaggtaatgctttagtttttgaatcatgtgttttagagaatgacaaatccatctggattgttgattccggatctactaaccatgtctgttgttcattgcaattgcttgaaaactgtaattattcaaaattggagagttgaaacttaaggttggtaatgacgaaatggtatcggttagagctagaggaaaagcaaaactcaagttttagaacagaattttgaatttagcaatgttttgtttattccaaatttcagtagaaacttgatttctgtttcatgtttacaattgcaacaatacaaattgaatttttcgagttatggttctatggttctcgaaatgacattcaaattcgtgttgcatctatggaacaagggctttctgttcttagactagatgaaccatttgtgcttaataacaaactgtttaaggtagctaaacctaaaaaccacaaaaagcaaaatattgataatgaagacgaagcatatctatggcacttaagtcttggccatataggctatgatagacttcactggttaaccaaaggtggtccattgaaaaatgtcaccttaggtgtattaccagtttatgaatcttgccttgaaggtaaaatgagaaaatgttctttctttgcaaagggagagtgtgtcaaagaaccactaggtatagtgcattcagatctttgtggaccactaaatgtcaaagctagaggtagttatgagtagtttgtcactttcattgacaattactcaagatatggtcatatttaccttatgcataagaaatctgaaacatt

SEQ ID NO: 233864 - DNA, 735 bp, Cannabis indica
aaacctgtcatgttatttcatttgttatgaaaaataaaaatgaaattgtatgaattttttttgaaggtttgagattgtatgtatgggatgtgagtaggttatttactcacacaaggacatttatatgtatattaatcttataaagcttttagtaaattatagaactattgtggaacaagtgcaaataacaagtttattatttattatttcctatttatttattgcaatttcttcagtttaagtgaataaataagcacggtaatctttaaatcatcccggtcgttttatttctgcattcactaattaatcacacatactcgacaatttcaataggctaatgaagtggctgaaattcgacagcaaatcgagttgaaggaagtgaacaatgaaggtatgatctgttttataataaaataataaataaaagcaatatggtgtggtagctgcatcttttttcagttgaaaaatagtaagagtagaaatgatcaagttataaccattaggtgaggatttggttttctttttctttacccattggttcggtgtaatttgttgtttcatttacaagtacaatttcacttattctaccttcttgtgtggttttccgacatcaaacaaacttctagcttccctttctatgagaattccgttatgtaatacacaatttcacttatgctgatatcaattgtttttcctcaaagttggcttataaacgccctataacatataatttca

SEQ ID NO: 233865 - DNA, 917 bp, Cannabis indica
gtgttttgtttatcgttttagaagttcatatttaggttgttaaatcaacatacttgtgggtagatttaagatcctggtaaaattaattccaacataaacatggttgggaaaggctggatcttcaaacccaggaggttgatgcatgtagactatttctttgagttcaccatttaaaaaggcattgttgatgtccacttgttgaatttcccaattgtaagtagctgcaagagtaaatattatacgaatagtacaagactttatgacagggttgtatgtctctgtgtaatctaggccaggggtttgttgaaagccttagcaactaagcgggctttgtatctgtcaactgaactatctttgttgtatttaacctgatacacccatttattggtgactacaggagcatcaggtgggggaataataaggtgccaaattttgtttctttttaaagcataaatttccacactcattgcttcattccagattggactggcaagagcagcctttaaggttgttggttcggtaactggggatgtggtggcagtatagattttttgtttgaagatgccaagcttggatttggtaaccatggggtgaaggttatgagttaagacatgtgctaaagcagatgaattattgtttaaattagtatcaatagtaatgttatcaacagtactattgcttatcgtgtgtgagttttgggagctctgtgatgcagataatgagctgttggaggattgactagatgactcatttgtggagttgatggggatggaaggtgggggtggagggaggtggcagtaggtgtaggattaggaggtatagtagctgtaggagtagtataggcaccgtctgtcaattagtagttggagtaagtttgagagagagattgagaagcagttaccaaaaagggtgttaat

SEQ ID NO: 233866 - DNA, 843 bp, Cannabis indica
aaaaaaaaaaaaaagaagtgaagggtacatatgaggagtcagtggttgtattgtatcataagtagtttcaaggaaagcaaactgtgtatttgcaaaacccaatattaatttcatttttttatattgcaatttagtatagaagcgcgtttgtgttaaaaagactcaactcatctgtagtcagttcttctatattatttccactttgtaacaaagactaaagactcattagtcgtcttcagtgaaattccaaagcttcagtctcaaagattctcttttcagctacaaaaagccgagtttgaataccaaaactccaatattcaaattacctcccctgaattctgacacttaacactcattttcctctttccattttctctgtcttcaattcaaatcaaacacttgcattcggtcttcttcaacacctctccattttcagccagatttagcttctgggtttttcttttttgttttgttttgctacatgaaagtcagttggtgtgattcttttcaggtatttggatttttgctcttttctttcccctgtttctagatttctttctatgaggatatattattattattattattgttattgttattcaacactatggatattcttttttaatgttgcttttctggctttctggttggtcgatgactttcatattgtattttgaggatcattaattacatttattcagagaattctcaactgattcatgtcattttaccaccaataccattattagttgaaatggttggagttttaaatcaatctctctaaggctcttatcttttatcaattcatttaactggagaatctcaaatgaaatccattttgat

SEQ ID NO: 233867 - DNA, 519 bp, Cannabis indica
gtcttaaataattataacataaacgattatattagactaattttttttttttgaaagctgaaacgaataaaaaaaatgcatcggtacatcatttttaagaatgtgcaaagcaacggacaagtctactatacacttcataaaaagttgttttggtagactatttatctatttcattatttgagagaatttgagttattttttatgattgtgtatgttatagttatttcgaaacacctgtaaatttttagaaaatttcgagtagtttataattccgaaaataaaatttacacattttattgcacatacaattattttttttatacacatagtaagtaactatttaaattttattttcagtattataaattttttaaaaaatatataaataatcttaaataattatagcacacactatcataaaaagaaataattttttttttttttgaataacaaaataattaaagaatttaccaaaataatgttttaaagaatctactacatgcatttctaaacctatat

SEQ ID NO: 233868 - DNA, 1154 bp, Cannabis indica
aggccaaactcaaactagttggggccctagcgtctttagaccacagaatgaaccccatgtggagatcgaggggatttaccccgagatggatcagttacgagatgcaataagctgaatgcaaggccagttccagattgttcaccaagagtgaactcaagctcgggcggccttgaccgagagccttgctaaccaaaggagagaattccaatcttggctggaagatcatgctcatgagatgaggagacaccaagacgaccaagatcgttgcacccaagaggctgccgacttaatacgaagctactttaaccaatatactcaagggttgggtattaacacccacaatcaacatatacctcacacttgtccacaggaagtaccctgagaaaccagtgggagatggtggtctatggtcctgaagagcgcccaaggaaccaagagagggctaggagtcacccctctaacagggttcctcgcaaaaataatcgaccgctctcggccgatgaacaagctctaccaggtcattatatgggacgtgataactcccacaatgtctgtctaaggcagagtagtggaggaaacgctaggaacaacaatggtgattgtggcagaaatggtggaagaacaccccaacgtagggagtggcaaccccgtgaccaatgcggccaaccacgagagggcgatgatcgcccgagaaacagtaggtccagggggagaagggaagaccccgaagtcaatagtgactaccgtccaaactaccctaacggtcacggtgatgatgaagttgaaagtcgggccaacaaccaaccaaatcctgagctaagggttatcaagtcggagggtcgtatgcccctaataggcagtattaacttgagaatccgccccaaaggggtagagatgatgatcaagtacctattggaattattttaccaggatcttagatctgctcacaagtatgttgtttaacatcctaaatatgaacttctaaaacgattataaataaacacatataaagtatgagaaaccttacagtggttgcagcggaataatatgtctccttccactcagatctctaacccttgtatccattctgtcgcagagtatcaccaagatttgagcccgaatgtccttctgttgaatctgaattcttcacgatc

SEQ ID NO: 233869 - DNA, 5620 bp, Cannabis indica
agatcctggtaaaataaattccaacagaaatgggggttcagtagattttgccaacaaaaattgaagttatgtggttaagtattacaaaacgtaaagtttaggtagtttagtcaccaatatccctgttagaaataaaattttaacaattacttatcacatgttcataggactagccctgagaatatatggccacaaagcaaattagatttttgtgcctctcctctcaaaaatatatattaaaaatatattgaaaatgattgtcatgagattcgaacccataacattgtataatatagatgaaattacattgtatacacattttactttacatgttttaatttttatttttaattctatattctttaaaatatatccacttttatagataatgtcctcattataccttttagattaatataaattatgtgttggacgtaagtggaaggtgagtgtatattggacaatccactcacaaaagtttaatacattttaatgaaatataatttgaaggtatttttgattaatggataaaaaaaatatatttctcaatttatccctataatatatcatacatcccaaccagctaagctatgaatatttattatttgtaatacatttaattttatttaaatagaagcctaatgaaactttatattttttattttgggctcccaaaaaatgtggactctaggcacaggcctagcccgcctatgcctaagatcggcattgtacgtataagaaaaaataataatgcatgcaataaaataactgaaccttattttcaacactttagactatttatttattttttaaaaaatttacaaatgactctaaataattacaacatacacaatcatacaaaagaaattatactaaaaaaaactctattgaatatcaaactagattgagtaatttgcggtataaatatagaaatttaattctcaattataaataaatacttaagtttagtttttgacaataataatacttaagttataattttgtaacttttgtaggtacctatttctacatgacaattcttgattgtctcacgttattaaatttttatttttttttaaaaaaataatttaaatataccaataaaaaataatacatgtattatgacttaacatttaatatttaagtacttacaaaattataaaaatattaccactaaaaattaaacttaaatattatttataaaaatcaaacttaatatttatcccataaattactcaacaaatgattaccagaacacttataattacatttagaaaaaagaattattgcattttcattactgtcggtcccaaatataaaattaaagaaaatatattagccagcacatataaaaaatacacgtgtcaaacctttattgcgtcataataataattagaattagtcaacaaaaaaatatgtatatatcttcggctatatatatgaacccgagtcccgccccatatagaatctccagccagattttctctcatacaagattccaaccaccactttctaggatttcgattcttaacccgaaagaaaaacaaaatcccattttccgtacaaccttactgtgtttttctttattattcccaataaagaaaatcaagaaagaaaagcttttccttggaaggactatatagtttgatttttctttttctttctaatatttattattgcatgcagctctataaatttgaacactttggataatcatctgacttgtaaaacacatttctttggagttttgtgttgaaactttctcattctgacaaatttggtgagttgtatctctgtttgtattcattttctcatatgggttctttgggttttgttgttttgttcactaaattaatacgaattttgtaccttttggcttaagatttcaagatttcaacttttttatgatatgcaggtgaatctaaattaaaaatcccattaagaattgagaagaaagtttttgtttttacaaagaaatgggtataaaggcaaatgggtttgtgaaaggttgtctatctgaggaattgaagaagctaattcgatctgtggctttttccaactatggtgatgttcttgatgatacagatttattgcagatcgttcctttgaaaggggctatgactaatgaggtttttcagataacttggccaacaacacatatagattgttctaggaaagtattggtcagagtttatggtgaaggagttgatgttttcttcaatagggaagatgaaatccgtacctttgaatacatttccaaacacggtcaaggacctcgtcttcttgggagattctcaggtggaaggatagaggagtttattcatgccagagtatgtcaaattcatattatttatgtatttacttgaaattattactactaatctagttctatgtattcttcactcttgattgttcttttttagtggtttaattgtttatgtgaccaaaatggatatttcatattatattcttgcttttaaatgaaagcaataatgaggttccataactacttttgaatttgattgagtggttatagttccaagcactcgaggctttagaatcttgaccccatatttttttagttttttatttttgaggtcatgtaggtttctttctttctacaatagggaagtgacaaaagtttcttgtttgaaatttttgagtcaaacaagttggagatactgttgtattttaatatatgaagattgttcttggatttatgttattttgttatgaaaacaaagaatatgaacttgtaattctagattatgctctactctgcagcctattgcccaatctttatttatttatttatatatatgtttcaccttagatttaagggtcaatcaggataattaagatctattgtaattatgtgtttctgcaagtaaattgtttgtcaatttcctttttcttgtgttaagtctttgtatttaaaattctttcagactctttcagctgctgaccttcgtgaccccgaaatatctgcacttatagcatctaaactgaaagagtttcacagtatagagatgccaaattcaaagaatgtgcatctttggaacacattgaggtaaaattcttgttctattctaattagagttaattcttcacagagaattaaagattcttaatgctttcgtttttggctaccaggaaatggcttcctacagcaaagagtttgtgtaccgaagaagacactaaagaattctgcttgaataatctggaggaggaaatcgatatgctcgagaaagaattgtataatgattctcaagaaattgggttttgtcacaatgatttgcagtatggcaacataatgatggatgaagaaacgagattaatcaccattatcgtaagtatatgattatatgctcttaaaggctgtaaaactactaaactgtgattgattcgcctcttcttgtttccaggattacgagtactcaagttacaatcccgtcgcttatgacattgcaaatcatttctgtgaaatggtagcaaattaccattcagatacacctcatgttttggattatagcaagtatccaggtaactagctcttgatatatagattagatcagatgtgttttctgcatattttgagttcaagtttttgttaaagctgcaaattatttaacaacagctggggttttcttaattccaatggcatagatctggaagagcgccaaagatttgtccggatgtatctgagctctgcaggttagtccattagtttcttgatagtaatcttagtaccgctatgaggtgacaccttaaaaatagttggcgatattccatagaagttattatattaaatcttgtgaaacctgatatttaattatattaatagtgatatgatactatcgagtgctgtttaaaatgctcgaagtgggggaacctaatcctaatgctaatttcagctcataaattcaaagtgaaacaacaactttcttgacttttttgtttggtgttttttgacattatgttacattcttatgactaatttcagtcaaagaagtttttcaaatataaaattggtttcttctctaagcttattgacctttcaaccaatttggtaacttgtcccataagaatcctaacaaaggtttttaattatcatgcaggctatgaacctagtgacactgaagtagaacagctaatcaatgatgtggagaaatacactttagcaaaccatatcttttggtgcttgtggggaatcatttcagtaagcatttcggtttctcagtttttttcttttatttcaaaccgaaaaatgacacgaacttaacatgggatttcaatgactgttactctgcagaattatgtgaatgtaattgactttgactacatggagtatgcaagcacagaggtttcgacagtatcggttgaggaagcaagaattgctgggctcgtcgggtgtttctccttaatggatacttaagaaaggaagcttcccagtagccaatttcaagggttctgatatatgatagtgtgatagcatagtatgatgaggcttgtaaataaaacccacttctcttttctgggcaatgactgtaaatttgttaaggtttttttgcaatgtttctatggcatcatatgttttttgttttgacaatatatattattttataaaagcaattattatttcaacaaattattttatatttaataaattcaaattgtaaaatattattaaaataattatatactaagtaaagtagaaatcatggttggagtaaaaataaaatgtaaagagcggtattggagatggtcataactttttttaatctttatttcacttttgaaataattaaggaaaggggtttgattagtgcttgaaccatatttttttctcaaaattgaatacagagttattatgtatgactcaagaaatacattaatttcaaccaaagtagtcataggagggtgcgtgtgtggaagatttaactaataatttcaactaaagtagttattatgtaagattgtaatatataaacgcttaaattagatatataaaaaaaaaaatacattaatttctaaaagatttgacacaactaaatttcattgactaataattttcacttgattttcttttagtatagtaccatgaaaacaaaaaagagaagaaaaaaaagatgtgttgtctaaaaggataagaaaacgtactatatgactcaagagaacattttttttagaaatccaagaaaacattcttttgagtgaagctattgttattttttttacctaactaaattatgcttatttctcttttgatgagtggctttggactttggagtaaaagttagggtttttttttttgggtggtgattaaggatcttgtcattgtccttatcctttcctacattttttgtctatagataattagattcttctgccacttttatttgttcttttcttttttaataataaatctcaaaattttgatttgacttattttatttcaaagggtctcatgtcttggtattgataaaagaataatgtagtcaaatgttacaacattataaaaaatggaagtaataattgtttatgagagggtaagttttccaagtttattatatataaatatataagatgatgtttagacaagaagcaccagtggtctagt

SEQ ID NO: 233870 - DNA, 4183 bp, Cannabis indica
tttttacgattagctagtgatactttaaaaaaattatttacttaattgaaccaataataataatgacacaaaaaaaggtttacaaatatcttttaatatttctcatatttatatggttcaaagcacgaatgggtgtttcaaagaaaaaaaaaaggaaaaaagaaataagaaacacaattaggccatcaactatataaaattagtgaaaattgctttgcgccccttaatttggatattggtctaatatataatgatcatgtctttcagtgacaaaaaagaaactgtatatagttattgattatgctagattaatatattatttttctaacaaatatcccaatatatcaattaagaataaaccaaaaaataattatgaatctgtttatatatttggaaaaataaatatattcttaatatcactctgcaataattatatattgtatagtttttaattcctacagatctaattcatgcattttactaataaagagaaaagagattaagatgtacctagctcacgacagatatgttccattttatttttagagctaattaaagatcacgcggaaaatttaatttatatttatactggttatacaattaaatgggttgaaacaaatttttaatataaatccttatgtacattagggtaaccaagctaatcatggtaaggaaaaaacaagaaaacctttttttttgtttttttttttttttttttctaataaaatgcgtagatatattaaaactcaaaaacgttagaccttatggtcattacataataatttatttgctatggaggacggatcgaccataccagttattacattactggcaaaagcccacttaaccacattatgggccgcaaaattacacagtctaaaaataaacgaaaagttacgactaataaaaaagtattgaaagatttttacattgaagcacatagttaccaataccccaaacgaaacaagtccccttcaacgtgttgatcgctgtctgagaatcactctcaagtctcaattatcacaaacgaatgcttccaaaaggatcactgattccaaggctaacaaacaagtcgttgcttctccaatgagtgagttaaagaagttgagcatgttgatagccacccacaaaactgactccgtgtcgtctttagtcaaagccaccacacacattgagtcacaaccaactttatcgtcacagttgattttgacccaatcttctagtgggggagaccaaacaggagtcgcaactgtcatcggcgaaggaaatagacaagaactaaaatctgcgtaacatatagtgttaatgcagattttctttagctaaatttgagcctaatagtgacaatctcacacagaaaaaatgaaagctgtaaagtaaaaagtacgaacacaaaggattttttacgtggttttatagttaaaattctgcatagtctacgagtcaatcttattagatttctgatagtttttcagggcctgttttgtatgatttttttcgtctcttttttgatcttacttgccactatttataatcacatagtagacagttaattacaaagtttgactgtaatcttcacaacattttccccctgaaatcatggggtttgattacatatatcacgtagtataattgcgattattatttgaaaatcacacagctgtgattttcccgcttttactgggtcaaaatgatcgtagattaaaacaagtctttaattgtagcgttcagtgatgtctcgacaggaacttggttccaatgaccttgatatagcgacctggagcttttctcctctatcttcctgaggtcgatgatggaaaccttgctgcctctttgtttgaagacttaatgctttattctgataatcgtagttcttataattaacatagagttcctcggtagacatttaaacgacagcttttgacttgtcaagattataagtctcactaaaaagatgtctgaagctaactggtgaaagtaacaaaaatgtgccttcctatagtgagataggcacctcacttattataggtctcgagcccacccgactgttatacttagtttgtacatatgctaagtcttttcacagtcgatatgtgtcgctttcgtcttcccatatgtaacggagttgatgcctcgctttatacattcaatgacatatggtttctcgttaatacactaaacaacagtttgtatatcttttcctcgcataagatcttacagtcagcaagttgcaagtatcctctgctacttacgcaattaatgagttatcccattaaaagtgatttcatcgatccatattctctttatcttgacacgtcctccactgaaatggtagttgaatttcgagtataagaattgccccttaaaaagttcttttttaataaaattgataatcctgacatgtgaccaatgaaagctttccagagcgagccaaactcaataaaactacgcaacttttggattagatcttaaagctcctaaagacttaatttgatggatgtattttctttttaaataatctaatatgttgaaaaaattgttatttttttgtgttgaaaattattaaaaattaatacataatagtatgaagagtttgaattcagtagtacgataaatcaatataattttttgggtaagagggtcgaattctaaaacattttttttttaaaaaaaaatttcttcaaaaattaaacaatatgcatttaaaaaaatagttttggtggattttaataaatttttttaacatatatgtaaagttttttttttaagaaaacaaaaaaatattcttaatagacaaatcataaaaatataacttaaaaaacaaaatcaacaataatagacttaccaactcatggaagaaaaccgaccctaatagcaacctcaactaagggcccaataaaccaccaacgatataaaaaatgtgtgaagtatactaagttttcaaaacaaatggagatctaacaaagtccacctactaatggctataagcaaatgatcttcctataaaatctaaaaataataaccccttatttaaattgtaaataatgaaaataacacaagcaactatgttatgatactcaatcacaaaagaatagatcatgaaatatagggccaataaggatccaaaaatccccaatatttgatgaccaaagagaaaaaccaaattatccttgccaaagctaccaaaattcatcaataagacattgataattgaccaataaagacaaaaattgtacatgtcacttttcaaaacaataacaaatagggcgatggagaaccaccattattagaagaaaaaaaatatatcaagataataaattgaaaaatacccccacacagattgacacccattaacccaagatcaactctcatgcattcaactcaactaaacaagaattttttttgacaatggaccctgctttaaacacctacgacatcagaaccacaacccccactgaaggaccgctgcccatccacctcttgaacgaatccaacagatgcgacaatccccaaacacctgactccccatcctcttggatggaagacctatcgatcaaaatgacaaaaggaaaaaaaatctagagacaacccatcgccaatgcaaccacgtacgacccaaactagattcacacgagaattgatccatcggtaagataaagaaacaaataccaaaaactattccaaactatgaggctattgtgtggaatcaacaaccccgaccagagccacacccaagcccccacatagatcgccagccctcaatcccagctcaactctcatacactcatcataataggaatttttttgactttagaccctatctcaaacactcacgacattggaaccacaacacccatcgaaggacctctgcctctccacctctttgttgtgtgacgaatccaatagatttgacaatcctcaaacacctgaccctcccatctgctcggaacgaagaccaatcaaatagaatgataaaaagaggagaaatctatagacaacccattgccaatgtagccacataccatccaaactagatctgttagtaaaataaaaaaatagagactaaaaaccattctaaactattaggttaaaggacttgtgtgggattaacaaacccacttatggggcgtttggtacgaggtgttcaaaataatttgattatagggaatattatgaaggagaa

SEQ ID NO: 233871 - DNA, 743 bp, Cannabis indica
ttgtatagttacgtcatttatatgttataatttcaagccttagcgtaggtaataaattatttttggtattggttattttgtatttatacttttggtataagttgggaatctgtctacttctcctttgaaaaaaaggctgtaattggtcatctccaattataggctatttgaaatcaaatgttgatgcaacaataaataacatttcttagacgatcggaataggagccattataaggaattcgaatggttctatagttgcttgcctttctaaattattaatgagtaattttaattattatttagtgatttttttttttaaagaaaactccccttcaatatatatactacatatatttatatttatatataattttattataatcttaatatcttcattattattgttatgattattagcttgagttaataagtttgtcttgttaatttatcttttattagttctttgagagttaatgctattttattggtattattttgcaggttgtttttcagctattcaagcagagtgtttggctttacttgtagcattagattggcctcttactatgggtctttctgttgaataaaatccacttataaccagtccttttacaaatatccacatcagcaattacaaacagatttaaaaacaagtaagactcgatcctagggtggcttcgcctctagtggatcaagacttagtagttagttacaactgaagttgtaactaactcctaaggctt

SEQ ID NO: 233872 - DNA, 1862 bp, Cannabis indica
atcatgcaatgcttgttgttctagtcctctttgcgcattatgtaacattaccattgcttgtccctaaacaattcatactaaatttatctaattttatatttacaaacaacttatgaaaacttaggtaatacaataaatagaaatttaagtaaaaggaagcaaaatagatatgagtcacattcaagatatataagagaagcaagacactaattaagttaatctttgtaaaaaagaagaaaataaaaaaagttataaaataatataaacaaaaaaaatcatcaagtatgaagactaacccatcaagtataggccaagtcttcaaaatcatcatcctcaaataaagaatttagtgtgtcattgtgtgattgcgatcgagaaccattcatttctctcagaaatttttcaaaaattagttgcattgcctcacatttttcttgtaaagcatcacatttggcttcataatgtgctattattttacttaattttttatccatttctttcttctttcatttttttcattttttatttcttggctgccttccaagttgagccaaatcgttgtaaatggaaaagcttttctaaacctaaaataaatgagaaaatttcatcttcatttgttgaagtagctccatcctttgagagtttactagtaacatcatcattatattttgccttaaaaagattaaataacacatgactttataaatagtactgtgttgtcagaaagttatttcagaacaaagaaaattttggaagaaaaataatataacaatcaagaatctaaaagattctgttaattactaataatcaactttgaatactagctacccaaataaaataagttaccaacttttaatcgtctataattattattaagaaagtgtagggagaggagtgccatatgatggttttatatgactagatatatagtttatacgattaattgcctataaaaagtagtattaaactcgtaaccaatattagaaacagaggaccatataaacgaactaaataaaaaactttatttaaagaaataatattatagctagttaggcttatatatatacataattttataagtatgctttcagagtaaggaattgaccatgtacagctcttaatcacaatacatataaatatgatatcaacttttgagctatttaattacagattgaataaatatatatcttttaaaaatcaactgataatgatgtatcatataactcaggagaaattatatgttgctggttctcaacatgtatgagtaaaaaaaggtcacaccatgataatcatgatattttatgaagtagaatcaacgcaaaatttatccttatttttataagctataataaaaaacgcagaaagttctctatctttcaattttttctataataacaataaagataatatttaatctatatcaactataataagaaaatttaaaacattatcaactataatatcaaaatagatgaaaaaaaagaaagggattcatcaaaatttataatattttgtgaagaaaatatatattaaatacttgatcaactttaattcgcataaaactcttaaaaccaaaagtatgcgccatatccacatgagaccgattatttatattttttgaacttatttcttgcaacattatacttacacagttatgattatgactaatatgttctcttctttagattatggttaagctaaacaaacaacaattcagtatatagtcatagaataaatctaattctaatacaaactagtaaaattaatttaataccttaaaatcttgagatttttacacttgatgtccttttttaccttttttttacatttttatttattctcggttatttaaacttttttac

SEQ ID NO: 233873 - DNA, 3014 bp, Cannabis indica
atataaattatgcaatgtttatattttgctcgacgacgatcgaaaatacgatagatggccattagagtcacatgggtaagtttagaatccatttcttagtgggacaaacataagagatattttgaaagtcaggtttaccatgaatcctttagttgcttaagtgtgaaacaattagggcaaaattgtaatttttccattttcgtgtgatttgtctttttgtagattttattagaatgtccatttgagattgtttttggtaaataaacttaagatttatttcattaattaatgaaataggaagaaaatacaaaattagaaaacctatcttttgaaactcgctttctctcttggctaaagcaaaaaccaggggaaatcagtgttcttctttttgttttctgaattctaagcaaagattcaaagtggctttcgtgattcaagataagataagctctagaaactagtatcccttgagttcttttagcttttagttggttgttgcatgtgaaatttgattttaggtgctgttaaaattaggtctcatttttcttcgatttttgggggtcatattttagaagaatttgtttagtttctactggttttgttgatttgtggagtggttgagcaaaactcaaacttggctcaacatggcactttgagtttctgtgtgtatttcttgctattgttgtttgagaatttttcttggatgatattataggtgttctggaaagtttagctgtatttgggggaaaattggttgagtttttaagtttttagggttttctactatgaaccgttttaccagttctactggtactgtaaaactggttttccagtttgggcagtttttagagccttagttttgatgttaatttcctcgatatttaggttatttccatgctttttaccaataggaaaacttttagtttttattttaggttcctagaaaggattttagaaagttgtttacccatttacatgattgtgacataaggcatccattcagcgcgtgattttccattcaagtcgaccgacacacttgaattcgaaaataatgtaagactagcatagaatatatttatatatgaatatgtgtatgtgtaatatatgcatgctaattatatgaattgtatgctaccaacactagtacggtagccgtactgagtgcattgatacagtgtatgatgttcaacgggtacaatatggtgttaccaacactaatacagttatgtacacaatgcatgtggtacgacactcagtggtactaagggtacgattcgatccctaccaacactagtataatagcggtacgtagtgcatgtggtacagttatcgtaccttagttaaggatgttcttactcatctgttaagccttgtggataggtgtatgggcgcctagatacaagtctgcaatatatattgtatgttatatacttactttttctttaccttgattactgagtttattgactcacagatattgcttacatgtgtaggtaaagggaaggctaaagctgaacagtagtgagtccagagctttgggatggttatacatgtcgagacggtgtgacctggagagtacagtctcaggaaggcatgggcttaattttatagtcgttgtgtgacatgtttgtaaaagttattttgaatatggatttaaaattttaaaaataggatcccaactttatgtatgaatatatgtatgtatttataaaagtttaaatttaaatcaaaatttaaatttatcacgatttttgagaaaatctattggttaggaaaggggtgcactataattagaaaatcactattgcgggcctaatcattagggagttacatagtgtttatacctttatgcatagtccctgaccgaaagaaatctaaaactgagtcacaaaagtccctgcccactgtttcccaataatgtttaagaaaaagcactaacataccattcgggccagcagctttgttgttattcatggtgaataaagtcttcctaatttcatcaacatcttccattgggagaagactcctttattcctctttagtgaaactatctctaatggtcatgttcaagctaggcctctttgtgtcaatattccttgcaaaaatacctctaaagtagtcaatgaattctttctctgtttgattctggctagtaatccaatttcaatttttgtccaataaaatctcaactgcattttgccttttcctaataatggccacaatgaatttttttttaagcatttatccccctcttttagccacgaaaatctggccctttgtttccaatataaagctctccaaggcctggtttagcaaatttctaagctctgcttcctctttccaatttctattacccgtcggcatagtttagataatattcaacttatattccaaatctctaatcgtgtcatcaatctttctaaattagtgcctattccagttgagcagcccaactctagtagccctaatcttcttgaaaattctagccgaagcccaattatgattaatcaaggaccaagcgtgactcactactagttttttgggatcatcccaagtccaagcttctttgaatctaaactggagtttcacattgctttcccgaccatctgagtaaatgcataaaggcctatgattcaagtgcaagactggaaagagcacagcaccgtcttaaggaataaggaaatccaaccatcatttgcaagacctttatgcaaggccaattttacatgattccctccatcttgatgattattgcaagttaagtgatcacctttaatgggcaagctaataagacctcaggagttagttaatgctgagataaccaagacaaccatgtctttgcctttggaaccaatcctctctgactcatagtgaacaaagtttacatccctaataattaactaaggaccgctgaacttatcgcccacattcatgaaattagtctagaagttctttttggaatggtagtacggcggaccatagacactagacatgtaacacctaactagcatagg

SEQ ID NO: 233874 - DNA, 1646 bp, Cannabis indica
acaaggaacatacaagttttcaaactaacaagggcatctattgctgcaaggtaatgcctttcggactcaaaaatgcaggagcaacatatcagcgaatggtaaactgcatgttcaaaggatagttggggagaaacatggaggtgtatgtggataacatgttggtgaagtccaaaatgtccgaagagcatggtcgcgacttggaggaagctttttcggtgataaggaaatatgggatgaagctaaaccctaagaaatgcttttttggggtttcatataggccttaatcaatatgccctcttcgagaaggcataaagatgtccaaagtgtgatagggcgcattgctgctcttagtcggttcatttcaaaatctattgataaatgttcccattctttaatgtgttgcgaggcaataaaaagtttgtatggactgaagagtgccatgacacttttaagaagttgaaggagcatctgaccaatgctctagtattatcaaaacctgtaggggcaaagatcttttttgtactaggtagtgtcagatcatgccatcaatgcctcgcttgtgcgagaggaagacaaagtcgagtacccggtgtatcttgtgagcaaaagattgttgggtgcagagtccaaaaatcccaggattgagaagctaaccttttgcttactaattgcatcacgcaaattgagactatacttccaagctcacgccataagagtagttacaaatcatcccttgtgacaggtgcttcaaaagctagagtcatctggcaggttattgaaaggggctatggagcttagccaattcaacatacattacgaaccatgggtgttaataaaaggacaggccctgccaactttgttgtagaattcatgagcttcaacggcctcttggaagtgccagtccttgagttaccgacttggaaggtctatgtcaacggtgcgtctaatgacaaatgggctggagctggggtcattttaatctccccacaagtgcactagcttcgaagtgtctaacactttggattccgtgcctcaaacaatgaagcagagcatgaagccatgttgataagtttgaagttagcaaaagaagtaggagcccaacaactggatatttatagtgattcccaactggtggtgaatcagatctctggggagtatcagacaaaaggtgagcaaatggcagcttatgtcttaatgttgcgtgagttgttatagggatttaaaagttacaacatatgacaaatctcgagagaataaaactcatttgccgacatgttggctaagttggccacagatccaaagattgttgagcattaagtagtccctattggccatctgaaaaagtccagcattgaagtccagaagtgaatgccatagtggataattcacactcttggatggcaccaatttatcagttcgtaaacacgggagaactccttgcaaatagggccgcttcgagaaaaatccaataccaggctccccgttatgtgatcatggatgggaagctatatcgcaggggattttccatgccatgtttgaggtgcatctctgggacagagattagcgaagtgattcatgaagtccatgaaggcttccacggaaatcacactttcagacttagcctttccaagaaaatcctgcgacaa

SEQ ID NO: 233875 - DNA, 1168 bp, Cannabis indica
tttcaaaaactgaaacctatcgccatgtcacaaaaaccgaaactgaaattgaccgccaaattcggtgatgatgtggaaccaaaaatttggttacagtctggtcggtttgaaggtcggtttcggtttatcggtttttatgaacacccctaacccttgggttattgatgagctgaatggaaatcttaccgattctcagaagacgttatttatgacgatgcctttttctcattttttgaagatgggtagtattaagtggatgattgcattgtctcaccttgctttagtgagggagattcatcaagagagggaggatattgagaagtggtttctcattgtttttcttttaagtcattatttatatgggtatgagaatgtgaagaaagttgataatgagttgtttagttttgttgatggggagttgtctaatttgagaaatattgcatttagaaaactgttgtgggataggactttttattacatgaacttgacttttaaggatggtgacaatattttctataagattgagaaggccaaagatgaaaaggataagtgttattattttaaatttcaaggttttccatttgcttttcttatttggttgtttgagatactgcctagccttagtcctaagtactgcaagaggattgctaatacatatcttcgattactgaactgagagagtacaaacaagaagaaaactggaggttattttgaacatgtgttggagatttttaatattcctgaggtacttttaaattttataactggtttcctttttctttccttattgatttataactggtttcttaacttgttttttttttattttgtcaggccactgtgaatgatttctatcctattggtcgtgagcttaagaaatctgcattgtaaaaccttaagttcgaactagtttatctaccaaagaaaccttcaggtttcgatgggaaggtatgttttctttgtgtttgtgtttgtgttttgtgctttttagtttgttagtttttttgtttgttttatttttagttggtttttatgatgtttttaattttgttatgtttttttgttagtttgttttcagtttgctaaggtagagtctgctttggtttgtattcaagaagaccagaagaagataatgttgagtattaaaagcttgagagatgagtttagt

SEQ ID NO: 233876 - DNA, 751 bp, Cannabis indica
ttggaaataatataatgtatatactcatatatattcttatctctttttctactcaatcaaataattcaattatgaacttttcgctttagacaagaataacttagcttcctttatcaattttctctacacttttcttttgcttttaagctcaaatttcatctataaaaagcaacatggttttcccatttctaaacaccaagaagcaaatttgagcctaattcttcttttctactcaataaccttataactttgaatcgagtgagaagagattctaaccaagtagctataatggattcaagcagagaagcttttaaagtagttgcaatgaacaataagattaagagaactataagaaaggaaatgattagcaaacgccaactcgttcgagaagaggaggatgttgatgatttagcagaagctttcattaagaacttccacagtagcctaaacatggagcgtgaagaattgttgaaacgcctccacgaaaggaaaaatcgtcggggtgtttagaaagaaaattatcgattatcgcttctacttttgtgtttttcttttatattgtcaagtgctagaaaagttttgtgctcaacacactttagtttgtttaagaaagtaattgaacataatgaaaagtccattagtacaatttgcctattaatctaaatataaaatgaaatataacgaattcaatggtcatgaaaaccatgcaatgattttcacttctgataataaaacattaaacgtagatatg

SEQ ID NO: 233877 - DNA, 811 bp, Cannabis indica
aagccagtaccaacctggtttgtagcttcaaaaacagctccatcaacattaattttgagcttgcctgctgctggtttaatccaataattgttgttgtcaaccagtgaaagctctagagcaagagaatttaagcagttcgactgtgcaaagctccattatcggtgagtatttcgagctaaccaaacaacatctgatgcagtacaatgttttccattccatagcaggtcattgggtgctttccaaatagcccaactaaccatcactacttctttaagtacaccagaattaccacctgcttccaactccataaaccagtcaacatatgttgttgcagtagtgacaccaacaccgagtgacgaacggttccagcaagagtgagcaaaggaacattcaactaagacatggaatattgattcctctgcaccattacaaaatacacagttaagctccacaggaacatgcttgagctagagttgagatcgagttggcaagcatcctgaaagtgatttccacgtcaatgcaacaccttaggaggcactttaatcttccacaacactttccagaaatcagcctccatactagaactccaattaccatcaacggtttgtaagtaatggtaggagcttttgacggtgtaaaaaccatatgcctctttgttcaaaaaccagttgtcgtcgatcacagtagaactcaaagggaaatgcaatataagatcaacatcacggggttcaaacaagtcagaaacaacctccatatcccattgtttacagtcggttcgcatcaattgggatactttacaatcagccaatgc

SEQ ID NO: 233878 - DNA, 992 bp, Cannabis indica
ttgataagtcaggttgaacaccacaaggaatacccttgataagtttgaatagactcttcaagtactcaagaataaaacctctcaaatttttattcatcaaaatctatctttccaaagtgttttcaagcccttatatatatattcaaaattacatcaaagaaaaaagacctttttgtcctccaaatgaaaaccctaacaactcccaaatagaaacactttccaaataaaaataaagactaataaagaaaaacatgattaaaaaggaaagattccaaaatccaataaatgtgataaaaaacgtgacaaagctcctaaattgagtctactctaatgagcagtacaaatctttgttctccttcattgttgaccatattctccttttgttttagaacattggggactaggttttcgagttcctctttgaatatcttggcttgtgctctcatcactggaccgactggaacttgacttggatctttagtcttggtgtcctcatcacaacaactcctaattcaattaagatataagccaattgaaagtttaaaaggataagataaatgacaagtaaaacataattatcttatctcttcttctttttctctttaatttcgaatggcatatactaaagggagtatgatttaaactcaattaatcataattccatgaggattccatgaaaattttgagttttcaaaggagaagataaaagatgagtaaaaaaataagttttttcctcttttcctttactaaaaaatctaaaaaaaattccaaacacaagggcaagggaatttgaaattctaatcctcttaagaattcttgaacaatagagactgtaacgccctgactctcaggaacgccacgtgtgtgcttttacaatcttattatcaataacctactagcataggaaaagtgtggtttaaataaagtttgataatttaaaatatacatataatttttttttaaaaaaatactactaaagtatggggatccct

SEQ ID NO: 233879 - DNA, 1535 bp, Cannabis indica
cccttgagctcatacacacagatttgtggggtccttctcacatcaagtccaaagatgggtacttttactacattcactttcttgatgattatagccgctacacatggatttatcctttaactcaaaagtctcaagctcttgacatgtttgttaagttcaaggccatggtagaaaaacaatttaatctacccatcaagaaagttcaagccgattggggaggggagtatagacctttctctacatttcttagtgatcaagggattcactttcaacatccttgtcccaaaacaagtgaacaaaatggaagagctgagcgcaaacatcgtcatatcacagaaatgggactcactttacttgctcattctggcctcgacttctcttactggtggcatgcttttcacacagctgtattcctaatcaataggttacctactcctgttctcaactattcaagtcctactgaaagtcttcttggtcaggtaccagattacacaatactaaaaccctttggttgtgcatgttaccctcacctcagaccgtacaacagacacaaaatggaatttcggacacaacaatgtgtttttcttgggtactcatcatctcacaaaggttatttgtgtgaaagtatggaaggaagaatctttattgcacgccatgtaattttcaatgagcaagtgttccctgccacatcccaaaatcagccaacaaaggtacactcatctattccctctaatgtcccatctgccacatttgttactgctgaaaatatatctcaatgccccacacagtctactgttatacaacctacacctattattcaaggacattattcacgtgttcctgtgcaccccactcaacaccctactccattaaacaatgaaggacatgtcactatcccacatacaccacctactacccatcctataccagaaaacacggttccagctgccccacccacacttaaccccataccacaccctgacaacattttcccaccattatccacccatacctctcatcaacctacccctgttacacctcatatgacttgtccttccacaaccaatacaatcctacccataccaccaactacctccactcaacaccttaacaatgaccatatccttccaccaactaccaccagaactcataacatggtcacaagatctcaaagtgggatatacaaaccaaagtcttacattgctactaaacacccattgcctgaatctcttctcccttctgaacctagatcactcaaggctgccttagctgatccaaagtggcacaatgcaatggatactgagatgagtgcacttaagaaagcaagaacatggatacttgttccatatgactcttccatgaatgttattgggtgtaaatgggtacatagggtaaagcttaacaaagatggttctctcaatagatacaaatcacgattggtggcaaaaggatatttacaagaagctgggattgactttgatgaaacctacagtccagtggttaaacctgttggaagttattttaccaggatctta

SEQ ID NO: 233880 - DNA, 964 bp, Cannabis indica
taattgtgggtataaatgcatgattagaaaaaataaggtaaaaattaaaatggtttagttagaatgggtatataatgtaattttccctaaataaaggatctactacatatgtatccaactttgattgtaaacatatatcacgcgagctcaaaggattatgcttcatttgcttttaatgggcttgggtcattgggctctaaattcatatataccattttcctaaatttgaaaaataacataaaatgaaagtaaattaaatatttctaataaaaataaatttatcattaaaattataaaatattcattttatattaattatatatgcataattaaagacttaaaatgtaccaatttgagccttaatcacaacccccaactaactttttgctagtctctagcgattcaagcgaacaaaaagaatattaacatgatatttttctggtcaaaatttttaaaaattgcacaagtattcaaacaaaatgttagtaacaagccaataaaaactttacaaaattactttaaataaatctagagttgtgagtgtgtgcaccaaacctgaaccttcttatcgcaaactataacagataaatactttcgaaaaatgtaccaagtagaagtctcaactctattaaccccacaagtgtttgaaaatatttattcacggctaaagatttcactcatggagttggaaattaaaaagtgggcactcggaatggatagatctatttaagacaaacatttgaataaacattgagacgaagaaaggttatgaattatttgggcaaaccactataagagtaccacaaaccagcttctgagatttttgaacgaaaacagaaaatcttttacatttattctaggagccataacaaatgagaattaaataatacaaactttttcttgaacaagaggcaacattttagacaaatggataaaaatgttgctcttttttctttctttgttt

SEQ ID NO: 233881 - DNA, 1959 bp, Cannabis indica
ttataattggttagttagtttttataatatttattaaagtaaaacaagtgagacttgatattaagttgtaccaataacgatattacacctcacaagggtgttaggcaccatgggtgccctttagcatttctctaatatcttagtgatgtaaagaaagatagaaaaactgatgtatgatataatgtaaaagtttgaggtaaaataaaaaaaaaaaatagagttttggtagtattttaaagaatagagtagagaagttgatgttagtgctctaattagtaacagaggtagtttatgcatcttatgtcctgtttggcaaagtttagacttttgcttatggctataagtataaaataaatatacattttaatttatttacgacttggataactattatgtgaaagacttttttaaaaaatatatattgttttgaagtgtttggatattaataaaaattaggaatatgcttgtaagtaaattataaattaggtaaattatttgaatttaaaaaatagttttgtaacttctcccaaaaatatttttaaattaaaaaatatctttataattttttatccaaacagtttaagaatgaatttttcaattctaaatgttaaaaaagagattataacctatatatggtattagcttcttacatgaaaggaaagaaataggggaaaacagagagatcgaaaattagaaaactatgacaaaaacttgacctcattcgaggtgtttcattagtatatataactcaaacaaagctttacaatcatatgtgttcaaaactgttacaaacagaattagttagtgagtattgtaattaatcacactaactgaaaaccaagactaacttaactaaaccaactaactaaactagaccttggttatcatccccttgaaatgaaaacgggtaaataccacttttagtttagttttgagatattgaaaacattctttgggaaggaacttggtaaagatatctgcaacttggtcaatagtagggacataccgcatatcaagttctttattcaatagctagtcacaaataaaatgttgataaatttcaatgtgtttacatcgtgcatggaagatgggattagcagctaaggatgctgcaccttggttgtcaacccaaatgataggcacatccactaacttgacttgtaattcagtaagtaatgaacgaagccacttgattttagcagcagtattggctaaagcactaaactcagactcagtggacgaacgagtaaccacttgctgcttcttggctgaccaagagatcaaattaggaccaagaaaaattgcatagcctccaatagaccttcgatcatcaatgcagctggcccagttaacatttgagtaagctgcaagagacatcctacgaactgaattccatcagagatggtgccttttaagtattgaatgagccttttgcaagcttcccagtgaacatgagtgggggcatgaataaactgagataacttattgataatgtatgaaacatctgacctagttaaggtcaagtgctaaagtgctcccaaagtacttttgtacaagataatattctcaaaaggagatccttcatggagtgatagtttgtgagaagtataagttgggctagcacaacttttagctccttccaagtgaaccttaagcaataggtcagcaatatacttggtttgaggcaagtaaagaccttcagagtttctgtgaatctcaacgcctaaaaaataatgaacttggcccaaatttttaagagaaaattgaatgttcagatcagaaatcaacttttggattaaaagattatttgggcctgtgacaaggatgtcatccatataaaccaagagaatgactaagttgaaaccagtgccataaaaaaagaaggaagcgtctgccttggatgcaataaagccccaaccaaataaagtagattttagtttgtcattccatgctctaggg

SEQ ID NO: 233882 - DNA, 1877 bp, Cannabis indica
aattaaattaaattaaattaactgaaaaaaaaataaccctttatggcttttggcgtcggttcctacgagtatatatggcgtcggttattagctaggaaccgacgccatatttactcttatggcgtcggttcctagctaataaccgacgtcataggatacttaatagcgtcggttgttttcaatcctacagcatcgctcttatcagcgtcggtagcgaattttgctaaaaccgatgctaaaaggcttaaaaaaccgcctctaaaagtggtttttgtagtgatggaatcaccttacatgagcctcctgctaagcacaatatgacacactccaccattaaggtaaaagaatactccatagatgaaatacaaacataaactaaagacatccacctctcatgaaaacccaacttgtccatgaggcaaagaagaaaatatcattcaacacaatcatatgtcttagacattccaatgtgaggggaaaagctccaaacttacttttaactctacacttatgattaacacactcaaaatcaatcgtagcattattagtattcaaataatcagagacaaaaatacttaaaatttttcaaaaataatcaaaccaaaaatctaacaaatagtatttgttatatagtcatagcaacatttacacattacaaagtctaattggctagaagcacattggaactcataaatttttggaataagattccaccaatgccgtcctctacatttattttacaaaattaaggcaaaaaaacacactccttaggaccaaccatatcccgtaaaaaccagcgacattaatctccaacaagttaaaataaaataaatacatttcattcaaattaaataaataaatacattcttgttccagatatagcgtgttttcccaaacataaaatactatagaataggaatcagacaaaagcttaattccatttccaatatctattttatatctttaatagaataaaaaaataaaactatttaatatattcagagcattataaaattctttacagaaataaaattataataatgcaattttttttcgaaagaaacaataatacaattttaaaattgttaaatatgacttgggaatttgtattcctgaacaagcttccctccttttagccttaaaaaataagaagaagcttccgaccctcattcagtagtggacccacaagaattaaattcttcatgattaaataattatattttttttatatatatacaatatattctttttttcatattctaattagtaacgtgatatgttattaggaatcaagatttctttttcaaatatttgtgttccaaaagttaataacatctttattgtaataatgtaatatcaaaactatattgcattgtttgccagaaaagaaaaaagaaatctatgatgcattgttaatatatttttaaattcttttttttttttgaagaaagttttgttagattaaatacgtataactttctaagtagaacatcacttttggttttttgataagtgttttctgttttctgtagtttgagaaatatatcacgattattttatacaaaaatctactatagagttagagtagccatctgcctatttttggagaaatagtggcggacttaggattaaagttaaagagggtaaacttttttttttctgtaaattaagagaggtgtaaatttaattttttatataatataatatattaaaaattaattcaaactcatttttatagtatcaatatcaatatatataaataaaggaaagcacaatagtgatgacatggcagtttctatgaaattcctttccctttctttgttttctcatattttcacatttttttttttaattttttagttacttttctttaataa

SEQ ID NO: 233883 - DNA, 735 bp, Cannabis indica
agattctaagttttggatgcccacacgctccgtttgtgatcgaaaatcaagactgaagcttcaagctaatttttttgactataatgtgcgttcacttttagaaaaaatgttgtgaataaaagctctatatctctctttcagttttctaaaatatcttgaatcgcccaattctgagcaatattgaaagatttatggcaaaacattatcagttgttgcactaagaaacttgctgcctgaaaacctccttcagtagtcgaaacatggagggcccatgtcgcggcccgcctaatttaagtgatgaattttagggttttaaccctattaaaaagctatataatagaccattttcatacttttcaaggcaacggtgagaggaacaaaaatttgaagtagaaagaggctcttaagacttttatcaatattttttgacgagttcttctcttttactctttttctatgttcttaattaattgttatcagttatatacaataaatatgagtagttagactttcaattagggttattaatgaagatcgttttacactttattttaatttaatgtgatttaattcttctccaattttctatatacatctatgttattcgcacttaatctattttaattacctgaccatcaattaactatttaaaatatcaatacgaaagttgagaattgagcattgattatgctatagtgaaatagacacaaattttgatataggacgagagtacct

SEQ ID NO: 233884 - DNA, 1358 bp, Cannabis indica
atagcatcatagcaaaatactgttaattgagcgatccaccgggtagcaagtttctgctacctaatcggaccgtaagattattctgaaataacccctaattaggagagacctccacgatttactacatattgcattggtaagtcctgatctataacgatctaataagtttgaaagcatagcatcatagcgaatgatagttatttgagcgatccaccgagtgtgttgttatttagtatcacttgtaaattcttataaaatttcaaatagtttacagtgcaaaaaatataaatttcaaaatattttgctgcacatgtgattgttttatttatatatatatacgtgtggtaagcattgactttattttcgatactataaataaatttttctgaaaatttacaaatgatcttaaataactaatgtatatgatcataaaaaaaatttaattaaaaaactcgagtctaccaaaatagcaatttagaaggatgtactacatctttttccactaaaagtttttatataatctagctataagaatatctccagccataataacatattgcgtcttgcaacactaactctctcaaattttaccacaacttgacttatttattgcaaccgaaacacaaaagtttactcattatattaatttttaaccaatagcaaaaatattcaaagtttgtttatcctaacatttatttatctattttttttttcaaaaaaatacccaaataatatttaaatacaaatatattcatatttttatgataaaaaatattgaaagtattaaaatattacacgtttactactacatgattttattagaggaataatatgtataaatcactactacaaaaataatttttcttgacgtttttatatagtcgtttaaagtattactgtcagtttctatagtcgcgcctatacgaccgtcgggcaaaataggcaacagttaaaaatggtcgctaatgtggacttcccgacagtttaaatcgtgccctatactataagcgacgtaaataatttattttttaaataagattttagtaaaaacttatatgtatttgtacaatagtaaaagtaaaagttaaaataattttttttatattatttttctattatatattttatctattagatttgagttgaaaaatttaattttatgtgtatatgtgtatactatactagtgtatagttattattttataaaggctaattaggatttttttctcccgaattttgacatgtaccaaatcatgccccctgaatttttttggtcgttaaaaatttcccctaaactattgaaattgttaaatttaaagacttttatctaattttagtaaaaaaattctaacatggat

SEQ ID NO: 233885 - DNA, 747 bp, Cannabis indica
taccactagaatctctgagctttgagatttgattgaagcttcggcgattactggcagctctatgaaagtatttactatttggatcaccttccttcaaccagaattgctttgctctctgcttccaaaacgcttccttctgatcaagaagaaaagctctttttttacctccaaataacgttggacagcaagagtatctctattgtttttcaattgcttcaactcagcacagcatttatttattctcttcttgaaatttccagtaacactaggcccccatttagataaactctcagcacaagaagcaattttctcaaccacagacacacggctagcatcattccagcattcagccacaatttccaaacacattggctccttaagccaagcgttttcaaagcgaaaacgccgattaggagtaacaagatcaggaatcacaaactcaagaaagataggattatggtctgatgttgaagtttcaatattcaaaagacgagattgagggaaagtttgaaaccaacctgaagaaacaagggcacggtcgagtctcacttcaatccaccttggagttcccctccctttctcccatgtatacgggtatccaacaatgtccatgtcaaccaagtcgcaatcttggagggtctgttcgaaaccagagatcaaccatgtcggatatggacgtcctcctctcttgtcactttgactgagcacattgtttaaatcacctattacacaccactgaacattggt

SEQ ID NO: 233886 - DNA, 2079 bp, Cannabis indica
ggcatgtactaggagtgggtcggggtgtgggttgttcattttgacactgcaaatatcaataagcagaagtaaatcatttggttcaataaattcatacacaaattcagaaaataacaagtataacaaatatgtttataaaaatacaaaaaaatgaaacatatatttttttttaatttttccaaggttttttaacattctgatacagtgtcccgtttaggcgagagtcaaagcatgatccattgaacaaagtagtcaactcatctaaaatgacaaatattctagaaaccttttattcgatcgaaaagagaattcgacgttgtcctatttaggcgagagtcaaggtaattcttattttatgagcctccaccattgtttcatacttttgtaagtcttacaaatagtcgacaccatgagggtgaaccatactaaaaataaaacacttacaaataatacttatctttcgagattctacggcgttaaattgctaatgaactgtaacaccctaacatttaggcacgctacccaagatgattaagaaatcctaatcccctaaacgggattactaataaaataagcgtggaaattaaactttaaatgaaaatagaatgaaaataaacttgtaataattttaaccttacaaacaaaagttacatgtttcgggatcccaaaaactattttacaaaatattacaagtcttttcccttagccgacctaagcgacaaaatagagtaacaaatgttttaacactggtagaccccaactggcttggtctagtgtgccctgaacatgtacattcgtcgtctagctcctacactcatgggtgattagaaactgatttaccctttcttgcacagtagagcacccgtgagccaagcctgccaagacagtataattatcaataatcataattaacacatcacataaatattaatgccatttcatatttgtctgtatgacacagacccgcgcgttacactcacacgcttatttatgtttatatagcatagacctacgtgttacgctcacacgtctatttacaataaggccttagaacggttcatctcggttctagttaccgagtccaacccgattatgcattgaacacataaccctttatttcaatatacatctatatacatcatggcataacaattacatattaacaattcacttcggtaataagcctaagccaataaaccgctctctttggagtaataactctaatcccgatttctagtttctcatataaatcacattccatataagtgccattgcgcatatctctacgtgctaactactgtcttacctaatgtcctgcaaatatggagattccaaatgccccggtgctcctgaccaagtgccggtaatcctagtcacaaacccagaatacacaagtataaggttaacccctaaattcatttccacaaattataaaattggcatttaaattctagatattcacatagagcttggaaagagctttccaatgatataatgaacatcccaaacagagtcgcgagtagaaatttatgaccaaaaccaaaacccaaaaaaaaacacaacatgctaccataaaatggccgcggctactgggttaaagacctaggaaacccagtttccagccacaaaaatgattccaaaaataccaattttcatgctatctcaatccacaatcataccaaactttcacctagcataaaccaagtaattagagaggaattacacctaattcactctccaacaacaccaaaagccagcaacataaaaatcagcatttaacagagaatttcagccccctaaactcatccatttcaacccaaacattcttcaatcaaacataacctcttatacaattaaacaaccacaaaagaaacttaaaccacaaattattaagcttaaaatttcagtccacatgcatagaaatttagattcaacaacatgaaatcaaagctccaaacctagagcaaaattcatcataattcatcataagttcctaatcaagaacttgaacttcaagcaagcttcaaacttaatttttttcctgaaacaacacatcaaacaagacctgaattcaaacat

SEQ ID NO: 233887 - DNA, 892 bp, Cannabis indica
atgtttgaatgtaataataaactagagtttaatccttgtagattttagacataattttattaaattttattatatttatctctttttttattctatatctattaatgtaattatctcttttttttactaaagtagtcattggagtttcttctgaagaaaaaaaaaataaataaaactaaaactaaagctttaagtataatattggaatattatatcatttctaagggggacattttgtcgagtcactcatttctaaaaaagagtaaaaaaaacaaagagaaagaaaaagaataaagcatgagaaaaaaaatgacgacatttttatattctcgagtaaattaaattaaaattaaaactaattaattaattattattattattattattttttgtaatttgtgtgatgactgagatttgagattggggaacaagaaagatgagagagaggtagctttgcttgttttacaattttctttctttattgggagtggtgattttgacacgtgtaaagatatgattggtttggatggcaggcaagtaagtgccacgtgttgtcgagttgtccgaggtgtgcggcgacgcggagccgcgtatgtgttttaaatttttattactataaataaataataaatagtgaacattggaaataagttttgttgttggtgtgtacttcagtacttcactatgtactatttactaattaataatagtaactcaggtgttttattttattttttattcagtttccgtacaactttttaattaaaaaaatataaattcaaaataaaaaaagaaaaaataaagagacagagctgtctctgtatactcaaatttgaaattttagtaacattgagccaataattacaaagagtacttccataaaaaaaaaact

SEQ ID NO: 233888 - DNA, 1311 bp, Cannabis indica
aggagtcaaatgacaaagtttcaagagccgaacatcttattgaagctgaagcctaaactagagagaccaggaaggagatcattcaaggtgttggccaggcaagtctagaccctatcctagagccaattcaagatttgacccaggaaaatccaattaaccagccatcagataaggtagaggagtaaccttttcttcctttactttttagcttctttttattttaatttagttgcgtgaacttgatgcctttaccgcaaggctgcttgtaatagtgtagcgtactacttttaatggttccaaggcatgggcctttacttttcacagagatattttaatgtgcctggttcgcggggcactataatagtcataagctttttgattttacttacttgtttccttctaagcttttgttccattttatttgcttgctagacaatttaagggttgttatcttagattgttcagaggttttcgattccaacggccgaaaccccaaactttaaaatttgattaagttttaatccgttgcctgatttaggaagtatttgggggccaaacacctatttcctattttcaagtaggattattcttattaagaccctttttggtagttacaaatttaagctaattaaatatcttgacaacgtaaattggcttttaaactgttcttgtaccatcgagtggtcgtggagtcttagtgcattttcagtgccttgagtattcaactacttactttgaatgttttacaaaggatgctagcaagggatggttttctcacaaaagggaaatcttttacgatccaaacgttccctgaccaccgctctttatcaagttgggctccaagacaggtggtcgaggatgttacaaatttcaggcattatcccttattcagggcttgagctaaaccgtgataacactcaagcaaattttcttggcctagactttatcgacaagaatcttttgccactagggccatacttaaatttgggggtaggctactttccctatggattttaggcagtatccttcgatcaagatcgagctaaaaatgcataggagttcaggtgaggcttccccattcataccttgcaaaaaatccaacagattaaactttaggaaacccactaaaattttcgagaaggaattcaggcgagtttttcgtcttggaaaattaggcttaaaacacatctcattttggggatcacactaatttttaatcttgagaaggaattcaagcatatctttcccttgggaaatttggctgaaaatacatctcatttttgggttaaacccaagttacactaaaaaatt

SEQ ID NO: 233889 - DNA, 706 bp, Cannabis indica
ttgcaaattgatatgcattacatctgtttaattaccccatcgtcgccaacatcgtcattatcttccttgttcccttttattcattgtactgaaaaaattttttttttattatttttgtttgaaatatataaacaaatgcatattcaatttatcttttaaggattattttattgtatacatatgactagagaccaaatatatataatagatctaataaaaaatacaaaaattaaaaaaaagaaaaaaatcaacccatttattttttatttttattgaataatatgtataaaattatttaaataaataataattataattcaatttatcacattgtaacacatatatatatatatatatatttatatatgttatacttcaaaattgagtagtatttattttcaaaaatgaacatatatatattatgtgtatgtcactgaaattatgatttttttttcataaaaaaaaaaagaaagaaaacatcattaaataacactagtgatgtttaagagtatgtatcatatcgaaaatctataaatattaaatctgatctttgaaattaatatgtaatggaggaaagttaattacaacatctttttcaatttatgtgtttgaaaatacatatcaaaatatatattttttcaaaaaaattatatgacaatattcgttaattatagttatagtagttttgaaaatttctaaataattt

SEQ ID NO: 233890 - DNA, 4086 bp, Cannabis indica
atgctttgctcacttgccactagttcccttaggttttgaatattttgcaaggaatgtgttatgtgtcatcatcttaaagaaacctcagctgaagaaggtgggtagaggtgcacaatccttgtttgaagggagcaagctttattaatgagtgcttcgatctccgcatgaataccctgtggttctgatggagtcgaagagtcaatgattaagactagaggaggtgatctgggtactctcgcgcacgaactcaaagaagaagatgaagacacttgtagaaataatggctccttcaccaaaagcaattttttgctcttttctcacattaatgactaagattatgtccaagaaaacatggaatacatccaacactacagaaaagatgttagttttcattatgtattttttggaactgagatattcaaatgatgatattattctcgggacactcgactgacatgattaattttcattttacaaatccatgttgcacacgctttattaatgaaagtaatctccacgagctaaagaaataatgccacgtgttgctgcatttcaaaaagcaagaagttgtcaaccataaacaaatttgtttagaattcaaaaaggttttctcttttttaatgtccacatgccctcatgtcatttggaaggtagaatgtaagcttccaaaaccccttgagttctaaaaccttggagtaaatgttatttgtatttccgaatagaggacatgtgtaattccaatatggttttggctcagctgttacaggtctaatcactggcctaatcaagataatggactagatctattagcaaatcaagccttccagatgttggacaaacgacttgtctaggaaatataaacctctagcacaatgtgcatccggatagtatttagcaaagcttctggggtagtcgttcacatgcatccagatttctagttccgtatcatatttattatatcaaatcccacaatatcagaaattaattctcaggatcatgtctaagaatcatatcttccaaatatggaaataaattaattatcaatcaatcatttatatgtgtttattattcacaaaattaggacacagtttgacaactatcaacatgatgtggcatccacgtcggcaaaagatcaatgcctcatgagtcgagcttcagcgaatgagcccgaagtcaatgtattatttgcatttactccatcagtgggcgaggttgacatactagagccctagaattataaatattagaaaactctttcatgcaaagagttacaatctgattcctcgagtgcttaggcaaattctagggttcaaatacttgacaaaatacttgtataaatcaaaaaggttttaccagccttatcaaaataatagtgactcatggagtagaggttgttaatccttaaaccatgtaaaaactcttgtctcattctttatttatgatatatcttttagctttatcatattttattggtttttaaaaaatctcgataaatattaataatttaacattcaagtatatatcaaaatgttgaactattatttatactaaaaaatgtatttacaggcttttcaaagtataaatcataacagatgctccttattgatataagtaatacccataaatctatttaagtcatcttcatctgtgtagtcatatacctacacagtctcaaaatcaccatacttgaccttcctcgggtgatatgagattgcacaacttacccggtatttccctttatgaatcatgcaactattggctgccacaatcagttgccttacgaggaccaatgtcctcgtcgactagacttttaactgggttaaggctttgataccaattgtaatgcccctacttctaacctctattgggatcttcctcccatggactcatgattcttatacacttggacgtttactttggctgctttcaggattgacgattaacctttagaggcagtttttaagggctttaagtgtcaattttggcaaaattcgctactgacgttgttccaggtgacgctgtagggtaaataacaactgatggcataggaaccctatggcgtcggttattatgaaaaaatcgatgccatagggtcttattttttttttcaactttacaattttatgttttaacataatttttatatataaatatattattttattattaatataattaaattaagtataaattatatataataagcataaataaaaattaaattgaaaagttaataaataaacatttacattaatctaagtatttgtatattatctatctttttattaatattttatattttatattttatattatgtgtttgtatttttgtatttttatagtatattagtatcatttttataattttttaagttatgtattttgctattttacttaatataaactaatagaattcttatgttaagtattagaatcaatgtttatgatgtatttgttaattctactgcaatggaaagtgcaacactaatttccttttatatttcttctaatattaaaataaaattatagtatagctaatttatataaagattatgttttggtatattggtaaaaacttatcaatctatccttttggtcacaagctcaaatagactatgttttgtatttcttttttttagctaattatatctatactttgcactcaatgttaggctatttttagcctaaatttcgggtcacattttatagttgtttttcttctttattattatttttagaatataattatgcttgttttctttggtttcaggtttcgatgcttggaatgcataaattggataaatttcggaaaacagtgatctataaaatagagaaaattttgaaagaaaatcaaactgaaattttaagcctaaattcaactatgttctgatcatattttggaaaaagtcaaaatataaaagttttagatctcttttttatctttccaacgcatcttgaatcagctcatttagagtttgtatgagaaatttataacaattttactgagagatgtcgaagtagaaaaaatggatccagtggtcgcggtgaggcttttggccgccgcggcgggggactaaagaaagccaattttttcacttttctacagccgccgcagcgaggatattggctgccgcggcaccgacttcgtacaggtcaaggataacttcgtcttttctcatttttgggctgaaaaactctatttactaaaagggggtcgcgaattatagaggggagaccatatggaacactagaaacacaagaagaaggctcttggagtgagcatggacgatccgtgacaatcctccatctagtttctttctcttctctttatttcttatgtttttatttatattcagtttaattatggatttgattatgagctaaactctctatttagggatttgatggatatcgactgagattattctatggattaatgttatttaattgttctttctttctctataattgtgatttattcatatttgtacttattgcatgtatttgattgaccaccttatgcatgatctatgatctcaatacaaaatctgaaaagtgagtattgagaatgctctaaatgaatagacataggttttgatgtgaaacgagagtattcacatagcttatgtggcttttagattattacttaatgcgaattgtatgttgttctatctcagagatgcagtagttggcatgtaatttaggacatgatctgaaaagagtttaggttaatttataatatgtcatcacataggaagaagaagaatggttaattagtgttaacaattggataataaaagtaattgaaatcatatgcctaatttcacatccattgttaaaccttttatttgtttattttatttaattttgcttagtttatttagtttaaaatttattcattcgattgccaaatagaaacaagaatttaattgattggtacttaactgcagtcctcgtagaaacgatctcacttccctgagtagtacttgttaaaacgatacgtatacttgcgtgtttgatttatcacaacaagtttttggcaccgttgtcggggactgttttagttaatatcaatatagttgaatt

SEQ ID NO: 233891 - DNA, 510 bp, Cannabis indica
ccatatattttacatcgtataccagagactagtgaaaagtcttaaaatatcatattaattttttttttattttatctcacacttttatattatgtaccaataacgtgtagcaccttttatgggtgacactctacgattagttagctatactctctaaaagttattttcttaagctatatgggacccaatacttaattacactagtaacagtgtcacactaaaaaatgtgctagataccagcagtgtcttttaacaatcttttttttacattacactatacattaacttttttattttttatatattattttatatattatattatactaagaaattttttaaaaaattaatatatatttttagcttaataaatagtgattctttataaaacatgtagagaaatattattcaataatgaagtaaaaagtaatatagcccaagtttattagctcattatttttcctcatattttagaaaatgaacaataattataatctgattttttttttt

SEQ ID NO: 233892 - DNA, 1027 bp, Cannabis indica
gtaagataagcatgagaatcaccagacttgggaggaatgaatgtcttgtcaaacctatagtggcaaacggcagcagatgcccaatcttgaagcagacttgacataggagtcgagagggggccattcctcgaccaaagtatctgccagaagggcgattagagtgagaaaagccatgtacacggtttggatttgttgcagatcgagaattaggcaaaccagaagcaaatcttggggagctggtggtgagatttgccattagttttgacgaagagtcattgacagtaaagtggcgttcaaggcgactttcatgagtgaggagaagagattgaatcgactcaaatgagagattgtcgactaagctggtaacatgaacaacaactgggtcatactctggccctaacccattgagaagatgcattatcaaatcactttcgtccattggatgcccagctgtggataaagaatctgcaagaactttaaccttgtcataataatccgaaatggaaaggttacctttctggattgttgataattgggacttgatctgcaacaatcttgctttcgattgagaggcaaatctctgttccaaagctttccatgccgtggatgaggattcatattgagctaaagaaccaagaatggtttcggacattgaagatctgagccaactgagtagcagttgatcctttctgcgccaggccgagaattcagggttgacattgccattaacgagttgagctggtggaggaataccagtgaggagaacatcatcaaggccatggccaataacagtagggataacttgggatttccaagccaagaaattggatctgtcaagcttgacagtaagagatgaatttagagaatgctggaacggattccaggatgaagaaggagcagtcggtggtggtggtggtggcccttgagtctgggcagtggtgcgcggaggattgtcgatgattgaaggatccattatcgactttcgtcaatggcttctgataccatataggaacttatcaatacaagc

SEQ ID NO: 233893 - DNA, 911 bp, Cannabis indica
aacctgggcgctgggatgtcaacatggccactcgacccagaacaacctttagtaaaatagccataactccaatgatattgatctcattctcacgattcaagtttagtttcaaagctatttcaatgctttatcaagtaaagtctcacactccaataaaaattataaatttatcaactctaaatttcatctataagagagttacaaatttaagcaacaacttacctgaagtggatctctcagacgcaactcatgtttcaaaagttgatgaacgacttcgagagttaatttcaccgctaatcaacagtcaaaaataacctaaatgctttttttttccatattttttggattattatattattattttaataggacctcattccccataaaaagagagcttctctagctcattttttaagttcagaaaagtactcataaggccaaagagtctttctctctagaaattaaagctttcaaacttagccagttttcttgtaattctcgtgagaaataaaaactcaaagtagacatagctccattaccatcacgacatggggagtgaactactataaattttgtgtgtctctctaattatttacttaaacttattattcatctcaccaatctagcgagctattgttggctactttttagcatcaacatttttatgcttttattgagagccacaacttgagttctcgattacagttcgatttctttgctagaagctttgttatgaaaggaattaataagtttaagaaagcaatcatccatgattgcgtagagcaacactaccactcctagtagtcatgccactacacaacaagcagttgcccatgatatttcctataggtaagaaaagtgagagcgagtgtccgaaaggactcacattcagaaacatagatctatgggtt

SEQ ID NO: 233894 - DNA, 1086 bp, Cannabis indica
ttggataaatataaatatcatttcaattagtagtttctataatcatatgaatcatcacatatatatatatatatacataagtttttaaaagcgcgatttcgttctctaatactatataaaggaatgcacaagaagagtttaggtgccattctactttttttttcctcctatttttcctattttgtaacaaattctcttattttattcgaaaaataaattacacatacaaactaaaagtattatttagagaccttttaggtgttatccatgtaggttataaatagtaattttacttttttactttcttttgcctaagatatattaatttttttatgagttaatgattaatgtcttacctaataagttatgggtgcgtttggtaacactttttctatgagttatttacataaaccaataaataaattagaaaattataactctattggtttttttctttctttttttgaaaatggaaagatgtaaatcttaagattggtaattttcatttcacaataatttacttttattatttgatttaacctaaataatattatataatactcactgcaattcttaatattattattaaataatttataatattatttgtcaaattaataattcatattttattgtctcacttgtgtttcaattaattattagttgtgttgggagtttcttttttaaaataaaaaataaaaaataaaaaagtgaactaagagactacaactatagtatttatagtaaatttatataaaagaatcatgatgaggaggtgatagtatatgtatgtatttgtgttaaagattaaaaaagaaatgaaatgcaatataacataatagaaaatgagatatataaaattcaaccaacaagatagataatcacgaaggaaataaatacgaggagaaaaagacaccataatttataaattaaatacagtgcacaattattattaataataatgacaattatatttttcagttggttggggtgagtttggacaataaggtgagtattttggtgactccaaccctgaagtgatggatcccaatgccaattgtaatcaaaatctgccatattattcaa

SEQ ID NO: 233895 - DNA, 1174 bp, Cannabis indica
ttaaataaaaataaaaagtcacccatgaatttctcataaaccaaaaatttcaattatatagacacactttatatagaatagatacaatcattaaacctcacttttattaaagtttcactttagaaataactataaaaattccatctctaaatttcataaattacaattatctcgaatacctaagtatatactaattactcgacctcacacaacctaaattgatttatccaatggaggattgttcaaaaatgtttctctaaattaatcaattttatagggtaaatattattttaaaccctgtgttttgcaaaatttttagattggacactctatcttgtaaaatgaaaaaatagaccttgcattttccaaaatgataaaaataggaccctaaacttaatttctacaacttttttttttttatatatataaccaacttgaagacaatttctaacacgaacagatacagaaaatgtaaacagttttgtcataacacatttagatcagattattattaaatttaatttgaaaaaaaattagtccagggtcctatttgtaccattttgaaaagacagggtctatttagtcatttaacaaaacagagagtccaattagtaacttttgcaaaacacagtccaaaatgatatttactcaattttacaatctatatataatagccctaaatataatctcataaagcaaaacaatacccaaatccactggtggatggagaatatgtaaactggaggggcaaaatataaaacaattaatatttggggagacaaattgataatcttgtatataatttttttttacataattaatatatataaatctataaaacaaaacatttagggagggctgtataaaataataagaataatattggattaaactaaatcttacattaattatagaatcaaaatcataattagagtttcatctacaatataacaactaagaaaattagtcatgtagagcagaaaatatatgggtcgtgctttttgacacaacacgagtttaggaggcacgagcacaacttaatatgaaaaaatataggcttaacatgacacgtcacgttgctgcaaattgggacgatgttatacaaaaaaataggcattcacacgacatgagaaatctaaaaacacaacacgtaagtacaaatagactaatccaa

SEQ ID NO: 233896 - DNA, 920 bp, Cannabis indica
caattcgattcaccattctctacgatactcgtactcttttttttttttttgctaatctaacaatttcataccaaagaaaactaacacagaagttcatggtgagagtgtctaaagcaagaggttccattccctcaatcaatgttatttcttgatgatctttttactatgcaattttgtgtcgcttgtttcaaatatttttttgaacacgatgaggaaggagaaaaagaaaaagaaattaacttatctttaattttataattgttattatattttaaactatttttttatttgatttttaaattgaaaaaataactaaatgacttgaaccaatctgaaactgtcacattaatttcttacttaaagtataaaaaagaagatgtgtagaattacttctaattagagatcattcttactatttttattaattaaggttatgtatgtaataattttaaattataaagagttgtattacaaatattttaataattaaacacaccaaaaacaaaaaaaataattgctaaaaaattcttactaattaaaaaaagttaattaataattatttgtaaattaattttgattaagattttataaggaattaaagtatcaagttactatcaagtaataagttaattattatttatttatttttaatttttaaatgatttacaaccattcaacagtaatatattattatttatttactatcaagtaatatattatttctttttaatggttaaaaataaatataactatagccatagtaataatatatttgatgtaaccattaaaattttctcttagattattattaatttaaaatattttagaaataataaaaataatatatataattttgatgtcacgtgtttaaaaatgatgtagtgtaaattaatgttgaaaaatagaagataacacaaact

SEQ ID NO: 233897 - DNA, 1765 bp, Cannabis indica
gaaatacaactctgctcagctggtttttcgagcgaggccaacttgttaattggagtcttctcttttgtagggagaacaatgtgcacctgctaacttggttctctgacagaggacgagccaaaattgttgtggaggcttgtgtttttcaccttgaggagaaattgaatttcaggcggcggtattgttacgccttagagtaataaataaagagggtaattgggtaattgtaatgggagggattaatgctatatatatgagtgagtagtgagggtaagaggtagaaaattttttgttaagtgagcttttagctttagggagagagctccaacaacttgttattctcttcttctatatcaataaactcactattttcctataattgctactgttatactaagttgataggaaattcctatcacacacttgtgccgacaaaataagtagtcggtataagtgttacccaagggaataaattggccaccttttgctggcgaggtgcatgaattgcttttaccggcgtagttcatgaacttcgccggcaaaagatcttttccttatagtgcgatgtacactcttatgagatactggacccaaccctcctctatactagctagcactccctaagttgagaactgtcttttttttattacacattaaccaagtataactggaagataattttaattgataaaaaccatcttttatatgtaaaatactagatataatctcacataacttatcaaaattagagtccctaatgcacataataaggatataacctataaaactgggtgtaaattaaaaaataataaaagaaaggtaaaaataaaaatagaaattgaaaaatagatatacagtgttatttcctcaatccctattgtgaagacttgtttgttgagttaaaactaattgtatttagattaattatattaatttaacctaataatttaattagcaacaaattaattctaaataattaaagggaaatttggcttagtatgcttaaatgtaaaacatgttgttttaatataccacccaattagaaatagtatatatatacatttaatatcttttcctcctaaaaatacctttacatttcaaaaaaaacttctctttctaactctctcactctccggcgttaaccccgacccagaacccctaccgttgaacatacagacctagaaccccagtcgcaaggcctcgtcatcgtcttctctcacggcctctctcgttttttttttgcgttttttcttctgattgggtttttccagaggtggtgcggtggttgtggctttggtctgggtctggtttggtttggttttgtggtcttgggtatcggttgagtttggtgagagttaaagagagagagggagagaagggcgagagaaagagggaaggtatgaggagggtattttgggatttaattaattttagagtattaaatttttatgcatttcaatgtagcatattaaaagaccatgaacaatttttaagcatgaatcgtcaaattttccataattgaatatgttttcaacataatattttagatggttattttcattgtgtaacatcttgtgttggctgagttggccaattatggttgtgcaaaacactaagaacaaggtgtggtggcttggttctcttgatagtggagcatcttgtgttggttgaggctgttcattaataaaagggttttttttttataaatatggcttttttgtaagtggtttagaaatatatggagaaataaagaaattttataaaa

SEQ ID NO: 233898 - DNA, 748 bp, Cannabis indica
atacaagggcataacaataatgtagcccaactagttgtttatgtaagggtagtttgggaattttaatatctctgcaacacctatataattcaatgttttcatgtcaacaaatttcaagatgagttttttagtttgataggtagaaaaagttcttccaaagcatcaaatcaaagcaaacaaaaaataggtatgaattatatgctatcttcttctcagttatttatttatttattttttttttttgaatggatcttcttttcagttttaattacatagcaattatatttaataccatggatcttcttagtaagtcataagaaaaaaaaaatatttttgagtccttatttagaagaaaaaatatggtatttttcaaaatcaataaaaaacatgtgtaattttcaaagaaagtttttttcttggacctctaggctaggtgggctctaggcactagcctagtagggccagatctagggccaggcctgtatataatatacagtaaatacctatttggtaccttgtattttactttttatttacagattttacacatttggtaccctctctttaagtggacataaacttttaggaaaattttacttacaccccaaaacttataaagacaccttattttaagaatttttattttatgtaaaatttatatcttgtattaagtttttttaacttttttctttcaatttatatttttaagaaatatacatattaaaaaaaaattaaattatattttaaa

SEQ ID NO: 233899 - DNA, 7649 bp, Cannabis indica
tttttttttaactttttttttgtcaaactaaacgttatacatatataggattcttaaatgatatatattatattacataaaaaaaatatattatgtatattatatctatttgtactctatattattatagcaaatataggtagtatatctcctaaaaaaattatttggtagactactctatttatctgtttcggtatataggagagctttttatttaatttcttttttcacgatcgtgtacgttatagctacttattaagatcacttgtaattttttataaaattcggaatagtttatcgaaaattaaattcaaatagcttctcaccacgagtataagaaaacacagtggcacatgtaataaaatatttgaaccttatgttcagcatgataaaccatttaaaaaattttaaaaatttacaagtgaccttatatagtaacgtacacaatcatgatttttttttattaaattttttttttaaatgtcgaaacaaataggagatcttttttttttggtatccaccaaaacaatatttagagggtatactatagacttttgattcttatatattgtaaggtaaaaatatataatatttaattatttgttttttttttttatttcaaaatatttgtttgtttatttttttttaaaatataatataatataataaatttattaatattatataattaaatactttggaaaatacatttagatgtgaaaaagcaaatagtcttaatatttcagtattcagatttagatatgatatcgtattatttagatgtgcatccagatttagaggtttatatcttaaaaaaaacaaatgcacccattttgtttcttgacactactttggtaatcatatcaaaaggattgcccattgtagggactttggcaattctcacagcttccttttcaacaatttctcttatgaaatggagctttatgtctatatgtttagtacgttcatgatgtacataattattggttgattgcatagcacttcgattatcacaataaactgtgataatctttagtctcgactttaattcttccattaaaccagtcaaccatattgctttctttatggtttctgttaaggtgatatactcagctttagttgtagacaaagcaaccaccttttgaagataatctttccaactgatagcagtaccatacatattaaagacatagccagttaggaattttcttgtgtcaatacaacctgcgtaatctgagtcaacatagccattgatcacattagtgtctgtttgttcacgctaaacactagtctcttgtccattgttccctttaagtatctcaggcctcccgatgttcttttcctgggtctctcataaatctacttaccctacttggtgcataggctatgtcaggtctggtacagaccatgacatacatgattgatccaactgcattagcataaggaactttagacatctcaggttttttagtttcatctttaggcatctgagtagcacttagcttacagcattgtgcaaagggagtaatgactgtctttgagttactcatttcaaaggtatccagaaccttttggatgtagctcttttggttcaagtatagtgttttttccccttatctcttttgatgtccatgcctaggattctacttgcaggatccaaatccttaatttcaaactccttcttgagttggagtttaagatgtttaatctcttgcatacttttgttggctataagaatgtcatcaacttacagtagtaggtataaaatatcatttttctctctgaaatacatgcatgaatcaaacttacttctttttcagacccaacttggtcacatattcatcaaatctcctattccattgcttaggagattgtttcaaaccatatagagactttctcagaaagcacaccatgttttcctttcccactttttcaaaatcatcaggatgtttcattagaattctttgatctatgttcccatataggaacgttgtcttgacatctagttgctctaattccaagttgttataagcaactaatgccaactaaattctaattgcttaactacaggagagaatacctcattgtagtccaccccttcagtttgagaaaatccatttgcaactaaccttgctttgtacctagcctgctgtacacttggaatcccttccttctatatgtaaacccatttgcagccaaccaccttggcaccatcagactttaagatcaattcccaggtgtaatttttcttcaaagagtgcatctcttttgacattgttgcattccatttctttctatccttgcttttcattgcttttgtatagcgagtaggttcctgttggataatcccacttgcaacatgaaaagcaaaggcaattaagtcagcatgaccatacctttcgggggttttacctttcttcttgttctgtttcttgctagcttgtaattcctctgatctgcttagctacatgttctgaatcaccgctttcatgatcagcatgtgtatcattctccattctagtagaagactccacctcaagctcagtttttcctttgcttcagttctgttttgatcaatctcagctttgtctccaacaagtttgtcatgaaccccatagaagcttcattgaatgtgacatccttacttataatacatttcctcattcctggctccaaacacaacagtctataccctttgactccatctgtatagcctaagaaaatgcatttcaaatctctagcctcaagcttgtcctaccggatgtgtccataacacacacagccaaatacctttaagtgttcatagcttgatagtttcccagactagatctcatctggtgtcttgaagttcagtgttgttgagggtcacttgttgatcaaatcagctttaattgtcacagattctgcccaaaatacttttggcaaaccaacacttaatagcatgcaacttaccctctccaatacggtcctgttgaatctctctctaactccattttgttgaggtgtctttctcacagatttgtgcctagctataccttcattcttacaaaacacatcaaactcatctgaactatattctaaaccattgtatgttctcagcctttctactttctttgcagttttgattttcaagcatgattttccaatgtttgaatttttcaagtacctcagttttacttttcaataaaatacccttaattttcttaaataatcatctacaattgagagataggacttgcctcctaagtgtgatgctgttcttgagggtccccataagtcactgtgaatataatccagtgttccatttgttcttcttgccagttccaaacttaatcctgcaagacttaccaaacacataatattcacataaatttagtcgttcaagctttacttttccaaataatccttgtttgttcaactcttttatccctctttcacttacatggccaagcctcttgtgtcatatctcttgtagaaattgagaagaaatattcacttgagttattttattactattggaaagaagcctttaaataggctgaggacagacttagacattaattacacttccactaacaactactaacacctcaactaacctaattaatactgattattttacaccctccctcaagctggtgcatacaagtcccacatgcctagcttgcacacttggtcatcgaagctttctgttgttagttcctttgtcagcaaatcaacaacttgttgtttgctaggtacgaaaacaacactactccttttcttcagttttgtctttatgaaatgatgatctacctccacatgtttggttctatcatgatgaactagattgtgtgctatactaatagctgattttcacagtgtagtttcaaaggacttgacttttgaagttttagttcttcaagaactcgtttgatccaaattagttcacaaactccttgagcaagagctctaagctcaggtttggcactacttcttgcaacaatagattgcttcctgcttctccaagtaacaaggtttccccataccttgctacaatatccagatgtcgatcttttgtcctcaactgaacttgcccaatctacatctgtgtatgcttatatacctctttctttatttttcctaaacaacaaaccttttcccggtgtcttctttaggcactgtaatatcctgtaaaatgcctctatgtgttattctgaagggttgtgcatatgttgactaaccaaactaactgaaaaggcaatatccggtctggtgtgagacaaataaatcaattttcctactaatcattgatacatccccttgtctacaactttttatttttctttcttcttgtactttccttttggccccaccggtgttgctgctggtttacatccgagcataccagagttccatttagaaatgcattcttgatatgaagaacacaaacaagtctaaagttcactcactcaaaaacacacaattaagaacacagtcgatccaagaatcacaaagaaaaataagaagatttaaacaatgacaaaagaagcaagacatcagaaattttacgagttcgagcccagtgcaatgctctacttctcggttgaacaacagccataataatcttcattaatcgccaagagtgttacagaattacaatgattcttgatcaagaacgattgagagttacaagtttcacttctctctctacttcgtagaaccaatctaactaactctctcccagttacaactagataatacatttttatacaattttttggagatagtatatataggtaactaactcggggcttgagctattagatcactagtctagcttgcaatgaacaagtttagtaattagtaacttgtaaccattccaagaatgatttatttccagaactacatgggagtaaagtaaccaccttcacatcaagttctctctctttataaccccaaacggttgtctagtggtgaggaggagtgttggaaagctctggtaagcatctgttccaaggctcaaatccccatagactcagaaaaccttagggtcacttatggtcacccggtcaaactgtgaaaacatgtatatttcacttttacatgttgctttttaaataatcatgtgacctttcatacaccatctttattctctttctattgtttttcttttattatttatggttatactacaattatgttgttagatgggtatagctattctattcaaggtatttggtaaatcaatcttttcgttgactaaacgtctaaacactattttgattggtaactgaaatattatagtatccttttttcacattcaggcatctttgggcactatggatttcatcattgacactgtggctgcagttcatcccctgactccactactagctttactgaagcttaatgggaaactgatcactgttggtttacctgacaaacctctggagctgcctgttttccctctagttttgggtgagtctcaatcattacactgaataatgcaaaatgccttattaaccatatatgtacatggtgacatcccccattaaaaataaactggtttgaaaagaggtgtcacataattgagggtagtgtttgagtctgaattttatgtttagcagttacaacgttccttcatatagcatatgttgttttagtcaccatcttttccattaagtttgttttacttcaaagattattcaagccatactgaaaacataatagcttctttactttatgagtacaaagttattgcttttgatggttaagcatttgatgggcaatttcttttaatatgttctcactcatttcttgaaaattgcaatgcgtgggagaacagggagaaaaatggttggaggaagcgatattggaggaataaaagagacacaggaaatgctagatttttgcgccaagcacgacatcacagcagatattgagctaatcaagatggaggagattaacacggcctttgaaaggcttgccaaatctgatgtgaggtacaggtttgtaattgatgtggggagctctttatcgcagtagattagagctcttctccaatctccatcctgatggtttccattatgatattataataaaatgtggattgttggactatgtatgctaaatatgagatggaactatggagtggagccctacaattacaatggatttctattagtaaatgatggatacttgtggctctttctatgtttggcctagcaatattctctaaagtacacatcttttgcacacaatgttcttgttttttcctttgtattttttagctaatatctttataaaatcagttatagagcttcaagtactacttatgcattgaggtcatttggactataaaccaaactaggattctttttagagaaaattatatcatcttctatgtataccaagagctgtagtcttgtagactggtagtgttttagtagagcacaatttagtaatttttcctaggttcctttttagttctttcttcccattttaaataataactacccttttctttaagttaattgctttgttggtcatgaaatcttcggaaagatctcataggattttgttaaagttaggggtgtttattgtagcacatccaatatttttaggcttatctagacttgatctaattatatattagacgttagatttatcatccgatccgatctaattaatgttagtcatccaatcgatctaacatccattaaatgttggatcagatcagttttatccattgggtgtattccatttatatctattagtttaatgagggtttatctaatatttttaacctagtattttttagatcgaatctatctaatattttagatcaagtgtattggatttagattggatctatctaatccgaaaaaagagtaaaattttaatgttaattttaatatatacatatatactatatatataactacaaaatctaattactttacaaactaaatgaaaatacaaattagttcgattggatgttggatgtattagatttttggacatcccatccaacatctaatccgatccaattagatatctaatgtttagcggtcggttgtaattggatcagtcggttatcattagattgaattaatttgtgcacacccctagttaaatccctactaaggtgttcataaaatagccgatccaatctaattcgcaaagtgcggatatccgcacttgtgtggattggattggattgaaaaattcaaaatctgcacttatgcggattggatgttgattgacatgtgaaagtttccgattcaatccaatccacacatatttataaaaaaaataaaaaaaaattatatatacacataatattttaatgtatagaaaatattaatttaaaagtcaaatacatataatacaattatatatcaaagcttaatagatcaaatatatattctattcttatatataatttttttttctacatataattaaatatttatttatacatacaattttttttcttcttttgaatttgttatttgccattttatttattctaatgtgttgttggagacataaaataactataatttgttttattttgttgtctagttatgtgaaaataaatatttttttttcattaaatattaaataatttaatattaaaaagtaaccaattcaaaataaccgat

SEQ ID NO: 233900 - DNA, 708 bp, Cannabis indica
tcaaacccttcaggttggctcataaaaatatattcttcaagtgagccgtgtaaaaatgtagttcttacatccatttgttctacatcaagcctattcttagcagccttggccaatattactcttattgaggtttactttaccaatggaataaatagacatgtataatttatgcccttttttgagtgaatctctttgctacaagcctatccttgtatctatctttctcaattctagaaattccttcattctgataattatttgaggagaataacaaataaagaataaaagatgcagagaatatagatagattaggattttattcaattgcaaagttaacagtaattaatacaactaataagcaagcattataaatgcaactaacataaaatactaaaataatataaaagacttaaataaccctaattaattatttaacaccttccctcaaactcatgatgttgcttcaagaagcatcgagagtttccctaaaagaaaacgaaaaatgagaaatcgtattcgacttaataaaaaaaatcaacaggttgtaatgaagaaggaataaaaagaaaaataataatgcccatctcaatatgcttggtgtgttcatgaaaaattgagttgtgagaaatctgaatggcactttgattgttgtaatacacacgagtgggacaagggtactaaatggcactcatatctgcaagtaaccat

SEQ ID NO: 233901 - DNA, 695 bp, Cannabis indica
caagcattgtacataatcgaattagaagattgaggcttaggaatggtaccatccaagaatccaatcttgttcttgacagaaatggccaatcgcatggctctactccaagacatatagttgtcttgcccagtaagaggttgagacacgagtatgttacctgggttgtctccatggtgcaaatagtatggattcgaaggatcttctaatggattcctttgctgcgtatgattgctttgattgtgcggtccagtaacttcttcgatggtcgcggaaacaccatcgttatcagctccttggatctctgcttgattatgagtttccatggcagaaacgaaacagatcaggaagaaacactgatcgaagaatagaagtgaaattcagaacagaacttcaggaaagaagacagaactctttgctggagaagacgacacagcgaagagaaagacaattcaagatcgaggggaagcttctcttccccgctctgataccataacacgaaaacacatttgggtaaaaatgagttcttattgattagagaagaaggatacagaggtatatatacaaagctcaaaacagagcaagaaacaaatcaacaactcagcctgtaaggactaaactgcccttaactaaaataaccacctaactaacttaataacagaacagacttcaactgaatataaaactaaatcttgtta

SEQ ID NO: 233902 - DNA, 1040 bp, Cannabis indica
gccattgcagtgaatttttttgtttttcttttataagaccattttctttttgataaataccgagtagatatttctttatagatacagaatgtatggtttctaatttatagttattctgactttttgtgcctctcatatcttcatactctcatttttttgatcttgtgacttatctggttgctcactttattatttccttccttctttaacagttcatgttgagctcacaaaaaggatgtaggattatttattcattttgttaatgagacatgacattttcgtttagttagaaatatatgaaactaacgtctttaaaacaaatcatgagttccatgagtctatgattttttcgtcatatctttaagtgaattaatgcatccataatagaaaaaggttggaggtgctttcacacgcttttggatgaatataagcttttcagaagcagatgtataactattttttcttctgtttcaccattgtaattgtaattcatttagaggttctgacacacgtcaaccatgggattaaagagctcatatttgtacaaggtcttataactttcatgatatgtgtaaatattattgtaatgcttgctagagctctgtcatttgtttttttggcaacttgagtttgatactgtatacatgccagtcaaatttagggagtttttctttacttatgggctactgatattgtttaaagtgagaatatgaagagagaataggagagtatcataagtctagtatagtgttgggtaaggaaaacaataactgcttgaatgggcttctgcagagtgtattaaatattgagattaatcaatcattttgtctgtgatgatgtttaccgcattaataaataaaatgcatgtatccctaagtgacaagttgttatttgattgacatgtttaggttttgattcgactcacttgaaaaaaaaaatgatgatatgtttaatgctatattcttcactgtagtttgattgtttcattgtgctttgttttttcccttttaaagtatattttaatgatgatatgtttaatg

SEQ ID NO: 233903 - DNA, 1990 bp, Cannabis indica
gcaaaacttagccatgtctctcttgcttacatattttttcatgggtgcgggcttcttgtacggagctaatgattgagtagccatgtacacactttctatatcttctgtcaggatagaaaatgcagtaaacttggtaggattctcccttggagcttgttcggttttactagcaaactttccctttttcccatttccttgcctattgttgttgttggaccatttaccacccgagctcgaattgcttgggtattgggggagctgggtggatatcccagcagagagagcttttggctggctaggtttttgctccacccctgcccgttgaatggcttcttcaagcttaataaaaccttccacgcgatcaaggaagtcactcatagaatctactggtccgttcttcctgatgtccttccaatgttctctaagaccttcaatgcccccagtatcgcggacaactttccgtcttcggttacctgtgcaaccttagttgcctccgtcataaatctgctgatgtcggctcggagaggttctcctggtctttgcttcactttgaccagatctcttaagtgcaacggaagttggcgagaagaggagaattgtgcatggaactccgaggagaaagccttccatgagttgaacttttcgggcgccaacttgaaataccattgttaggcggcctctgagaggatggcaggaaaaactctgcaacatacatctccttctgctccttacaggtccatttgcatttcgaaatacttgaggtgggataagggatcttccttcccagtgtacatcttccaggttggcatcttaaacttgtgaggaaattctaagacattaatctctgggggagaaaggggatccacgtgctcggtccaactcaaggttattgttcctttgatcggccaggccttggaacatattttttagttcatccaaatgtgcctgcacggctggactaacttgttcggcctcttgaccgaccagagtcgcgtcagcatctatttgagcgagattttgagcgcaggttccgggctgaatgactggcgcgtcgtgctggtcgtccaaccctctccttctgttcagatcatctctaagatcatgaactgttcccaatcgattaaatatagaaacacttggctgtctcagtgactggttggtttggccaattagctggtcgacaccattaacttggttggaattattaggtatgacttctcttaatgaattgctagacaaggtctgcccgcctaccacttggcccacaggtggaacttgtgaccggggattggacggctgaccatttatagtctgagaggtgttcaccgctggatcttcgtctgtctcatcccagggggatgacggttgtaggctgttgtccggcagcctgataggcttttcgtatcaacacggtggccttccaggttcagtcgtcaatggctgcttgctgagcccttaacgtttccatctccttgtccctccattcagcgaacatgcgcctctgctcttcaaatgcaagaattaccgcgaaacggagttcctcctgatcgtgatgcaaggtgttagtatgaccctgcatgactcgaagagcagcgcggaggttctggattttggtgtcatctccaatagttgttcgaacatttgttacgagcagaacgacagtgttgagaatgccctgattagctactgaactgccagtctcttacacaccatgcgcgattccactcacaggagtcgtcactccatgacctacgatcgagggttgttggggatttgtggttggtggaacccttgtgttccctgggttctgcagtgtaggatccaccgcttgtggatttgctggatcagccacgcctctacgagtctgtaccaccattgtatttatgattaggtttgagaacgatcttgagttcaatgctcaatggaagcgcactaaaatactgacctcgcttttggccaacgacagtgagtctaaattgtaagcgacaag

SEQ ID NO: 233904 - DNA, 766 bp, Cannabis indica
taaaataatttccaacagaagctccccaattttggaagcttccccattctgaaagctttttagccccaaaatctagctcccaacctaactaaaagctactaaaatctccattaaagttttttggggtattctaaagataaacaacaattcaaaagcatctaaaataacatgcaatcaaatttaccatggatgaccaaatcatgaatttaaaaaactcaaacttcctcaaatcttgctacaacttctaaaaactagccataaattactaaattcaagctttaaactagtttctaacatagtttaacctcaaataaaactaaacttccaaaatcataatatagaaccaagtttaaatcatgaaattcaaagaagaaagaaaactaggattacctttgatgaatttctcaattcctactcaaactatagctgaaatcttagctggatgatgaagaaactgatgaacaaaatggttaaatctccttggttcgcttcagtagaatggtatagaaaaggaaaaagtttggtggaactttttttattttgcaaaaaatgagataaaaccttttattttctttttcttaatctatttactcaaatcgtcagaataatgagggtattctacagaattcactaaaaccaaaaccatttttaatagaaaaaagtacaattttgcctttacttcacccttaaaaaatctaagggcttagggttaaaattgtctaaaaccgtaacaccgcccaacttcgatattccaaatatcacttat

SEQ ID NO: 233905 - DNA, 680 bp, Cannabis indica
aaaggattattttactaccaaggatcgactagttggtggatgtgactgctggacacgaactaatgacattcatggacgcatattttggatataaccagatcaagatgcatgtccctgattaagagcatacacgtttcgtaaccaacatgggactttacttctataaagttatgccatttggtttgaagaatgctagggcaacatatcagtgactagtaaatggaacgttcgagaaacaaacagggaagaacatggaagtctacgtcgatgatatgttggtatagtcgataaagtgcgaagatcatacaaaagacctcgcagagtgctttgaaacactcaaaaagtacaacatgaaactcgacccaaagaagtgttcctttggagtctcctcggggaaatttctaggattcatagttaacgcgagaggcatagaagcaaatcctgaaaaaattaaggctttaatagagatgccatcgcccacaaagccgaaggaagtccaagccttaacagggagaatggcagcactaaacaaattcatcttgaaatcaactaacaaatgcctaccattcttcaatgtgttgtgaggcaacaaaaagtttgaatggacagattagtgcgaggaggcctttcggggcataaataaacatttatcaacacctctagttttggccaaaccaata

SEQ ID NO: 233906 - DNA, 4725 bp, Cannabis indica
ggcataaaacccaacacaaattagggttcataggctcacgtgagcgttttcaccctagaaacctcaatctgccaagcaaactaataaggacatgacttatttgggcatgaaaatgaataggtttgtggataaagtttttatgccattaaatcctcaagaaaagaggcatatgtgcccactctgtaatatggaaatggcattgcccatcaattttggtgggtactgccacataggaatggcagtggtctctcctaacaaaccatgaagggaaaattgttcaattaggttccctaaacaccaaggagtgaaaaacaagtgagagaaactatttcccacctaggaattaccctagctgatcactgtcataacaaaatggtagtgcccatcaaatttgatgggcactgccataaggagatggcagtggtcggccatgaagaggggaagtgagattttttctaacaatgcattttcatcaataatatgtcaaaattaaatgaaagaagccaacaagtggtaaagaaaccacttggtcgaaaactgccataaagaaatggtagtgcccaccaattttgatgggcactgccacaatggagtggcagtggtcggcccttggataaggaaaagggtttcattgcccaagttacattataaacatatgtatcaaatacaagtgagaaaattcacccaaggctttataggaccaatcgaccactgccataaggaattggcagtgtccatcaaatatgatggccactaccacaatggagtggtagtgatcgaccactacacaaggaaaggggtttattggccaaattgtatttttaacatacatttatcaaatacaagtgagaaataccactcatggcttgtcacaagtcatggccgaccactaccactgtccgactccaactggtggcagtggtctcccgttaaggtttcagacattgaatagaggtttttgggtcctgagacctccaaaatatgactcaccatcaaaaaacaagtcaaaacacaccccgaggggtccaagaacatgcatagataagcactgccatttggccatgttagtgctcgcaattggtacaagtcagcataaattgcctttagtaaaatggacataactgtctcaatttttatccaattgactcggttaaacttgcattggacgataatttcaagaaaaatcaaagtgtgtatcataaccatggatcaattatgaggttatcgggtccaaaatttggtcacaaggcagacttgtatattttactcgagaattgagtaacgtggttaagtgagggttgttggaggacactcgcatagcccacgtggcattgtatgcaagcattgacactccaaaacatatgttttcagtactcatcaccaatatcatgcatttctaggcaagaggtgacatcccatcactccatttcaaattggtgcatcctcaaccaaaaataataacttttccaatgtttgtgggattttttcctagaaacaaggatatttttatagctatatattttcatgtaatattttattcattaaaaagagtggtgtacgagattttttagtgagataccccggcatgtgggggatcactaacaaacccatagcctatataggaaaatgaagaggctgaagtaggaaaatgaagacatctcgaatgacttacattagagactttgataagtgggtcgtgtgctaaaattgagtacctaataagttaagatccatgtcgacaacttgctcaagctagcaaaaatactagccaccattggcaacaaaattaatgttatctttaaaactccgcattacaaagataataattattagaaaaaataagccaaaaaaatatattcaacttcaaattccaaagtcaccaagatatgaaatggactaagttatatatgcttaacaaattccaaagatgtgaaaaagactcgttagttttaactagtgagcactccacacctagtggacaatgagtatgggtgggcccaaatgtcaatacataaccaaaatgaatgtatgtggaaaaaagagacataaacactaatatattttcacacaaatagcaaagtgcataaagttagtccatagagagcactgtcacaaggcagctctcgcatgaaatactgtaggactaataaagaagactaaaaagacaagtcaatcatggaaggccacacaagggaatggcaatgctcgtcaaaattgaagaacactaccaacatggaaacacctatatgtaactccaatcctcaagactctggggctggtcaaaattggagaacactaccaataaaattaagtataaaattacccctaattagaggtcattcttaccattttttattaattaaggttatgtgtgtaataatattatgttatgctcgattttcaaaaaataaaaaaagtcaaccttgcgactttgaccaaggcttataaatgtcaaataaatcaagacatccttcttgagagccccatggaacttctagaggactcaataacatcaaccaaccatttggtgcagggactcacacatttgagtgtgcccaaactagggttcatgtgcccatgcgagcgttttcaccctagaaaccttaatctgtgaaggaaactaacaaggacatgacttatttgggcatgaaaatgaataggtttgtgcataaagttaatatgccattaaatcctcaagaaaagagacatatgtgcccactgcaatatggaaatggcagtgcccatcaattttggtgggtattgccacaagggaatgatagtagtctctccttacaaaccataaaggaaaaattattcaaataggttccctaaacacgaaggagtgaaaaacaaatgagaaaaaccatttcccacttaggaattaccctagccgaccactgccataatttgatgggcactgctacaagaagatggcagtggtcggccatgaagaggggaaatgatatatttttttccaacaatgcattttcatcaatatatgtcaaaactaagtgaaagaagccaccaagtagtaaagaaactacttggccaaccactgccataaggaaatggtagtgcccaccaattttgatgggaactgccataaggaaaagagtttcattgcccaagttacattctcaacatatatgtatcaaataaaagtgagaaaagtcaccaaaggctttatagggtccatctccgacaactgtcataggaactcgcaatgcctatcaaatttgatgggcactgccacaatggagtggtagtggtcgaccactacacaaggaaagtggattaattggccaaattgtatttttaacatccgtttatcaaatacaagtgagaaataccacccatggcttgtcacaagccaaggtcgaccactgccactgtccgactccaacgtggcagtggtctcccgttaaggtttcagacattgaagagagtttttgggtcttgagacctccaaaatatgactcaccacaaaaaataagtcaaaacacacctcgaggggtccgagaacatgcacagacaagtactgccatttggcaatgttagtgctcgcaaacggtacaagtcagcataaattgccttcagtaaaatggacatatatgtctcaatttttatcaaactgacttggttaaacttgcattggaacgataatttcaagaatgatcaaagtgtgtatcataaccatggatcaattctgaggttatcgggtccaaaatttggtcacaaggcagactggtacattttactcgagaatttagtaatgtggttaagtgagagttgttggaggacactggcatagcccacgtggcattgtatgcaagcattgacactccaaaacacattttttcagtactcatcaccaatatcattcatttctaggcaagaggtaacatcccatcactctatttcaaattggtgcattctcaaccaaaaataataacttttccaatgtttgtgggatttttttcctagaaacaaggatatttttataggtatatatttttctgtaatattttattcattaaaaagagtggtatacgagatttgttagtgagataccccgacatgtgggggatcactaacaaaccatatagcctatataaggaaaatgaagaggctgaagtagggaccttctttttggatcttcttttagactctcttggagtttttctctaaaacctttctcttgagactcacttgacggtagccaagaacataacacttattcctctatcatctccattgagtccatcatactcagtcgacaccagaccttaaaacacaaatgatacacatttttccatagactttattggtttattgatcccaagaactttacaatcactaatttagatcatatttatgaatatcaagtctcccatgagtcttatattcattaatctcgattaagattttaccttaaaatcttttgctgtatttttatccacacactcttgagaacataactctggtgtgtcggatctaatcaataaaactaaaagtagacgtagccccattaccatcgcgacatgggggggggggggagctactataaatatctagtgtccatttaatttactgcaatttattagtcaaattaattcaccgtgctcctcttttattttactaatcttcttaggtcagttgacgaaaaaccgtagtcaacagtttgatgctttcattaagagtaccacggtgaaaatctgactattt

SEQ ID NO: 233907 - DNA, 872 bp, Cannabis indica
gggcacaaaacccaacagtctatccacacatgtatagcttctccctctttcacccgtaggttgaacggatgctccaccacttatatgaaggttccatgactcacaaaaatgcccccgactcacccaattgcccatggactcgcacaacccccgatggagttgcacaatagctagggagtcgctcaacagcctaccgactctcatgggagctgtcaactcgcataccaagctctcatgatttggcagtcttagtatttgggctataactttctcgatatatatcagaattggaagattcaagatgcgttggaaagataagaaagagatatttgaatcttatgcttgtggtaagatctaattctgaacatatcactacgaaaatccttcaataattgtaacttagtgagttgatcttactaactctactcgtgagttgttacagggttgacctccaagttgcatggatataccccaagacttgtaagcatagatttccaatattaatgatccttaggccgtatgtattgactcagtcattcttcaaccgaatcttatagttgatgtctctcgactgttggggccgattgttgactaatctcgaaaattaactcttccaatttttggggttaacaatatatattgttaaagtatatttttttatgttttaaaatgaaatttgttacttattaaaaggatcacaaactaaactttaaaagaaaatagagaatgtatagataacttatgcaaaagtagatctttaaacaaataaaaaaaaacaaaacttatatatgtataaaaacggttattcttgtacttgtaatgtattataatatagattgttttaaaatatttgattgactatcaatattgat

SEQ ID NO: 233908 - DNA, 625 bp, Cannabis indica
ataaatccagtatttttataagtttccaataaatacgacaaagctttgaaagtttttctccatttttcttaaaaaggctttcacaatgcaaaattgagcctaacccaagaaaaaaaggcaaagccttttcatccaatcatggatcttaaaagaaatgggcccaacactaacaagtaggcccaatccaattataacccagacgaccaatcagccagaccagactttcacacgggcacgaagatcaagaaagataaggaagaagctacctcacgcgcttccacaacttcatacaacacactccattagtatatctcatctcatcaccttataattctctgtaaagagagttcactacacgcgccatcattgcgtagatcagttccaatcaatgaaaaaaaatggataacagaaatataaaatatataaataaattcaattaagagattttgggctttgaaaattgaaggtgttgagtttgagagagagaagcttgtgaggaacgaaactgaattttaatggcggaaccactcgtggtagatggagagtaccttaaggaggtggagaaagctcggagagaccttcgagctttgatctcaagcaagaattgtgctcctatcatgcttcg

SEQ ID NO: 233909 - DNA, 773 bp, Cannabis indica
attgaactgtgcaaaacttggatagcaactaaacaatcaatttcaagttgaacgcaatgcaactctttcttttgatccaacttaaagtctcattggtgccaaaaatcttaactattgcagcatcaatacaactcaacttactaatagagaaaacctcgataaatagtctcgggccacacctccaacaccaaactagccctcctaaacaaaaatagtgccatcaacattcaccttaatcttgtttaaaccggtttagaccaatgctaaagccccacacccaatcccaaaggaaaataggggacaatttttttttgattgagcaaccttccattgattaagtgttaatctagctgaaatcactacttcggaagcaggggagctctttcctctcataattacagcattgcgtgcattccaaaaagcctggtcaaccatggctgcctcctcttgaattgcagcagaagcatacttcaacaagttaccaaaccaagtccaaaactctcctcccaacaaactttcagaactgatagaagaacgaattcaacaagctttagcaaatgaccagcaagaaactaataaaagaaaaatagttttctcctcttggttacacattggacacaccaaatctattggtatatgtttagaaaccaattgagacttagttgctaaaatatccaaaagtgcacgccaaaggaaatttttagactttaggagggacagaaagtttccaaactacattctacatggccaaatcattaatgttcaccaataaa

SEQ ID NO: 233910 - DNA, 686 bp, Cannabis indica
tattattttatgttaaattttttgtttttcaatcttaaaagtttaggggttttattcctcattaacttctctttcttttgatatattttttgcataaaattgttgagtaaattaagagaatttcaaaattaaacttttagggttggtgtgttttaatgatgaaattatatttgaattttttgattataattataattgattgaaattgattatcaatgaatgatttttcattgttttataatgtggatacatattttatttcgaattaagtcaaaaaatcaagaaattttatgaattttttttttgggtttgaaattttcggattactcattaaatctacttctttttagtcatttttacaccaatttacaccgagcagtatattagaaattgattcccgatcaaaacccctcaatttcccgaagtttccgtcgattttttggccgattttcacgacagacccgaactggacgaaccgggttgcgtgacccgttttcagacccggctagaggaaggaggagactcccagccgcaaagcccactctcaacagtggcgcatgcggctacgtccgaagtcgtttttcgacgttttttttccagcgtgcttagaatttaatttatgatttttctatggtttttaataatttttttgactctatttaaaatagttattattattttaatga

SEQ ID NO: 233911 - DNA, 2122 bp, Cannabis indica
atctaaaaactctaaaattctctaattttcctttgaatttcttaaggtcgaataagagagagaaaatgagagagagggtgttgagttttaggattttggtttaccttttaatttttcttttcctaagtaaatctaactataataaataagcatagaacatcatttaaagatccactaactaaaggattactattaacttatgacaaaatttcgaaaatacccctcacttggtttttaagaaacttcttaactaggggtaaacggttgttatacccgaaattcgactgcacctcagagggtgcttggtataataatgttatgtaatttaatgcaaaaaggaataactcatttaatatagaattaatagagtacattcataactcgctgactgtatagtttttagcgagacaaggatacaaaactattaatacctgtattgacgagacaccgacctgcttcagaatacacagatcccaggacaagattcgtttaaaagaataagtgaagttactcaaaacaacctcaaatgagtatatagcgaggcatccacctcgctattcataagaaacttgatgaggcgaaacatttatcaacgcttagcgtattttccatattacaatagataatgataacaacttggaaatatgcaagatatgattgtccagtctgcaaggccttatggtcaaagagcagttcttaagtttgcttagtacactggtgctcatgccattactggaaggcatatgatagtcctaattggtattcaccatctacaagttaaacaagatactattgtccaagttattaaggcagattaattagtgtaattcaagggctttgtctaattctggtttaggggtagaatattccttttgctgttatgctattttgtcttgttcaattctgttatttcctttttgcttgatttcctctgcttcccgttgtactctgccacctggctttgagccgttgtaatcattgtgcctataaatacaatcattggcctcagtcccctttgagctgagattttatccttactgctgtgtgtgaatattctcacttggtatcagagcaaaggtttgctcttaccatgtcgaccggaagaaatcagaccccagtgggtcgccgtactggtgctgagcaacagggccataactccagtcatcccagctccccgcaagtcacaagtggagtctctcaatcaagctttcatcttggatctggaggttttagcagttcccctttcggtaacacacttactcatcccttttctattaaacttgatagaaacaactatactctttggagaaatcttgttaccactgtgattaggggccacaggcttgaaagctttgtcaatggcacaagagttttgtcactagagtttgttccagccattggagaacttggtggaaacacacctggttttggagttcaaccaaatccagattatgaataatgggttatgtgtgatcagctccttatgggatggctgtatgggtctatgacagagggcattgctacagaagtcatggggtgtgcctctgctagatccctttgggttgcacttgaaaacttgtatggtgcccattctcgtgaaaagatggatgacactcgaacaaaaatccaaactactcggaaaggaggcactacgatgactgagtatcttcgacaaaagcgtgcttgggctgacagccttgcattagccggtgatccttaccccgaggctcatttgatatctaacgttttaagtggtcttgatgcagaatatctcaccattgtttgtcaacttgaagctcaagccaaaattagcctcacttggcaggagatgcaggagactttattgagttttgatagcaagctagagcgattacatctcttgacagcaaacagcaagaattctggtgctaatactggtgcaagcccttctgcagctcttgtaaataaacagtcgaatcacaacagtcatggaggcagggggtattcgaactacagccaaaacaacactggtagaggaaatggcagaggttcgaatcatcccaataaccgtggaggaggacatccaagtcgaggtggccgcgatcaaggtggtagaaacgccaaaccaacgtgccaagtatgt

SEQ ID NO: 233912 - DNA, 1090 bp, Cannabis indica
catcttattctgcataagatgattagcacaaccgatgaggactgttgcccctgattttgcctaaaatacgtggaccaaccggatgatgacacgtagatggaacgagtttagcgtttaaataaatcagttaagtctctttaaccaaagggatcaaccttagacatgcctctggagaaggcatgtaagtctcacatgctcccgaagagcaaggctacaacgccgctactccgggaggtgtcagatcctatctgaaccgtcatctcgcatttaatgctgcatgggaggaggcatattgaaactgccatatgtcttaaagtgtgacagcacaagcccctctctgcagctactatgctatgattaatgagcctagtgacgactactttatgaggactcacatcagtcaaaaaggataaaggaccacatccataaaacccctacaaagcctagggattagaccatgcatttcctatgatatattcattgggaatgtgtggctttactgatagttacagaaagacatgtacctcaattctagggatcaccccacaaaaacactataaataccccccaaactcattaaagcaggggtcgagaattctgggtttcataagaactagaagaggaaaaatccaccaagaacattctctgtaataaatactatcataaatacacagactcgtagactaaggctcattaatgccccaaccacgtaaaaatctatcttaatcccttatagctctcttaattattattattatattagttgccgaaaacttcggtcaacaaggacaataccatttaatgttcttagacagatagtcacattaccttgtcgtagtgggagaattttaaggaactcatcctgttatgacttggaagacacttgtgataaaatccattgttagtttaaacaagtaatggatagtcagaataaggaacgaagaagtaatgccaagagaactgtggttaaaaccattcatatggagtaaccaaaagttttctattacaaggacaagaaaggaaattttgaaaataagtattcaatggacataaaacttcctaatcttagtatagtaggtttgaagttatc

SEQ ID NO: 233913 - DNA, 1312 bp, Cannabis indica
gatttgaagaatcagaactggaaattgtaattgaattgattgtttagtgaaagttattgtacccggttcaagggaacccaagcactactcggttggaatgcgtttccaatgcagaggaagcttgtaaattctgtgttcattgattttaaagttcagttcataacatagaattactctgttaagaatcatcaattagaacttatagcaattaggactttcagatagaacctgattttggtgtttgtatttctttttaacttgtttggggctttgtatttagcccataaaatgagattgatttgtaatttttggtgattaatttgtaattttttgtccaaaatgtgtatagacactattaattcttacgaaaaaaatacttttttttctaatttttttgtaaatctatttttttaaaaaagttatatatgttattgagtaatactattttttttgtaaatctatttttttgtaaatctattttttttgtaattattgagtaatactattagtggataattaataattttaaaaatattttatttataaattaaaatataattttaataaaaagaaataatatataaatttttttattctaaaaaatttaaaatcctactttcatgtccattaatggtggactagaaatatttttttagtccaacattgttggacttaaaaatacccattttatgtccctggatgttatgtccaacacaaaaatagactagaaatacttttctagtccaattttaatggacttttgtcaaatttctaaaaatggtgatctatagaatagagaaaatttttcaagaaaataaagttgaaacttcttcatgtctaaattcaactatgttctgatccgatttttgaaaatgtccaaacacaaaagttttagatctcttttttagttttccaacgcatcttgaaaaatctaattaggagtttatatgtgaatgttatagatattttactgagaatgtcgaaccaaaaaaaatgggtccaatggtcgtggtgaggcttttagtggccgcagcaagggactaaagaaagctcattttttcatttttctacagctgtcacagcgaggatattggccaccgcagtgccaactccatacggttcaaggaaaacttcgtcttttcacattttaggctggaaaactctattaatgcaaggggatcgctaattatagagggagagactatattaatactataaacacaagaagaaggctcttggagcgagcatgggcgattcgcaacaatcctccatcttgtttctttctctcctcttaatttttttatgtttttta

SEQ ID NO: 233914 - DNA, 1444 bp, Cannabis indica
ggtaatctcatcagttggtgctctaaaaagcaacaagttgttgctcgttccagtactgaatctgagtaccgggctttagctttggcaacctctgaaataatgtggctacaatctctcctcgctgagttatctatcaccacatttcagacccctattctatggtgtgacaacatgggagctagatcccttgcctcaaatccagtcttccatgctagaaccaaacatatcgaagtagatctccacttcatcagagatagagttcttgccaacaaacttgatgtgcgttatgttgataccagcaatcagattgctgacatcttcactaaaccactaccaacatcttcattccaattctttcgatacaagttgacacttggtgttcacccgtgcaacttgaggggggatattggaatatcagaagcttcacaggagtccagtgaaaatgaagcaattacttagtttgttatgtcacgtgattgtattgtaaagcagttagtttgttaattaattagttgtaaattctgttacagttagttaatctcaactaactccttgtactgctttctttgtgtgaatatataaaaaggactcctactgcctcaagatttacattgagcagtatcaaattctctctcactccattcagttcatcttccctgttttactctgttctttgctctttttcattcttcttcagatacggagtgcatttggggttgttcgcgcacttttcctcctagttttccttttccttgttgtgtttcctctatttggttactttttcttcaacgttgtagtacctgtaattgagtatgtcttgggtgtggatcaagggacccattcatcctcatattgtgatatcacgattgatggaaagactaccagacaatacgggagtgattgtggtaattttagaggtgtgatgaaggcatttaataaactgcattaataatagtatcttctacttatttaggaagtcgaacatgccaggacatatactcttgggtaattaatttgattaatttaaagctttagtttaattgttcttgtatatagggactgccccctgtttgtgcttttgttaccgctactagtatatattatattaattaaatttactctttaatattttattaattttattagaatattttttacaaaacttaagacctaattaattaagttaatatttttttttgaaaatataatgtatatgtatttatttttcatgggcaaataattttcttttcaacttagttaatttttttctcttacataagttaaaaattttataattttgtgtgtttaaattttgagactttttctatattaaaccaaaaatggatcaaatttacatttatgaccccaaaaaaagaaataaacaaaaatagaaactaaaagttgttaattacaaaaataccggccaacgaaaacggaagcctcc

SEQ ID NO: 233915 - DNA, 1128 bp, Cannabis indica
ttctaatggcgttgatgatgatgttttgcattctgttcttgccacgattaatactgccatcacaccaaagatgaatcactttttgcttcagccttatactgctactgaagttaaatctgctctcaattctatggttccagacaagtctccaggagttgatggtatgtctgccatattttcccagcatcattgggatatagttgggccattaattactcaaagtactcttagacttttgaatgagggggataatatggaagctattaactcagccctgattacattgattccaaagatcgatcaacctaaatttgtgagtgactatagacctatcagtttgtataccgtgctctataagttggtttccaaagccattgctgccagattcaaggaggctcttcctcatgttatttttcaaaatcaaagtgcttttctccctaatcgactcatcactgataatgtacttcttgcatttgaattggttcactatctcaaaaacaagaaatgaggtcaaatgggttatgcggcactaaaattagatatgagtaaagcttttaatagagtggaatggtactttctccaagcggttatgatcaagatgggctttgaaattagttgggtcaatctggttttaaagtgtgtttcatcagcgaagctttctttcaatctgaatggtgcggtcaaaggttctgttgttcctaaaagaagtcttcgttagggagacccgttatcaccatacttatttcttatctgttctgaaggacttttagctttattaaagaatgaggaaactttggggcatctaaatggattattaatagctagaggagcccttgctgtatgtcatcttctttttgttgatgatagtttcctattttgtcaaaaactgccaattcctttgttcaaccacataaatgtcaaatctaattatttaataattaaaattaattatcaaataatatattgtcatttatttattaataaaactaattaaagtttcctaattaataaatatgcccttcaaaatctctatttactgttttgcccttaataagtgataaattctcaaatagacacagtctaacttgagaattataattgattaattaaaatcaattaaatgagcct

SEQ ID NO: 233916 - DNA, 841 bp, Cannabis indica
aaaatatatattaaattataacaaaaaaagaaatactaacaaatataaacaaatataaagtgatgccatattactattattggtggtgttggtaggtacctaaacagcaattctttttatatatatatacatagaagccattacagagaagagaacagagtagtagtattagtcgtcttacatgtaacaatgttttccaccaatgaaatgccatctccatactcaattttcacagccatggcttccatcacagcttccataatgttcttccaatccatgatcaatcaaatcctaccaaaacaagtaacaaactacctcatctccatactccaacacctcttccaatctcactacccacacaccaccataactttcgtattcgaaaagggaagcgaatacggaacccgaaaccagatctacgacgctgcaagggtttacatcacaacactcaagcgaagccccgagaccaaaaggctcagagttcgcaaaagtcccaaagaaaaacctctcatcttccgtctagacgacggagagagagtgaccgattttttcgagggaatcgagctcgaatggagattcgttctccgagctgattcggataaagacacaatgaatggtggcggtggtggtggtgatggttacgagaaaagactttacgagctgagctttaacaaaaaacacgaggagaaggtttcaatggtttacattcctttcgttctggaaagagcgaaatgtattgaagaagagaataggtttttgaaaatgcacactcttaatattgggtttaatgggccttgtgttggtgtgaattggcaatctgttaatcttgaacacccagcaa

SEQ ID NO: 233917 - DNA, 751 bp, Cannabis indica
ctatgaagaattgttcagctttaaaaggtctttatcttggttttaataagttagcggggactataccaagatggattgaaagtcttccaacgctgcgttttcttgtccttcgttcaaacaatttcacaggtcatattccaaatgaactctgtaaactttctatgcttcaagtattggatgctagtgataatagtttgacggggaaaataccaaaatgtttcaacaatttaaccgctatgagttctaaatcacagaaaaattcatttcaatattatcttggcgtcaataatcaaagatctagggagaatgcaaatgtggttatcaaaggaagggaaaaccaatacaacaccatcttatacctcttaagtaccttcgatctatctaccaaaaaattatcaggagaaattccagaacaacttacatatctcgatgcattgcaatcattgaatttgtcgggaaattatttgagtgggagccttcctaaaaagattgacagtataatcgacttagaatctcttgatctctcaaggaaccatttgtctggccatattcctacaagtttgtcaagtttatcattcttgagtcacttgaacttgtcatacaacaacttgtcgggaaaaattccaataggcacgcaactgcaaagcatggatgcttctagctttattggcaacaaattgtgtggaccgctgctcctcaaaaagtgtatagaagatcctaacacaacacattcaaatgcaagtaatgaaga

SEQ ID NO: 233918 - DNA, 1098 bp, Cannabis indica
aatgacttaactaactaaatactttttttttaaaaaaaacacaaaagaattttttttttttgaaataattcattaattacttaaacatacattaatgattttaatatattgtgtaatcgttttaataaacattaagtttattaaaatttaaattgaaaaagaaacattaaaatattatttacatttattgatttagtcattaaataaaaaagttaattattttattgttctttttgcacttctaaaatctattttaaattatttttaattttgtttgtagcataatctctttcattgtcacatttggcttcatacaatattttagtgaaatggcttgatacaatattttgcattgatacaaaacatttctataaaaatacaaactactttatgctaaatacaaataataaaatattagaatagtatataattacaattatacccttttttattatccaatattactcaaatttagttgaaaatgacatgtttgacctcaaaaatgtgaatttatcatttttttcaatattaaattttaaattaacaaccagtttcctatcatataacttactaacatcaacctatagttattttgtcttatttgaggggtgtaatccttcaaaaagttagtgagggattacataattagccaatattaaaaactaaaacttcccactgatcttattttggtcaaatatccaataattgggccgggtgaatgtttgttttatgtgctgagattcaaaatatctttaaatatgaaaatggaattttagaccacaaattgaaatttctaatttgtttactttttagtgtggagtaaattatttttaaaaaatactttgtttttttcaaaaacattatatattttgtatattatatactgtgttaagttttcactgttatttcacggttaatttcagttccactattgttttaattgttttgttttattgttttatagttcacctaaaatttaatatttttgtgaaaacattgtttaaaaattaagttggtaaatattttttttatttaacattatattttttttttttgtaataaatcaggaaatttattaattaataaactcattcaaaa

SEQ ID NO: 233919 - DNA, 806 bp, Cannabis indica
atattttttatgaattagaagtgacttgcattttaccccccaaagacattaggagatagttaaataaatctttaattcaatttggttagccatggttgaagatttgtacaattaatgagtattaatggtctcaaaaagttggtttgttcttatcatatttattggtatttttctgcttaaatattatgtaaagtaggaggcatggaaggaaagatacctcttactaaaaagaatgtgtttatgtactatatcgttagtagaagaagaatacaagagcatcacttaagtttctaatgttaatataagatttatatcatgataggctcttaaatttgttgtagttttgcaagatgattcctaattattgatggtagatttcaacgcaatagggaaactctcttctatcaacttaaggaagaaattcatttttttttttctttccacttatccaaccaaaaatcctttaataaaaaggggataaaggattggtcagagttacaacatggagctacgcctagataagaaaccaattaataaagaattaacgagcagagcactacttgacttaaaacatagtatgaattgaatccttaaattgttgcttcaagctttttgtattttctttacaaatagtgtaacaattatttatctcacttatatgaaagaaaggcatacaataaaataacttttaatttatttaaaattataatgactgttttaaaaaaattacaatgtatacaatcatttaaaaaatttgaactaaaaaattattcagcccaaataaaaatataccaaaacaatttttt

SEQ ID NO: 233920 - DNA, 822 bp, Cannabis indica
caaccagacttcgggcggtcatggacaaactagtgtcacctttccaagctgctttcatacccagtagatggattgcggagtcctccattctcacccaggagcttgttcagactatgaaaaagaacaagggtagtggaggtttgatggctctaaagcttgatatgcataagatatatgatagaatggagtggtgcttcattaagagagttatggaggccaacgatttcgatagccaggtgcgcaatctgataatgacatgtatcaaaatagtgtcttactcggttattatcaatggtgttccacagaagaaaatctttcctaacaggggtctacagtagggagatcccctatcagtaccttttattttccttctttgccatgatgtcttatcaaagttgattactaaacgataagaaatgggagatataaaggaaatcaagattttgaggagtgccccccggtaagccacctaatgtttgtagatgacaccattttgtttgcaagagcagatgacaaaaatgccacaatttttatggactgccttaagatttatgaggcatggtcgggtcagaagtgcagtaaggtaaagtccactgtgctattttctaacaacctggaccgaagtaagagagaaaacattctaaggctcttagaggttgaagaaagtacgggtcaagaacttcatctaagaaatccttttgtcttcaaacgaaggaaaaaagaagactattggcgactcaaagaaaaggtgctaaagagacttgaaggatggaaagttaagaatttgtctttcgcagggagaacaaccttggtgaagtcagt

SEQ ID NO: 233921 - DNA, 969 bp, Cannabis indica
agcgcttttaaaacacgagctagtaagcaatcgggattggtgaggatcttccacccttgtttggctaagagggctttattaaagtcctccaagtttcgaaatcccattcctccatgttcttttaagttacacattttgtcccaactaccccaatgaatcttatgtttgttggagttggctccccaccagaaacgagcaatcaaactttctatatcatggataatacctttagtaatccgaaaacaactcattacatagcatggaagagcttgaatcacagctttgataagaatttctttccccgcttgagagaagaggccgactttccacccttgaagtttagcttctatcttctctcttatttttccaaacacctgttgcttgttttttcccataaaagttggcattccaaggtatttcgtatggctttttaccaaggaaacacccaaacttgtggctaaattggtagccaaattgtctccaaccttacatcccacacacatctctgttttctcaaggtttatacattgtccggataaggctgcataagtctcaagaattgttttcaaagtataaccttcacttaaagttgcatccaggaaataacgctatcatccgcgaagagaagtgggataatttttgctccatagacccgaatctaagaccatgtagtctaccagcccgttcagcctcaaatattaaacaagaaagcccctcagaacacaataggaaaaggaaaggagataagggatcaccttggcgaagacctctttcggggaagaattttcctttgatagagccattgatgaggatagaaaaagaaaccgatttgatgcaattcataatcttcattatttatctatgatcataacccaaacaaaccatcatagcttccaaaaagtcccattccaccctatcataggcctttgacatatcaagttttactgccatttttttccattaccaaac

SEQ ID NO: 233922 - DNA, 888 bp, Cannabis indica
aaacattagaatcccactaaaatactaaaactcaaacattaaaaacagacacaataaaatttgaaccaagaacttaacacacatatcagaataaaaattaaaccataattgaggatttatattactatttttcgaatttcggtatttattatcaataaatttaatattttaagtatttatatcacaaatttttcaataataaaattcaaattttaatataaatttattaagtaattattattaattaaaacaaacaacttattttttataaataattttaaagtattttatatatgcccgcaaagcatggatgttcactagttcatatatatgggtaaaaagaagccgacatgtatctttctggtcacttaaatggtgtgaatagttaattaactaaaataattgaaagttgattaatgggtggggtcaattagataaataaatttttaaataatccaacaaataataaattactgcaaaaaagagatcgctataatctcagaaagaagcttctcttaacccttaacaaactctgatcacttgttcttgtagaactacaattattcttccatgcatctttttatattagtatttcatcactgatttgattgttcctaaaaatttagccgaaagaaattccatgagtgatacatacattaatatttaaggaaaaaacacctaattaaagatggccaataatcctccaaagcgtaaaaaagaagacctaattaaaaaattgtttagtttcctttcataatttactgtttccttaattacaggaaaagtcaaaggtatattatcagtaagaaattcccttttcttttgcaacaattattggtgctattataatggttgtatgtaatttgtttgtttgtttgctgtggtttt

SEQ ID NO: 233923 - DNA, 873 bp, Cannabis indica
ttgaataaaatagattacattgaaacggagttttatttagggcataaaacccaacaaataccccatggagaggaccgccataggtggaaggcaaaattacaagataggaaaagatgctccatagtttcagcttccgtaccacacaggcgaaagctctcatcctcaataggaaatctcctacctattaccgagcgaatcggaagagctttagatagaatacaccaccaaagaaccttgagtttctcagggcttttactattccacagcttattccacatggagggggccacctctcctggactcactctatcctcagccagggctctataggctgatttgtaggagaaacggccattattttccaaagtccagaaccagctgtccttgccagagccggtaggactacctcctttgaggatagcagaaacagtttcacgatcaaattaactattaagtttttggatgctccatccgccattagtctaaaataactcagcaacctttgactccctattcagcgcccgcccaattggcgtgggagtaaatccttttaggtgcgcaatccaagggtcagaccagatgttcgtctcctgaccatcagccacacgcttacaagcaccctttcgaataatagttttggacttagtcacatttttccaaaaccacgagtctgaagccttcggttcacaatctagaaaggacttacccttcaggtatttggcttcaaggatacgacagcataaagattgattacctgttaggaggttccacccccatttagcaaggaaagcctgattcatttctttagatttccggaatcctaagcctcctaaagacttgggaaggcaaagtttatcccaggcttttaggtac

SEQ ID NO: 233924 - DNA, 1566 bp, Cannabis indica
tcactttgtatatttttgattgcttgtatgaatagttatattatctatccatttagtactttcctatcttgcgcgaaccgttaatattcggctttgtaagcaagttataactttttaattttcctttctcgtcagacaggtttaaaccaaaaagttatggtagtttgatccctttctcgtcagaaaggtttgatttgatccctttctcgttagaaaggtttgatgaaaaactttaaaaaaaaatttaaagttatggttttgcattatactatgtattttcagatgaattctggttaatcatacataaatgccccttaagtaattttaaagagtaaagctttgtaattacataaataatagaaattattatctttattcataactgaggttaaattttacatcaacaatgtgcgttacatcatttattaactggtaataaggtcacaaatgttccatgttccagtagttctttattagcgagccattgagtcgagccaatttgtaggctccaattccaactgctgcttcaattacatatggaccctcccagttcggggtgaacactcctgtagatgcatctctcgtgtttgcaaatactcaccttagcaccaagtctccaacattaaatagtgttttctttagttttttgttgaaatatcttgtaactcgatgttgatacgctgcattattgacttgcgactcagttcatttttcatcatgtagatccaggtataactttaaaagctcctggttttcttcttgattataaaactgtcgcctgtgagtcgatatgttcacttcaacaggtagcattgcttctgagccaaatgctagcgagaagggagtgtgtcccgttgccgtcttctcggtagttttgtgagcccaaagtacttgagataactcgtcgacccacctacctttggcaacgtctaacttcttcttgatagtatcgttcaaggttttattaatagcttccacttgtccattcgcctgaggcctggatactgacgagaagctcttaattattttgttcttctcgcagaactcagtgaacaagtcaccatcaaactgggttccgttatcgaatactatcttcatcggaattccaaacctacatacaatgttcttgaagtcgaggactttcttgcaggttatggaaacaagaggctcggcctcaatccatttagtgaagaagtcaattgctactaccgcgtacttggctcctcctcgcccagtgggtaatggaccaattagattaatcccccatatagcaaatgggtaaggtaaggtcatcatccttagttctattggtggcacacgaggtatatgtgaaaacctttgacacttattcaattttttgacaaactcatgggtgtccttattgatcgttggctagtaatatccttgcctaatgatctttttagataggctctaccaacctagatgatccccacaaaagccttcatgaatttctttgatgatttcgtttgcttttgtagggagaacacagcaaagtagaggcatcaaatacctattctgtatggtttgccttcaattattgtttac

SEQ ID NO: 233925 - DNA, 1695 bp, Cannabis indica
tgattactaatcagatgtaaagagttttatttagggtataaaacccaacactgagttactggtcctaaggcaaaaagcgactgatcccgaggccgaactggctgcccaaaaagaacagaatcaaaggatgcaataaataatggttgccatgcaaatggccatggaaacaacttgaatccacgtgcatcccaaagctctacccgcaagactagaggaaatgctagaggagtcctcgccaagcacccaaaggcctaaaactaggaggccaagccccatatgatatccttccgaggaagaccctaagaaaaatccctcttcgatcctcgagagaaacaaaaacgctcaagatccacaaaacgtccgcttagatttcccaagagggaaaggtccacagaggggcaagcttccttaagagagtcttggccctcaggaccaagaggaccgaaagagcgtgtttgtgcaccaggagcccggggaaagagaaagaaaaggtcggcatcctccgattgatttaaggcaaaaaaattaacgagaaacatggtgacttgagaaaccatctcaaaaagaagaagcacgcggtactaatatcaggtgatgccttaaataagggaatcttagcagaattggcgatcctccgcaaagacattgctagagtctcccagagacaaaaaggggatgactcagactctaattgcaaggaccgtgagccttgtgcccaaaacatcttagaggcagaactccctaaaaatttcaaaatgcccgaaatggaaacctacacaggagactcagacccagtgaccatctgtcccgatttaacagggtaatgaccgtcatgagggtccgtaatgacgcaaagtgtctatgctttcccttaacactgagcagatcttccaaagaacggtttaaaaaattggagccaggatcggcggactgtttgaacaagttacgagtgagtttccgatggtagtttgttgcagcaagaaagatcaaccttgaggtcaataccctaaccaacataaaacaactgcatgtggagaccctaaagaaattcataaagagattcaaggaggaggcctcgaaaaccaagaaggtggacgacggacaacagttggccttgcttcaggctgggatccgtacgggaaccccgtttttgaatgaattgtagcaggaaggagcagcctgcctccaagacttttagaggaaagtctaaaaatacattaatctggaagaagcccagatagtggcttactgagggtattacccgacaggagtatcgggatatgcagcaggagctccacctcctgccactccccaaacgagtggaatacagttctctgctaccctagggtacaacaagagcatcgccttaactccagcgttttcgcattttggtgtgcctgtaagaaacccctctggggtaagcgtccaactttcgtcccaatcggcagtagctactagtatggtcggagcccaataaagctcctagagcaagagatcttctaaaggtagcatgcggactaaggacaaaaggaacgacatcggtcacaccacaatcgagtgtaaaaacttgaaggacgaaattgaaaacctaattcgattgggtcatttgtacgagtggatgaagaacaggctgtcacacttaaacccagcccaagcgagaggccccttacctcaaggagccgagggtatgctcga

SEQ ID NO: 233926 - DNA, 1045 bp, Cannabis indica
aaaaataacattaatctggaagaaacccagatagtggattacagagggtattacccgacaggagtatcgagatatgcgccaggagctccacctcctgccactccccaaacgagcggaatacagttctctgctaccccaacgtacaaccagagcctcgccttaactctagcgttgtcgcattttaatgtgcctgtaagaaacccctctggggtaagcgtccaactttcgtcccaatccgcaccagctactagtatggccggagcccaacaaagctcctagagcaagagatcttctaaaggtagcacgtggactaaggagaaaaggtagcgaagggggtataccccacaataccacacagtacactgaattaacagattctcaggaacgtgtgactttgccacccggcaaaatacgcattaccggaagcctccacccttgtataaggatagctcctagagagaccccaacaaaagattcaactatcacaacgacagcggtcacaccacaatcgagtgtaaaaacgtgaaggacgaaattgaaaacctaattcgattgggtcatttgtacgagtggatcaagaacaggctgtcgcacttaaacccagcccaagtgagaggccccttacatcaaggaggagccgggggtatgctcgagggaaaagtacctccgagaggggtaactccttagcagacgcccggactgccaccccggccaatgggagagtcgccatgatctctggcgagcctcacattggaggaaccaccaagaatgaattgaagcgctacgctgggggcctaaagcatgacgaagaggtatgggaggtcactcaactcccaactcagaggcccaggctcatggatcaacccattactttcacggaggaagatacgaagccaatgcatttccctcaccatgaccccctagtcataaaaactcccattgccaataaggtagtggctaggatactgatggataatggaagcttcatgaatctgttgtttaaagatgctttcacggccattgggctcacggatagggacctttt

SEQ ID NO: 233927 - DNA, 856 bp, Cannabis indica
aattttacaaatgtagattagtggagatcaccataacttgaacaaggtataaacacgtttgtcaaaaaacttatttccctctacctctagcactaagggaactctcataaaaatagcattagaattatcaagcctttaggtttctttttgatagaaatttcattatctctatatgaacatattagacacatatttataatatttaggatcacacactttaaaattcaacaccctacaccccatgcttgttaccatctcttaattaggtgtaaataagattaaatatgggatttagaggttatgtgagttgttagaaagcaacctcattgtcaaaaaaatgttgaagtaataaaacaaaaaaaaaaactattaactagttactaaattttttaatttttgtaaataactttctaaagtatttcaaagcattcccatttgatcttatatcacatatacacattataaataataaaaataaatctccaatagttatagtttcattatgattttgaattttaaatgattaagttgtgtaatctctctttgcataattaattgatgataatataaaagttacaaaatgtaagtaatttcaccttttatgttacaaatatttatctttaattactttgttacgttttatatttaatatatatattatattatttaacaaaataatataacaaaaagtagaccaaaatgaataataagattcaaatttaacattatctccccactcaaacaatgacataatatttaattgtgacgaaacactactacaatgttagcctttagagacagttttttcaatctcatttataaaaagggaagctaaagggtgtgaaaatacccgcta

SEQ ID NO: 233928 - DNA, 1651 bp, Cannabis indica
tttcagtcatgtctactatgccatatctccttattgctttactagcacttgaaaaattgaatggtgaaaatttcataaaatgaaaatctaatctgaatttgatgctgatttgtgagaaccacaaatttgtcctaactgaggagcgtcctgaggagcccagtgccaatgcctcgaaaaatgtacgggacaaatatgactcttagattcagtacaatagcaaggccaaaatacttcatgcttgtaaccatggacgatattctgcataatacgcatgaacaaatggagaatgcattagaaataataaattttctacaagccatgttcgggtaacagtctaataaaacaagaaatgatactacttgtggccctagtggccctagccttggccttcccttttcccttaacgcctttcgtcttggcaacagtcttggaaatcttatcactcaaagatttcaaaatctttgcttctagtgtttttgcaaacatgacaatcagatggttagcaagaaactttcaaagcagcaaagtcaaaccaaaattagcacatgacaacatattttaatagtgtgtgtgtgggcacaacaagtcattgagcagctatatggttccccatgggaaaataatattacatcctcctggccaatgaagctaccatattctctaaagttagggaaagatattgttgcaaaaagttccactctaacaatatgtggagatgactctggaaaactgggactcctaatactttcatctaccctgtctatgatgtcttcatggggtatttaagatgatctatgtttaaaaaataactattgaatcccccttggtccatccggggcaccttcttccaggtacattgcaacaaaccactcaaaaatctcctcctcctccatcaaggggttatgatggcagggcacccaatctgcttctaggagcatatcttccttagcagcatcagtgatgattttagccaagtcaagagctattatctcctttggaagcctgactttggcccctgccactcacgttgtcaatgctttggaaatcggtgattagctcgtgttcacgaagcaacttcgtggtgaccaagccttcaactctcaactttgttttggtgaagggcttgtattgggctgtatttttctttatttccttggcttcgggactccgaggtacaggctcttctagaaataagaattataaaagcccaattaacacttaaactagaaaatattttgaaagaaggaaagacaacaatgaaaatatttacttgggatttaaaagcttaaatggaaggtaggcaccctcttcactgggaagctagtggaaaagaaccaacactcttcactgggaaggtaggcaccctcttcactgggcttttataattcttctagaaataagaattataaaagtccaattagcacttaaactagaaaatattttgaaagaaggaaagacaacaatgaaaatatttacctaggattttaaagcttaaggaaggtaggcaccctcttcactgggaagctagtggaaaagaaccaacactctaggaggtcatgggagcataaggtgaagttggtgggcaatgtgcattcgagtacctttctaacttgtgtgaaacccgatattcttgcaattgatgcgcataggt

SEQ ID NO: 233929 - DNA, 2159 bp, Cannabis indica
aagcttcatggatgcttattcggggtacaatcagatcaaaatgcatccaccagaccaagaacatacatgtttccgaacaaatatgggtctatattgctataaagtaatgtcgttcggtctaaaaatgctagagcaacataccaaagattggtaaacaaaatgtttaaagaccagatcaggcgaaatgtggaagtgtatgtggatgacatgctcgtcaaatccaggaaggtttgggggcacatagacgatctggacgaatgcttcaaagtcctcaagaagtacaacatgaaactaaatcccttaaagtggtcctttggagtcagctcgagaaagtttctgggtttcattattaatgaccgacgaatcaaagccaatccagagaagattcaagtcctcctggatatgaaattgccaactaaaactaaggaagtgaaaagtttgactggtcgaatcgccgcactcagcagattttcttcaaaataaccagacaagtgtgtcacattcttcaacatcctgcgaggaaacaagcaattcgagtggacggaggagtgtgaaaaagctttccaacagctaaaagcacaactcgcaacgcaaaacctcccatactcccaaaacctcgagacggagaagaacttgggatatacttagctgtcacggagcatgctgtaagtgccatgttgattagagaagaaaacaacatacaacacccggtctattacatcagtaaaagactcattgaggtcgaaggccagtatccattgatagagaaactcgcttactgccttattctagcaataagaaagttaagaccctattttcaatctcatcctgtttaggtgtacactgaccaaccattacgccaaatattgcaaaattcggacgcctctggacggctactcaagtgggcagcggagttgggtcagtccaaaattactttccaaccccgaacaacaatcaaaggccaagccttagcggactttgtggtagaatgcacaggcaaagaagaaagcataccagaaagcaaccccgagccggtacaaatacctcagccaagtaacaatgaagacaacccgacttggaaactacacgtggacgggtcggctacagatcagttatctggtgcaggaattgcccttgtcacgcctggagggcaacacctgcacgctgcagtcaagtttggattcaaggcatctaataacaaagctgagtattaagctctaatcgctggcctaaagttagcccgggagatgaaagccgaacacattgaaatctacagtgattcctagctggtggtaaatcatgtatccggagaatatgaggctcggggagaaaagatgatagcatatctgagaaaaatgcatgacttgctcgcacaattcaaaagctacggtctcagacaaattccaaggaaagaaaacacaactgcagacgcgttggctcgattggcaagcagaaatgtaagtgataaggcaaacttggttcctgtccagttcctcaaagagcctagcatcactggcacagaagagatcgaattgattgatacttccccaaactggataacaccgatagccgcctacctcaatactagggaactccgagataatcggaatgaagctcgaaagattagaaggaaggctgcacggtatatcatagtagagggaattatgtacagaaaaggattctctatgtcgttgctcagatgtgttactcaagaagaagctgcacgactcccatctgaggagcatgacagattctgtggaaatcatgctacctggtagagttaatctaagaaaattctaaggcaaggttatttctggctaacgatgattgaagattcaaagacctatgttaagaaatgtgacaaatgccagagattttcaaagatacatcgagctccgcccatcgagttaactcagatgcaaagttcgtggcccttttccatttggggaattgaccaaataggacaattacccaaaggaaaaggacgagtgcagtaagcaatgatagcattgttgggattttatgccctaaataaaacccattacaatctaatatgatttgttatcaataaaagattagaagtaatttttgtttacatattgttttcatgtttattgtttaatatatatatatatccaaaatctgttaagtccagaaca

SEQ ID NO: 233930 - DNA, 2169 bp, Cannabis indica
ctaagaacctggtaaaaaaaattccaacacgcgaccctcacaatgttttgaactcccccaagggaaaaatccataggggaatgcatttcctcaaaggaaacacataccctaggagagtagggaacatcgaagcatgtttgtacatcagggacaaaaggtaaaaggtggtcaaagaaagagagacccactagtggacttgagagaaataaataatgcaaaaaaaaaggagagattagagctcgcatcaactcctaaaagaacgactcaggaaatgccaaggaaattttaattgagggaatcttggaagagttagccattttcaggaaagatttcgctaaagtgccttgaagatagaaaagagatgattttgaatctaattgtgaggatcgtgagctatgtgctaggaatatcctagaggctgaactctgtaaaatctttaagatacaagaaatgacacagataacgggggacatggaccctaggaaccatttttcatggttcaatagtgttatgatagttttaagactgagtaatgatgcaaagtgtttgtgcttcccgttaatcttgggaggatcagaagagtggttcaagaagttagacccaggtttcgtgagttggtggagtaagttgcaaactaacttccagaggcattttttggatgccaacaaaataaaccttgaagttagtgctttgaccaacatcaagtagttgcccatggagactttgaaaacttttataaagagattcaaggaagaaacatccaaaactaagaaagtaaatgatgtaaagcagttggcattactgaaagccgacagtagagtggggcccttttagaacgagcttcaataagaaggtgcaacctgcttgtaacatttccaaaagctaacccacaaatacattaaccttgaagaagcatagatcatgcatttggtggatattacccaatcaaagggttgaattacacttacatggtacaacattctagaggggtacttaacgaatcttcaacaccacctggaggggtgcctgccccaagtgtatagttcctagtctccatagcttactcacaaaaccaagctggaatggtagcttaatctgagtatggagctcccatgacagtaaggaagcaccaagagcctttgttcaacacctgcctcccataacgtctccatccatgagcactgcaccaacacaccacaatgcacaaagtaaaagacctacaaagaaaaatacccaaatcatttccattattttgggaagactattcttggccacaggaagagcattaatagatgtacaaaatggggaattaacgttgcgagttcaagattaagagacgagtttcaatgtatttgctccaattgacattcctacctgttataataagtgaatgattatcgagaagtaactgtcaagaagaagaaaggaaagcccgaagaatgatttcaaactgttcgacgtcatataaaaacactgatgtttgggaattgtgaaggtaaatttagtcttatggataacttcaatattagcaacattggaggatattattcttcatttggtacgagggtcgttatggatgcaagaggtgaaaattatcgaagttaaagtttttaagaggaactcggcgtctggctatattacattaacaatagtactcctgggatgcaccacaggtaagttctattctctagtctttagtgtcacattggggacaatgcgataataaattttagggggtgaatttaatttttttttgttttgtgttttaattgtgtgtccttaaattttgtgtcagtgtcataagtaagccttagtgaactgaaatacaatttgttgtatttattagataacttgttcatgttgcgtgcttgatttgattgtttttggtgcttaactttggtatttgttggaaaaaattgaatatgattggtaaatgtgattatttatactttatgatacatgtttgcttggctagaggatcgataagttggactggatagaacttgcatgtaacgccctgtctaacaggggcgacacgtgtgtgtttttataaagttcttatttacatactatatataattataccaaaagtgtgggtaatttaatttttgataattaaaaacaaacatataaaaaaaaaatttatgataaaagataagtaatattaac

SEQ ID NO: 233931 - DNA, 1605 bp, Cannabis indica
ttggacatccacataattattaatatttataacaaaaattaaattttatattttttgttacaattatttataaaataaaatttaaccaaacaaaaataaaattaaatggaacaaaaagaggtagatgcacgtgctatctcacctagtatcataaaatattctaaaaaaaaaaccatatttccacatacttttaccattttagtatccaaaaagaaaagaaaaatttgaaggtaaggagagtaatagtgtgagactactgagatagtttctccacaatcccctaacaatggcagcggttgccaccaatcggccccaaacgcaaccggagccaacttggaaactcgattgcctttctcagatagatattagctccctctcccagtcggaactccacgccctctccctctgctcctcctccgccttcgacctccactgcaccgacgacatcgtcgtccccaaaatcgaccctgccaccttcaacgaaagcgctggctctcgtcgccagacttactctcgtgctcgccgcttactgtcctctccgtcgtcgtcgccctccgtgcgcactgttgcttccgctgccaccggtcatcgtcgtcgagtcgctggacttgttccgactcctaaggtctcgcatatcctcgctgatgatcccgaacgacgcgagaaccgtttgatcatcgatcacctcaagcgtttcatctcgcaagaccctcaattcaactatgtcgagttctctcagccttcgtcgcagatgggaatggaaattgattccgatggtgggcgaggaatttcgatgttcgataatggattggcattgacgaattttggcggagagaggaagagaaagagaggcaggaagcccaaattgttgaaggtccaactggaaatgcaaaatgtggagcctcatagttatcgaagtctggagatggtgaacaggaatggcgtggcggttgatttttcggctttgggaaatgcggatgatccatacggagaggagttcagaaggagaacagtgggtttggagagcgaggaagcgcttctagggtttctcagagagttggatgggcaatggggaagtagaagaaagaagagaaagattgtggatgctagtgagtttggtgatgctttacccattggttggaaacttctgttgggcctcaagaggaaagagggtcgtgcttggatttattgccggagatacataaggtctgtttctttcctttacgtttttcatctcaaatttacttttcagcaactatgaaaatgagaacctgaaaacttacaactttcttcttgagaaaaaagggaattttgagataaacttttttgctatgtttcatgttagtgactgcctatttaagtgaagagatcacattgtcatggctttccattggtttgaaacttctttcattgtgttgaagctgttactcaaaacttgactaacataaagttgaatgaattgtcctattcatcatctcttgtatctatgaattgtttattttctgttgtttctcgttgcatttgatcttcaccggccttacttgttacttttggcacgctggtacttcgcagccctaatgggcaacaatttgtaagctgcaagga

SEQ ID NO: 233932 - DNA, 1172 bp, Cannabis indica
aatgcaaccatcaccaccaacactattatatttctcagattaaaatctaaaagtataaaaaaaaaatcaaaaacaaatttagaaaattcatccaccaagttgtgatctaaaaaataaatcgagggaggacaattgagatctctatggagaataactgagatctcgattttgtgggtcagtctgccattggagccgagaagaagggcaagggaacccagcccaaattcgacttgtcccagtccagatttgattggattcaagccagatctgaccgcttcttcgagaatcaacaacgacctgtaagaagaagataagatggtgagacaatctgagcgagaagaagaagaaaaaaagaagatatatatatatatatagagagagagagagagagattaaaagaaccaccaatgacagcagctattaaagaattaacattcaagataatagaattaaaaataatatttaaatgaggattattcacctagccaacaaccacagttgaattaaaattattactggcaaaagtaaactcaaatcggtgtgcaaacagtaaccccgttgtgagagcaaggagtttcaccacatgaacactaaaacccactccatccacacaacaccatcatggccacgaatcactccccccaacccttcaaactctttctgggccaccatagatgcaatatttgtggccaacaagaagttatcagcagccgccagcacccattttataggctgatggacacttggcgtgtgtcacttatggtatcggttattttctaataactgatggtataggggctttcatttccctccacaactaaaacaaaaaacaaaacatagctatagcaaatagatttattctataactacggcttttataacataaccgcttctaaatatcaattttcaataaacgaaaatatttggatgttttaacttctctttttattaatttgctatagcaaatagatttattctataactacggcttttataacataaccgcttctaaatatcaattttcaataaacgaaaatatttggatgttttaacttctctttttattaatttgctgaaaaaattacatctaaaggtttgtttggtaggagtgtgcctctaaaactaattgaaacatattcaatcaactatagctaatgatatttttcataaat

SEQ ID NO: 233933 - DNA, 687 bp, Cannabis indica
ggagataaatcaaagtagaacagagtaattaaaactagaaacaattaaagcaagaaaatagtaaaattaacaccctgatatatactagttcaaattctatagattgatgtgatttatgactataattcagttttagaacactactgtaatgcctttattgattaagcaagaacaatgacacattataatcgagatcgattctctcaaaatgtttatctctcatacttttactcaagaaacttcttcatacaaatctcaaaacctaatatctctcttttcattgtatctctctctctctcttcctctcaatctcaccctcgacctttgctcttaaaatcatcttatgtgttattcttctaatgatgaggatgacagtatttatagatctaggaaatgaatctcaaagtcagtggttgcaataactaagttgttaagtcagttacggcttaacagacttaacaaactctttgtaataagatctctacgtcagctctggcgagagctctctggatgagaagcacacttcctagaggaatgtcccaaataaatgaaatgtgttcctgggaggatgttccaaatagatacaaagctagttggagcagactatctggaatcccttcttggagggaacaactagtattctgtaaactcctttttagagaatgactagcttccttaaagactact

SEQ ID NO: 233934 - DNA, 1710 bp, Cannabis indica
aagaactattagaactagctagtagagatgaatcttggaggatgacttagagttccccaaatcttctagctgtcccaatcaccacactcggagaatgagcctgttaaaagcaagaatcatggttgaaatataccatgttagtggggttgtgaaggaaagtaggaatggaaaacaaattgatgtggaatgtaggtacgtataacactttgtgaatgatcaagtgtttgttaattttaacagtacctatgccatggacagggatgttagtgccattaggaagaagcacttgaaattgaaaaacatcattagtaaagttagaaaaacaagacttggtggagcacatgtgatgtgtgactccactatcaataatccatgacaaattttgatgtaaggatagatcactagccatgttagaagtcgcaagaacagtattggggtcatccttagttggtccttggctcaattgttggctgagtaaggagatgagctgctgacattgagaagaaaggtcaacaggagtggtgctgctggtattttctggtttggaactggcagtggctatgttggcagtagccttgcctttttcagacctctttttgtcaccataacctggtggaaacccatggaggaaatagcatttgtccacataatgtcctggtttaccacaattagtgcagcgggcctcggtttctttgatttaggattggtagtggaagaagatggacgaaccgaggatccaagagaggccaaatctgaagaaccaagtgttctttgtctctcttcttgaacaatcatagagaagatccgagagagattagggattggttcattaaggagaatttgggctctaaccgaggcataagattcattgagaccagttagaaattgctagacttgattttgattataataatcaagaaacaacttcatggcaccacaagaacaagtagcattgggttgaaattcttttagctcatcccaaattgatttgagcttcgtgaagtaagaggtgacggactgatcaccttgttgcaaacgggtgagttgtgtttgcaattgaaagattcgaggtccattaccctcattgaatctttcttgaagatcttgccacaaatctgtagcaagatcaaaatacatgatgctctaagctattccagaagagacagagtttatgagccaagacatcaccatgttattgcaacgattccaagagttaagaagaggattaccagatgcaggtcgaggaagagtgccatcaatgaaggcagatttattctttgctgtcaacgccattgttatgcctcttttccatgaccgaaaatttgtgccattgaggacagtggaaacgagaatgaggcctgggtggtctgctgaactgagaaagaatgggctggatatgtctttgtgagctagtcgatcaagaagggaccttcgagtgggttgatttgcgttgtcagcttgaggagtaggagatgattgcactggttcaggttcttcctcattgagagacctagatttggagcttggatttcgacgagaaacgactgggatgttggctgctggtgcggaagtggaatcgagaatggattccgattgattgtgctcagttgcaggtggagcaacaccatcctggaagcgtgtggagggccttgccattgaagagttggctaggatttctactgataccatatgagatacagaaagattaaa

SEQ ID NO: 233935 - DNA, 1310 bp, Cannabis indica
agggtcaaagtgtgacctttgaccacccaagttatggatattaaatatctgccacggcctagggctcgggtcgtgacacctttggttccaaattttcttaaaatcgaagttaaacgacctaaataactgaatcttaaaagaatttttatagtagtggaagaagacaatcaaatcgatcatcctaataataaataaaaaacgatgaattaaaggaaattaaggaacacataaaatgccaggaaaggagcctctcaaggaactgacccttttaagacgagactgaaaaggcagtctgatcaaaagacacctatgatccaatacaaaatgtgccattagtggagtaggagagttgacaattaagagaacgattggccgaatctaagcaatcgaccttcagattcctccttattcttcccctcatttaaataaaatgatggattttggatatttctttgttgctacgttagtactattttctcttaatgtggaagacttattgcatgtttgaaattttaaataaaaactgtttttattttaaaaatagaaaactatttcttgagaaaaattaggcgcgtttggctatttttcagaaaataatttttaaaaaataaagttacagagaacaattaggcgtgtgtggccatgattcagcccttctattattgagagacttttattttttcttagaaagttctgggctcactagcgaacaaaggtaagtctgccatttatggtgcttccttgaaggatgaggtttgggaaagattgactagaatgactagttttatgagaggatctccactttttaactatgtggggatgaaattagcaacatgtgtgtaacaaaggttgattgtcaatgctcggtagataagatgatgcagagacttcgtcttcagagctccagaaacttatcatttgctagaaggtgtgttctaataaactctgttctactctctttaaatctattggtcccaaatagtgatattaccaaagatagttattaaaagaatcaatcaattttaccgagctttcttatggaggggtaaagttgattataaggggcctatcgaagttgcttgggctgaaacttgtaagactaaaaaacatgtgggtcatggatttagagatgttggtttttggaacaaatgtgctatgggcaagtttttttgggcaatagagaaaaaaagaaagataacttgtcatgagttaaatagatcgattcacaatgtttacttgaaaggaaagaattagtggagctacaaaccttccacccctagcagctagtactggaataaaattttccacac

SEQ ID NO: 233936 - DNA, 580 bp, Cannabis indica
ttccacgactgtttaacaccacttactcaactataaactatcagcttacatttcaaaaaaggggagtatcaattgtaaaatttagctgttcagtttttaaataataataaaattaaataaatattatatttagcaattttcaaaaggataattagtagttttgcacttttaattttttatgctataagagacaacttaataatgtaaaaagtcaggagtcaaaaaatattaattatttttttcaaaataaaacactatattattacgtttaaagttaaaataataaagataatcgcacaagtaaaaaaatgtattttttcccatataagttagtttatagtctgttagtagccaatttgtcagcatcaatattaaaacatagttgtagttgatatgagaaaaaaaaaaatgtccgggaaaattaaataataaaattttaatatttgaaaaaataaccctaaatttgttgaagtagttcaacatcttcaatatattttaatcccacaaaaagaactactttacattattattattattattattatttctaacaatattacttaaaataaggttaaaacaa

SEQ ID NO: 233937 - DNA, 727 bp, Cannabis indica
ggttaattttgaaatttttagattattttatttattttaattagaagataagatattatatttttttattaaatttgaatgatcttacttttatattaaaatattttctttaaaaataatcttgttcaaatttcaaaatttgctaactatatctatttttttttttcaaatttgttattttctgaaatatatttttttaattaaaattataagattaggaatatgttagttttaacattttatcttattagacattttttattaaaattatattttggcaaaaataacatgaaattttaaaaattggttagtttaaggtttgaatagaaattttagggtttcaaaccataaatttttcaaacttattttattttattatttttaataaaattggaaatattctaaccatataaaaatatcttatttttcaaatagtttattttgtaatatttaaatttattaaattataagacttagaatataatattaggaatatctaaatttaaaattcaagatattatattatattatcttattagaaatttaaataatttaaatttttgaataaacttgaaatttgaaaaattggttagatattttttgaatttagttagaatttagggaatttaggagtttgttaggtttttgaatttcttacaaatattctctaccaacataaatttaaattctagtcaagatattttttttaaaattttgaattttgaat

SEQ ID NO: 233938 - DNA, 866 bp, Cannabis indica
agttgaattcttgtaaaagaaaaaaaaagaaaaactaaacaactaaagcaagcaaaaaataaaaagaaccaaacccccaaataccactacaaccaaatatcccatacaacagacaatccccagagtaaaattcaagctaaactcaacagtttattaaacacaaatctacacccccaaatcaccaaatctaataaaataacaacaacagaaaataagagtgatcaaaagtgtaatcatagagcattattgtgcgtacatagtattaatagaagacactactatgaaggggtaaatagatttatgcagatagggaacagcaacagaaacataagaagcaataatattaggttcccaagtacaagcagtttaagtaatttacctcattataactttgtcagctggccaagcaataacatttccaacgctttcttcaatacaagttaatcctgaagtaggcctccatagaaatgcattaggttcccttacaaaatcaacaccaaccttcatggcaaatggtccaagaggaacaccaagaactgaatcttgtggatcatctgaaatgaaatatccaacagcaacaatattcccagaaccagtccaatccaaaaggtcgcacttttggccttgaattccaacatcaccctataattatccaaatattacaatagtttggcaacaataaatcaacttagaaatatataaataaatgataatactaaaatcttacccgtgtaggacgattatgtgcattggactgctctccgctcaagttagaatgagactaaacatcacaaacaaaagtttagatacaataagttagaatgggacaacaaaaatcaacccattaatcaattctcagcaccaaa

SEQ ID NO: 233939 - DNA, 1859 bp, Cannabis indica
ctgccttctctgtcctaactgacaacctagggacaatctacatggaaaccaagtctatggtcccgtacaaaaaacctgctcccatgaagaaggacgtaagtaagagagacatgtccaagttttgccgttttcatggagattatggccacgacacgaatgagtgcaataatttgaagcgggaaattgaattcttaatcagagagaataacctgcacttacagaagtacgtcaaggccgatcataatcaacgagccacccaagtagacaataatcaagacctactaatgcctccaccagtggacgggcatttataagtcattattgggggtccacacatttctggagactcgggcaaagctcgggagaggtatgcctgaactttatagaatgaacaaaaggaagtaattttggtcgtagaggacagaaagccaaaaatgccacgggtaggagaacccactataacattcactaaagaagatgttgtccacgttcgcttctcgcacaacgattccttggtcgtggaagtacagatagcaaataaaatagtagcccagaccatgatagataatggagcctctacaaatattttgttcaagacaccatatgagaaaatgggactctaactcaaagatctaatcccctgtacccaatcggtgtatggtttctccgactagattgttgcacctttggagaaaattggactaccgctcactgttggacaagctctaaagagcataactttgatggcacaatttttgataatttatgttccattagcttttaacgtcatgttaggccgaccgactttatatgacctaaaagctgtcacatcaattttctattcatgcatcaagttcccaacaatgaatggggtagggtgcctaaaagggaatcaacaagttgcacgggagtgctataaccttgccctgactaaggccaaaaaggaaaattcctctagctagagttcagacaatgggaaaagtattgcccaataggaagtcgcccaaggcggggacgaggatgtggatccccgatttggggaactaaatcaaatgttgggccagtagaagaattggaagagatagaaatcaacccaaatgtcctgaccaggaaactcaaaattggcaaaggtttgttgcttgaagtaaaattagctctaataaaatttctaagagcgaacctagacattttttcctggtcgcatgaggacatggtcagtatcgattcttctataatatctcacgccctaaacattgatccgaacttccgttgcgttcaacaaaaaagaagattattagacaaagaactggcacaagcattaaaagaagaggtagaaaagctacgcaacaacaagttcatcattgaagctttctatccagcttgggtagctaaccccgtactcgtacccaagcccaataaaaaatagtgagtatgttttgattttatcgatctcaacaaggcgtgctccaaagactgttgtccacttctaagaatagatcagcttgtggatgcaatagctgggcacgagattttaagctttatggatgcctattcaggatacaatcaaatcaggatgcatccaccagaccaaaaacataaaattttctgaacaaatatgggtttgtactgctacaaagtcatgccatttggtctaaaggttgatggagctacctaccaaaggttggtgaatcaaatgtttaaagaccagatcggacgaaacatggaagtatacatggatgacatgctcgtcaaatctgggaaggctgggggcacatatatgacatggaagaatgcttcaaaatcctcagaaaatacaatacgaaactcaatcccttaaagtgctcctttagagtcagctc

SEQ ID NO: 233940 - DNA, 1851 bp, Cannabis indica
ttcgcggctctgcccgaagtgtgcacggtagttagcaaccacgacgtccccaggataaaacaacatctgtatatgtactatatgttctgcaccgaactatatcgctctattacaccttaaattttgctatgagaaaatcgtaaggaagaaagaaatttttttgatattgaaaaggatgcacctcacccgctagcccagctcgaatcggtcggatagcggcggcgcgcgcgcgtggtggtctagtgtgtgagtcttcacccatgcgcgtaaaattggatacctcttgaggcccatacccaattctcaaacatgcactatatatacacttctaataataaagtgtttctatctcatgtggaactccaatcattcacacatttcacttttcattttgatacaatttcacaaaagttctaacacattttataaggaacgcttcgtaattagttagtgatattatctaaacgtaaattttttaagttatataaaactcaatacttaattagtaattataccaataataatatgacaccgagaaaaataatacacactaataatactttttaataattatctaattaataacattcaaaatgtactaggacttgtggttagctagatgtaccacattttaaagatgatgaggtaagagaacacgtcatccttactccttagcaacgaatatccttagtataattatacgtataccatacgattcaatggtgctaattaatgtggtttagtaactaataaatgagattatttatattgcatttgcatgcaaacgtatacagagaatattaaggaatttatattttttatattttttaattataagatcatctcgaatggatagtatatattttaagttaaatttaacctaaattataacacaaaattatatttgaccaaatttttatatttgtgctacaatgtataaggtgcaaattaactataaaaattaataataccattaatactcattaaaaatatacaaacaattgacacatgctatcttttgtgccaaattcagcacaatttttagctttggctaaatttgacacacattttacatcaccattggagttaacttttagctaaacattctaaaaaaataacaatatactatatttatagctctccattagaaatgctctaagtttgtaaaaatatggtattgtttttttttaaaaattatttaattgaaaattttcagaaaaaaaaaatattaaaaaaatatgaaaaaacagtataattatctggttactcacttatagtaattagttactctcaagttaccatgaggataattatccttacttcatttttccatatttgtcaactttttcttcaattttctctttaaataatttttttgaaaaaaaaaatcatattttttttgcacaaaaagtataaaaattaataaaatttgtaatttcctctataataaatgaagtatttatatattgtgcactcttaatggctattactcatgaatgagtattattagaaaaattaaatttatatgtttaattttgttatctaattaaaaaaaaatctttcatttttatattgattttggacattaaaaaaagttgagtttgagttagtgggataaaaatataaacatattttcgatagtgtaaaaagagattatttttaattaaatagtaaaattaagcacaaaaactttaatttttattctgttacggtcattagattaaaatctcatttttaaaaattaatatattcaaaattaatatttaattatagttatttttataaaagttcatatcaatgggtaatacccattaaaaaactaatctaatacataaatatatatatatatat

SEQ ID NO: 233941 - DNA, 938 bp, Cannabis indica
aactcaaaaaaaaaaaaaaatcacgagcccatgtaactgttggaaaatcttttaccagtgtcttaatttactactcatgtatgttggattataactaatctaacaccctaatatagaaaatattaagaaatccttacattgggtacatcaaaatattatgtctcattccgttcagatctctaacccttgattcctgtttatagcagaatattatcaaaatttgaaaatggatcttctcctccttcgattgtgttcatcacaatcttccacgaaggcttgagtatcaacttgaatagtatgggttgatactcaaaacacatttggaacaaatatttagagaatttaatgactttcaaaaataataaagaagagatatagttgtctcacattgaaaacttaggttggatttttcttctcatcactttctttatataggcattcacatagggctaggtttacaatgagatgagttgaaatagaagacttgggctcaaatcaatcctctacccgaaaacactaagggcgcgtttggaaagccacctgggaattggaattggatgtaattggaggtaattacacagtttgacgtgtttgtgtggccacgtaattacatagtaactgtgtaattagaggtaattgggaggcctcaattactctctccaattctcatacccccatgagaattgggtgtaattacactgtgtaattacataccaaaaataaattcaaattattttaattaattgatatgatattttaattatttttaatgtattgacttttcctttttctatcaatcatcaaaaaataaggttggattgtattagcatgttgtgtacttcacaactttattcgcaagtggaattgggatgatgaatttttcgaagaggacatggaaaatgaaataggaaattgtgaaagtttgaacaatattgatt

SEQ ID NO: 233942 - DNA, 828 bp, Cannabis indica
cttaagtacataataataaatttcaccaaataaaatcatatatacttgaaagcatgacttaagaatacatcaaaacaagtctacataatgactcagtaaaccaaacctgagagtttgaagaagcaaagttccatttcttaaaacagtttatttgataagtttgatcatgttagtatacttatactaacctattaagagaggataactctcaatctgacaaattatataacacgtatatataatgacgcatcactaatatactgattagctcaacacgtagcaaaatatgagataaaatcaaacatttatcttcaaatactttaaaaactctactaatagatatttagaaattataaaaaaattgataatatgaaaaatcaaaaatttagtattgtaacacgtatttaatgagtaaactaaatatagataaattaacaagtagttgtatatttttaaattttttatctatatttttttcgctttttctttttgggaaaaattatcatacatgcatcagtccaagaaattcaaaagtaaaaaacttaaattgaaatatgtgtaaaggtagataaatttcatcaaaatagtaagtggctgtaaattttatttatgaaaaaaaattgaaaaaatagaaataaattaggcatctcacatttatatatacagatagagagaaaaagaggtaaaaaaattagggatttgaaaaaaaaaattgagaaatacaaataaaaaaaattagggattttacatttttatatacagatagagagaaagaaaggtaaaagaattagggattttgaaatcaataaacatacctggtattaacat

SEQ ID NO: 233943 - DNA, 1341 bp, Cannabis indica
cataacaaaaataaaaactaaaactataactaagtacacgtgcaatgtatgtaacagtaacctagtatataaaaaatatatatgtatacatattgttatgattatatgtttagggtacttccaacaataactttttatcctaagcattaaaattaggaaaatatttaaattatacagtttgtaacatataaccttacatactgattttttagtggtagaaacctccaaacctcccttctattttgctatttcttatttcatttaaagggccctcttaatggtatgtacgcgtgacagatttttagtagtctacataatattaattatttaagtattatagaaataataaaagttatttaaaaattaagaaaaggtcatataaaatttaaatttaaaataaataaataagttttgtttccttctttctttcttcattgattagtcaaagtcaagcagattggctagttcgagattacactagtatagaggtggaagcagccctaaagtccattcctaatgataaagctccaggtccagataattataaaattatattctttaaagatacttgggagataactggtaaggaatttaaagagattatcttatcctctcttaacataggaaagctcctcaaagaaattaatgctaccgcggagactttgctgcccaaaattgtgtgttccaaattagttagtgactgtagacctattgcgtgctataaggtgatttataaagtagccactaaaataatttgtaatagataaagagatattcaggcgcacatcatatcgaaaaaccaaagtagatttgtgaaaggaaaaattgctcataacatcatgatttgtcaagatatggtttggggttatgatagaatgtgtgctaagttggcttgccttttcatgatagatattcagaaagcttaagatactcttgattgggattttgttagagaaatgttggaagtattgatggtgctttccacggggtggttatgacttgtgttactactctttggttctctttttgtattaatggtgctttgcactggtattttcattccaagaggggtttaagatagtgtgatctaatttcacctcttctttttgttgttggaatagagtattgttgacctcgcttttagccaacgacaatgagtcaattaataagcgataagaaatgtaattgagataaggtaagaaccagtaaacaataaagaacacaagattttaaagaggttcggcccctttagtttggtaatcgcctactccccttagattgtattaactcatagacaaagaatacagtgtttccacttttgaagctctcacaatgaaatct

SEQ ID NO: 233944 - DNA, 1029 bp, Cannabis indica
gagggtctggtgcagataattcttcaagattttctactcgtgtgtatcagccaccctccaactcgagatccaccaactccaatcgacctttgtgtcaggtctgtatgaggtatgggcatactgctcccacttgtcactatagatttgataaaaattgggttacacccaaagcacctactgccacttcccaccctcaagctcatctcacagaacacacatttgactatgatcctgctgcctttgttgctaatactgttcctgactttggagatgatcaaggctggtttgttgacaccggagccacccatcacatttcctatagtgacactcctcttgacaattccattccttattctggccaagaaacggttgctgtaggagatggtaagaaacttatcatttctcatattggtaaagctttcttacctgctaaaaattcctcatctttgaatctaaattcaattttacatgtaccatccattaccaagaatcttgttagtgtctcaaagcttactataaccatatttttcttgaatttcataaatcttgttgctttgtcaaggacaaacaaacaggggctgttctagtcaaagggaagcttaaaaatggtctctaccttcttggtgatgatggctcctctctttctcacacatctgttcagtgtcacctagctgaatccgaatgtactttcttgtctagtcaatgtaattcaaagtcttgtacttctcattgtagtccaaactcttgtaattcaacagataataataaagattggctttcttctccttttaattgtaatgctgctgtttacaattctactctctctcatgatataaatctgtggcatagtaagttaggtcatccctcacctgctatcctaaccaaaatcttgacccaagccaatattccacactctttgaaaaacttacaattctgtaatgcttgtcaactagggaaaaatcatagacttcctttccctttatccacatctagagccaatcaacccttagaacttattcatacagatgt

SEQ ID NO: 233945 - DNA, 508 bp, Cannabis indica
tataaacactagcgccgactcatataatgactatagaatttcaactctctcatatttttatattttaacattaattaatttattttattgttgatttataaatatgcagtattataattttaataattttttaattgtaatatatttattaattatttaaattttacatgaacgatgataaaatttcataagttcatcgtggatcataagttaaaagaaaattttaaaatataatttacttagtttataaaaatattattatttgagtcttttcaattattcttttcttttcttcttattttgacatatttgaaaaaaaaaaatacatataaataaaaaatatatatttatttaatttgataatatattaatataaaactatttaaaattaatataaaaatatcatttaagagtgatgactttatgtttttaaaataataaaagtttgggaacaatttgctaaaaaaaataaaatttgaggactaacttatcaaaacttatataattt

SEQ ID NO: 233946 - DNA, 839 bp, Cannabis indica
ccccacagatctgtgtgtatcaactctaaaggcttattggcacggtatgtggaatgaggaaagggaagtctatggctcttgccttgttgacaggcattgcaaaactgaagtgttttgagagatccagtatgaggtatattggataatattttggacaaggttgttgtggaggggtgacccaatttacaatgccaagtgttgatatcattaaaagaagcagcatagaaaacagagtgagaagaaagtggacaagaatctttattaatattgaactgattacaatcattggacaaatgcatattgtggttacaaggaatagattgatcagtatagtagtgatcatctttattactagatagagtggtaaggtgacattgtggggtttgagtgtgtaatccaaggtcttcactgagcatgtatagtccttccttacgccttccttttaggagaggagcacctgttttcttgtccttaacaaaacagcaatttcgatgaaattctagaaaaatatcattatcatcaacaagtttagagatgctgactaggttcttagtgatagaaggaacttgtaacatagaatttaattgcagaggacaagaagagttaaaggaagggagaaaggaatgaccaatatgagagattttgagtttcttaccatcaccgacggcaagagtctcagaaccatgatagacttgttgactgtctaaatttgcagcatcaaaggtaacatgcgcagtagcccccgtgtctgcgtaccaagaatgatcatccccaaagtcttggacgagagtagtgagtatgcctgtggatcgcaatcgaattcaacctcagcaagattg

SEQ ID NO: 233947 - DNA, 709 bp, Cannabis indica
tttttttttttttttgataacacaatatatgtaatgcatcattgttcataaaacaactaaatggagagaagtaaattgtaggaagtcttcttattctttgaggtatttttttaaaaaaaaaaaaaaaactttaaagataattttgaggtgtactaaataatacccttttgtaaataaagtggggtgtggttataaaagttaatatttaatgggataaatttagtaatggggtgtagttataattttagagggtgtaaatataatctccctatataatattaatacattcatgtcttacaatttaattatgataatttaagtattttcattcaaaaaatatcaataatcaactgccagttacatcgtcaaacttcactacaaatattttcaatctagacaacaaagttataacatatattaatttttttttaaaaaaatccataacatatattataaaatacgtaataatttatcaatattaaaaaaacatcaattttaattattggtttagcctaataataattaatataattaatcatagcataattggtaggtatactattagttcaaagtattgtaatgacatatttttcttaaaattttttagtataaattttagaaatttgaatttctataataatattataattaatcttgttttataatagagtgaaaatatttttttccttattattatttttatcattga

SEQ ID NO: 233948 - DNA, 1391 bp, Cannabis indica
ttatttaggtcacaaaacccaacactctgaattcgctctcaaaatctacgtccatccctgtagagacaaaagataaaagatcaatgaaacaacagtggtaaaaaggaaaaatgacgaattcagatcagaccaccattcacagaggatgatgcttaccctcaaaaacctcttgtggggatcgcctgtaacgatcgacaatacctattggatttggattaatcggttgatcttcagccttagaatccttcgtttccaatttaaattgaggattaaagcctttgagaacgtatggagaggaaaagcaattagtatattccggtggtacgggttttgagggataattttctgagtttggatgggacatcttggcaagagaatgacaatctaatttctggatgaaactcaccaaaaaccaaaagggattatgacgaatataccctctgtaagcatttaaaaagaacttttaaggggcaattattatacccgaaattcagctaccattttaatggaggacacgtgtcaagttaaggagaatatggatcgatgcatgtaacagtaattacatttaatggaataactcattaaatgtggaagtaacagagtatatttgcaacttgctgactataaggtccatgcgagataaaagatatgcaaactgttgcttcatgtattaatgagaaactatacgacattggatgcacaaggtgagacatcaacttcgttatgcctggaaaaacgtaagcgatgcataatgactgtaaagacacttagcgtataatatacaaactaagtacaacagtcgggcgaacctaagcaactaatagcaaggcgcctatctcgctataagaaggcgcattcatgttactttcaccaatcaattttagatatctttcagtgagacttatagtcttgacgagtgagaagctgacattcaaattatgatgactgctgaagtaatctttgttattaagaactgcaattgtcaaaatgagatgttatgccttcaagcgaagaagcaacgaggcgtacatcttcaacctcggaaagataggggaaaatctctagctcgctatcaagttcattagtattgagttcatgtcaagacatcccagaacgttatgatttaaaacgtgtttaaatacacgatcattttgacccagtaaaagcgaataaatcacaactgtgtgttattcaaataataaccgcatttatactacgtgatatgtaatcaaaccccatgatttcagggaagaattgttataaaagattacagtcaactctgtaagtaactgtttcctatgtgattataaatagacgcaagttagactgaaaaatggacgaaaaaatcaaaagaataaaggcccttagaaaccatcagaaatctaataaga

SEQ ID NO: 233949 - DNA, 885 bp, Cannabis indica
aactatgagcaacaattgattaaggtaagtttttgccgaataaactatactttctgcacttaacaatttgttgttccaaaccttgtcattccttgcattccatattgaccaacaaagagcaaccaatctttttttttatccgaatcaagcaccagaaaattagagttgcaccagtctaaaaaatctgcattattttgcagcaccgtgactattccctctcggttccagcacagttgagcagttgggcaatcaacaagtgcatgataaattgattcctcatgactatcacacactggacagattgttaacacatgcacccgtttcgttcttagttgaatcatagttgggagacatccttgacaagctctccacaccagatttttcatttttggagggagtttcaatgcccaaaatttcttccaaaaaacttcaagtgctgctgcatcatgtgtattctctccattcatctcttgcatcattctatatgcacttttcaccgtaaaaagacccaaaacctcaccaatccaagtgattttatcttgaccgtgaccatattgcacagggatttgtaagatgagcctttgttctcgctgttcgaacaaatcaaccacaacttcttcatcccaacccgatccatctaacaccagcaggttgcatactcttgcactagaaagagcagggtgttgagatgaaacaaaaggattctgaacatcaggtagccatggttcacccaagattgaaatggaggtgccatctcccacagtccaacgaacccctttaagtactaaaggatgaacttcaagtacactacgccagacataactggggttatgaccaatatcagatgtgaaaaaagaacccggagggtaataccttgccttaaaa

SEQ ID NO: 233950 - DNA, 882 bp, Cannabis indica
atcttctgtagatgaaaaagattcttgggtaagattgtgagagttgaaacactttaagagaactcaacagagaatccttcatgattgtattatacttattcttgctcaatcagtaaagaaaatttgatggtattccaaaactagagtagagccatagatcacatcgatctatcaaacttgaaccaatatatatcttcgtgtttatatctttattttatatcttattagtcttttggtttttctcactctattcaccccaatttttaatccgattatggtttatgatttttttaatcttgtcattgctaattgttttattgtttaaagtttagctgttttgattctgcactattagtcgtaattttttcacaaatcagagcttgataatcaatcaagaatgcagaataaagattcttatcgctgcaattcttgaagagaactttaaatgtcataaatggcaagattcgaattggagaaattcaatggaactagggactttgcactatagagagaaagtctgaaagaaatcctagtgcaccagaaagtctccaaggttcttagagacgagaagttactggcagaaaaaaactagtgaaaaaagtagaaatggaggagatggcacattacacgatcatcatgtatctatcaaacaatgttcgaagagaactcatcgcagagaagacgaaaaaaggaatttggaataaattggaagaattatacttaaagcacttaattgctagcaagattaatttgctagaaaagttatacatttttagaatgatttcttccatttctttagatgataatattgatagatttaatgagattattgtaagattggctaatataagccacaagattgatgaagaaagccaggccatc

SEQ ID NO: 233951 - DNA, 902 bp, Cannabis indica
aaccttaaatatctcttcaaaatttaaaatttaaactaattttaaaatatctaggtttattgaattattttatcgaattaaattaaatatctaataagataaacaatttaaaaatacccaaataaatattttcaatatcattttctaatcttacaatttaataaaataacaaaataaaccaattttaaaatatatatggttagtcaattattattttcagaataaaataataaataaataataattatctaaattatatgtcaggatatctaaaattaagcatttttcaaatatcctggccatattttaaaataaaataatcaatttttaaatttaaacctcaaaatatcaaaaaattaataataatctattaaaaattaatattataaatttaaaattgatatttaagtttaaatatattaaaaataatattttattttgaatttttgggtgtgaaattgggaaaaatcgaaaatgaaaaaatctcacaaaaatcgaaagtaggtgtggctgcccaggaggctgcacatgcagtccatgcgcgcacagagcagagggatttgcagcctccctggctaagaaacctcgatcagttgcaggggaagatgtgcacgggatgtagggtcacgtgggtggatgcgcatcagcgtgcacttcaaacaacatgatgtcctaggcacatgcgtgcgcacgagcaccttgtctgagtgctttgtgcgtgcgattgagcaccatctacacctattcaattcgaaacttcaaaaaatcataacttcttcgtatttcatcaaaattgaattctgtaacaacaaaaattgcttaatttctcacaaggaatccaaataaaattattttcataaaccacattcaatcattaaataactcataaaccaacatgaaca

SEQ ID NO: 233952 - DNA, 2388 bp, Cannabis indica
cacaggcggtggatcctgcactgcagaaccaagggaacacaagggtttcgccaaccataaatcccggacagcaatcaactgtgggtcacggtgtgacaactcctgaggatgaaatcgcgcctggtgtgcaagagatttggaatatcagttctgcagccaaccagggcattgataacacagtcgttctgcccgctaccaatgttcaaacaaccattggagatgacacttaaatccagaatctccgtgctgctcttggaatcatgcaaggtcataccaacatcctgcatcatgataaggaggaacttcgtgctgtggtgaacctcgcgtttgaagagcagaggcgcatgttcgacgaatggagagaaaaggagatggaaacgttaaggggtcagcaagcagtcattgacaatcgtagtcaacagtctactgtgttgatatgaaaagcttattagattgtcgggcaataacccgtaaccttcatcccctttggtgaaacagacgaagatcaagcgatgaatacctctcagactataaatgttcagccgtcaaatccctggtcacaggttccacctgtgggcgaagtggtaggcgagcagaccttgtctagtaattcatcaggagaagtcatactcaataattcaaatcaagttaattgtgtcggtcagcaaattggccaaatgaatcagtcgctgaggcagctagacgtttctgtattcgatagattggggacgactcatgatctcaggaacaatcagaataggtggagaggagtgcacgatcagcttgacgcaccaatcatgcaacccggaacccgcgctcaaaatcccgctcaaaaagatgctgatgtgactctggtcggccaagaggccgaacaggttagttcagccgtgcaagcacaactggatgaactaaaaaaatatgttccaaggcctggccggtcagaggaacaatgatcttgaggttgaccgagcacgtggaaccccttttgtcccttgagattaatctcctggaatttccccacaaatttaagatgccaacttggaagatgtatactgggaaggaagatcccttatcccccgtcaagtattttgagatgcaaatggacctgcaaggagtacgaggagacgtatgttgtagggtttttcctaccaccctctcagaagccgcccaacaatggtatttcaagttggcgccctgaaagttatactcatggaaggccttctcctcggagtcccatgcacaattctcctcctctcgccaacttcctttacacctatgagatcttgttgaggtaaagtaaagaccaggagagcctctgcaagcctacatcagtagattcatgacggaggcaactaaggttgaatgggtaactgaggacggaaagttgtctgcgatactgggggccattgaagtccttggcgaacttttgaaggacataaggaagaacggaccagtagactcgatgagtgattttcttgactgcgcagaaggttttatcaagcttgaagaggccattcagcgaacaaaaggtgaacaaaaacctagccagtcaaaagctctttccactgggacatccgtccaactcccccattatccgagcaattcaagctcaagtggtaaacgctccaacaaaaataataggcaagggcatgggaaaaagggaaagttcactggcaagaccgaataagctccccgggagaatacttccaagtatactgcatttaccattgtaatggaggatatagaaagtgtttatatggcaactctgtcaataaccctgtacaagaagcccacacccatgaaaaaagatgtcagcaagagagatatgacaaagttttgtcgttttcatggggattaaggccatgataccaatgaatgcaacaatctaaagcgagaaattgaattcatgataaggaaaaataattcgcacgtagaaaagtatgtataggtcgatcataaccagaggggcgataacaaccaagacttgctaccaccaccagtcgatggacatctccaagtcataattggaggaccgcacatagctggagattcgggcaaagctcgggaaaggtatgcccgaacggtacagcacgagcaagaagaagtagtcctagccgcagaagagaggaagccgaagatcccacgggcaggggaacccacaataacatttaatgatgaagatgctgtcaagatcatatttccgcacaacgacccgttagttgtgggagtttagatagcaaacaagatggtggcccgaaccatgatagataatggagccttttctaacatcttattcaagaccacatacgaaaagatgagactccaactcaaagatttaaccccctgtcttcagcccgtgtatggcttcttcggccaaggagtcgcacc

SEQ ID NO: 233953 - DNA, 1205 bp, Cannabis indica
ctgattatataaagcgctctataccaagtatagatgcacaataaattatccattatttcaatctaaataattaatgatcttctattgaagatctacatcgagtagggaaaatttttttgttctaccatatattttatccttaaaacacttagctacttgtaaatgatattccagtaaactaataaaattaggcaaatgagcactccaccatttaagttcatttagctaagctcaaaggaaactatcgtttcacttctatgtatttatagaagttatagattttgtatccacgatcagtgctcccactcaattgcactaccgtgttcccaagatgtaaatattaggccaatccaattggttagatttaatgaacaagtcaaagaacacaattatggtaagtttatgatatctttttcactgtaaatatcgttcgagtctgatgtataactatacatccaatataagcttactttgctaatgccttggaaaagtcattccactatacaagtgtaagtaaattaaattgttaattatcatatcagtataaatcctgtgtacggataaatcatgggactaattagtttaatcacataatcttgattattttctactatatagataacacaataatcatgaatagcaatgtaataagaatttatatatcaaacatatgatcatgaaataaacatgtgaaccaaacattatattaaacaagtaataaaataatttttttcctttattgataataaaatttaagataacattaaaataggattttagttagggcacaaaacccaataaaatcctacttgtactaacataaaataatcactacatttcaactaattttaagattttctctatacttttgaaatgtagtccgtgtcaatgtcttggtgaataggtcagctatattgtcttcagtatcaaccttttctaccagcatgtctcctcctgccacatattctctgatgatgtggtatttcctctcaatgtatttactcatcttgtggcttcgaggctctttactgttggcaattgcactggtgttgtgacaaagtaactcaatggtttttctatatttggaataacaccaagctttgtgaagaattttcttagccagaccagttccttagtagcctcaacgacaactatgtattcagcctccatattgtataatcagaaattgcagattgcttgacact

SEQ ID NO: 233954 - DNA, 1610 bp, Cannabis indica
ctaccgtttatatttataatttacaataatggacaacaatatctcagttttatgagaaaaaatattcactcccaaaaaagaggcacgaatactagctaattaaatactagaaaaatcgatctagctagtctgctaatctagctacatatatatataactatattgaaattaaaaatgaaaaaggaagatatacaatatatattttaccgacatgacatttcttctatatgcaaaacaaaattttttttaaaaaaaagatgtaaacagttaaaaatagtagctatagtgataaagaaaagcatgtgttaaaagttgaaacagaaaatttagatatatagaatctactttttgagacttttaattaaaagagtacaattaatctctgttaaagggtgaggatactatagtggcccccatatgggtctcatggttatatactctactatatatatagcctgcactgcactgcaggtgaaaaaattattatcattattatatatatatatttattatgagtaacttatcttttttcaaaggaagaacacacacactattctcaagtgttcagacctgcagatcaatccagaagaatgttctcacaactaaaaaccaacttataagcagacacacactactgcaaaagataatataattaatattaataataataatcaaaactcatctagggttaattatttatatatatatatatataatccagggagacctaggttgaggggagaagaatgggagatgtttaaaatggagtggtccacacacactcatctcttgcctgaccccattgtcctttttgacctgctttgaccgtaaactatattctctgccaaccaattgaaaagagagagatttcagaacaagagagagagaaagagagagaggaccactcggttatgtatttgagtaatgagattccctagtagccataatcataaccctgcttctctgccaataacacttttactttcccagaatttatatatatatataaatataggcccataaatatatatatgtatataagttctttcttgttattaattttctttcttcatcatgatgaaacaaaggcctgactagagagtttgcgtacgtgcattattatttgttgttgtgatagagaaaatagtatttttgttatatatatatgtgtgaacaaagtatatatagagatatttatgtaattggagatatatatataaatatatatatagtgatattgaaatctccatgctaccctcccaaataagcctaaagaatctttttctttttctttttctcttttgcttggatatttaagactaggaatctgtacgactgttaatctttttatgcaaatatatatatatgagctaaactcatcaaatattacatcccacgaaagctatatttgcatgcgaagaaagacgaaaaatattcccctcaaaagaaaaataatgacgataagtgctatatataatatatatatattaagatatgatgtctccacctaactttattgatatgttaagtgttttcacttcttttgttggttggatatgtaaattttgttttattttctcatcagttaaatcactaccacactctaaaaa

SEQ ID NO: 233955 - DNA, 1100 bp, Cannabis indica
accacggcagcaagagataaccccagagtaacccaaagagcacttccaaaagtaacacaaccaatcgaaaccaaactgacccaaaaacaaaacttactagatattgacgtatgataggaaaataagagaacaggggaacaaaaggcacacggttgaaagctgaaactagaatgcacaggaacacatatgggtgaggacgctcgaacacatatggtgaaggtggacgtgataggaagggataaataggtacttatatggcaaaaactaaatgacagaatgatatgcagaaaggggaaagtatgtatagctaagtcacacggagcaaagcttctcctagtcttatctataaatagataaattctcacggtatatgggtaaagcagagcagtattagtcgtatcaaaggcatttaatactaggaagttttgctgcacaaaagatttgaagtaggcagtagacagaacacacatacagaacaaattaaatgtgggattcgaatacaagctagcaaagggaattaaatcccttctgtcgacatacttaggagggttcccattaccccaaaatcttagcagagtacaatttccagggtataatttaataggcagaccaaaaatgtatttgaattgttcaataaaagaccagttcttctggaacgatttgacaatgaatagggagatttgtaagagagagtcagtacctgtaagagccacattaaaatcggtacggttcgacgggtttgggagaaggccggagttaatggtgatgcgacgggggtggttgggcatctgctgagggagacggccgactcggcttggacgggtcgagctgtgctgtgtctcagtggaggaggaatcggagccaccatgatcgaacgatctggagctgggcatgggtttcaccttgtggaaacttgcagagagaaggtgtgaacgtgctggggaagaaaacgagcccctgttcatacttgagagacgagagagaaaagtctggaaaggtttgaagacgaatcgtcaatgtttttaattgccacaccttatatattatctttttcatgcaatattgtaatttaagaacatttttatatttttaataaatat

SEQ ID NO: 233956 - DNA, 2360 bp, Cannabis indica
gacattcgggctcagatcttggtgatgctctgcgacagactagatacaagggttagagatctgagtggaaaaagatatattaggatgttaataaaacatacttgttagtaaatctagatccgtgtaaaacatattccaacaccttagtgagggataccatctcccaccacactaaggcatcttcctggaattgaaacgtggcacatgccaccctgtcatttccggtaactcccatgaaattcaatattctttcaatcacagtcaaccactgttttgccttaagtacatcaggacctccgaaaaatactagaggtgcttgcttcctgaacctctcatataagggccccatacggttgccagtaacaggttgttctgctggcaccgtatgaaccacaacaacagacggttgcaggggaggctcaacaggagcatcctgttgtctaagcctttgaatctcttcttcttgctgagtaattatggcttgcatctcagcaaacctctgctagcaatcaaatgaagcttggggtggattctcttggccacctctgggagcacaatcgcggcctctaccgcgttcacgggggttttgggggtttctaccaccctgaccacctccggtctcaaccatttcaccctgtcctttgacatttcgctgggcgtcaattatataggacttagcctgcgaacccacaaggcatgtaggttagacagtggtcaaagtattctcaagaccgcatttagggttaaaacatcgatctacacatatatgcaatagatcttaaacagtttgaaaaaacaaaaagtaaagcttacggaaccatgagttgagatcgacactggccttgattgtacatatattggcgggtcttcagtaaacaacctggtggctctgataccaaattgtaacgcccatatttaaaaatttgctaaaccaaattaatcttattatattataattatataaccatataggtcgggatcccgagatttaaaacactgttgaaaattacatttactataaacaaagtttcatacatatttttacaaacgacaggcaactacaaaatatagttcacatggttgaaagaccgaaaccctcaaagctgcactgctgcgatatgtacaatcactgccaagctccaactcactgctcctccagcttagcttttcctttacctacacaaggtagcaaactaatgagtcgacagacccagtaagatatgcataacatatatgaaaacaatgttataccggatttatgcctaagccgtcctaagcccaataccgagctcaccaaatggttaagaacattcttaatggaagtacgaccactgtaccatatgcactaaagtaccgaccctgtactcatgttggtaaagccattattgtactcgcgggagttactaagtgttgtaccacatgcacggcgtatcccctggtactcgtgttggtaacactgtaactaccctaaaatcctacactgtaccaacgcccttaaaaaaacacaatttcattagtgtcaatagtgtaaacaattagtaataagcatacattcacatatattttatttatgctatcttacctcgttatgtgctcaagtgtaccagtcagcttgagtggaattgcagctcgacgctttacagggccctaaatcataatattcaaaactcggtgagagacgcgttaaaacacttatcggggatttaaaatcaaaactaagaataaccctatcgatgaacaagatgctaacaacctgaataacacaaaaacagggaaaactagggttctggaaaatgacccaaccggcagactggttccccaccggaagtctggttcttgggtaccaaccggtcgaccggttggtataggtccccaagaaccggtcgaccggttctgtgctagaaacccgaaaacaacatccccatgaccaagaatttcacccaaactttataataatgtcccagaatacatgtatacactctccaataaactcaaatcaagcaataaaactcagccagcaactcaacaattaaaaacaccattagaaatccaacttaggttctctaaactctatcttgaacaattctcaccacaagctactatctcagctcgaaataacataagtaaatcaatcctaactccagaatataaaatctcacatccccaaataatcacagcaacctaattcacaatattcaaccacaatttaacttaaaaccaaagaaaacaatgaaaagaatactagaaagttataccttgagttgaagctctaaatccttgataaaaccttgaataaaaatcaacaaaactcacgatttttgctgcccttagctggtttgaaggagagagagagagagaga

SEQ ID NO: 233957 - DNA, 1697 bp, Cannabis indica
acacatacaaagacccaggcccacacacgggaaccaaaaccgaaacttgaactggaactagaccgggatcttagaacggtaccgggacctaaacccgaacccgaactcgaaactagacccagcctcagaccctaaccgagaccaaaactcagacctgaacctcgccccggacccaaatcaggacccgaacctggactcgaaccaaaacttgacctgaacctgtaccccgttacttgaaactggaaccgaaactagaagcggatcgggacccatgaataggaccaggaccaggacttggacttagtcccaaaactgtaaccggacctggacccagattcggacatagacccaccctgggattgggtccaaaacctgaacctaaacctaaaccgggacttgggacccgaacccaaacctgaactcagactcgaacattgaacaggactcgggacccagaattaggatggagacccaaaactggaccccagtctcggtcccacacctagacccatacccagagcgggacttggggcatgaattgaaactcaactacgacccgtgattaggatccaaatcttgtccaaggatccgagaaccggggcttggacaagacccatagtcgatgtcttgatctcggactcggacaaagactcgaagctggaccaatacctggaccttggactcagaccttggacccgaaacaaaaacttgaatcagaatgtgaccaggaccctggaacaggaccgggaatgtgaccagtacctggacctgggcggggacccgaattacaccagaacccaaccccagaactcggcctcagacctagtcctcgacccagtcccgaacctagactaggactgagacttgagcccaaaatcgggactcgatcccgaaatcaaacaaagcccctaacctaaattgggattcggacctggacatggacacgaacccagacccaaacctgaataccgaccctgacccagaccgggatcaaaacactggacctggacacggacccagacgtagacccagacatgaacctgggacccagacccaagaatcgaacctggaccccgactgggatctgaaaaacccgtacccaaactcggaggaagactcattacccgaccccaacctagacccatgcccagacccggaaccaaacccagacccggaatcataattggaactatgactaggacccaaacttgagaccagaatcgaacccaaaccataagccaaactcagaccagaacctggaccgaggccttgactaggactgggacctgagactaaggacctgaacctcgaccgagacccggaccgggacctagacctgaccaggtcctaaaccctcgcaaggacctgagacccgtgacccaaaccaggatcaagaccctaacaaggacccaaacctgaacccggaccaagacagggatcgagacctggacctgaacttagaccgagacctagaataaaaccaagactcgggacctgaactcgaacctcgacctagaccaggacctaggaaccggacttggatgggggacctacactagggaccttgtcccggaactagggatgcacattttccccatggggatggggccccgcggggacccgcccctaatggggcggggattccccatctaaatggggaacggggcggggcgggggatcaaattttgtccccgaat

SEQ ID NO: 233958 - DNA, 1383 bp, Cannabis indica
tttttaaacgtaccttaaattatcccatgtatttgtaaaacagaattgtcgacggttaaaatctgtcgactatactataggtgacggtaaaccgtcccctatagtatagccaatagtttaaaacttttggcaattcccatgcttcaatttcacgtgtttcagatctaaaatttcatttcccgcatcttaaattttaaaattttatttttcttgtcttaaatttcatttccctcttgagatatatactctccaaaaaaaaaaacatatctcattttttcaaagtcatttgtaaatttcatttggtttcctgactctctcttcttcgcaaccacgagccatgtcgtcactctcctccactctctctcgctatgtccctcttctctactctctcatggcagcacaaaggtaagcacaacattctcttttttgttgttgaagtttttattagccatgatttggtttattgatcttaatttgtgtgtgttcaaataaatttgaagcttgcaaatcgacgaaagtttcgagatcgtcaagtgaacaacaattcaaaatttgtaaaagaaaatttcaaggaggatgaagacgagcacaacgacggtagaggaggatggagcttgtaaaggttttggagcggctgtgacatatggaattcatttgaaggtgtgggacaagctgtgcctccctaaatctcaaggcgaccttggtttagaaagacaagagagatgaactaggccttcttggctaaatggggttggaagctgcttacagggtaccgatcgttatgttgtagatttctcaaagttaaatacctcaggggacagaatatcctcagatgcaaaacctcggactcctgattctggaagagtgtggtgaaagctaatgatatccttaaaagaggggcctacaaagttatcactgatggtagggacacgaatatttgggaggacccttagatcatatatggcaactttttccacccataatgttctaataaccattcgcgttcttacactttggtgtcgaagcttctgacagaatctggtagctgggacacaattaaattgaataacttatttaatcgcgagacagtggctgccattctgaaaggggataacctcgagtcaaggaaaagaccattagatttggacgaaggaaggatctggtcgcttctcttgcaaatcgacctacttaatccaggctctccaacgattccctcactgtgaggttgccccttctctctggaataaactatggaacatcaagatcctggaaggccataaagtactatggtggagcatcctctcaaatactctgtcggttagggcatctttacttaagcgatttcatatagcagacagtaataaccaatttgtggagttgatg

SEQ ID NO: 233959 - DNA, 464 bp, Cannabis indica
tccaattaaaatgaaatgagaattgaagtgtttattttcctaaaaaattaggttttgtaaacattaatgagaacaacaacaaatggctgaggaataattgcagcctttctgggtcaattgttctggtcaatctcagatctcacgaacagaggaggatttcaaatctcaagggattggggtggatgaatgaaggaagaactcaaatgagttcaatagaatagacaatagactatagaaagagagatatatatgcttccataaaaaaataaaatgtatttcgtgagttatatatacaaaagaagagagtcatagagaattataaagaaaatgatactttttatttggtgagttatatgaccatccgcctatttcttagcgggctttctaaaaaaatataccccgcctaatttactatttgagctactataatattttctaaaactcattaactattgtacaaaatt

SEQ ID NO: 233960 - DNA, 560 bp, Cannabis indica
taaaaagtaaaaaaaaaataataatccaaagtcgggttggtcgggctatttgatttaattgggcaggttggacctattttcaacccacccaattaatagattgggcggtttgtaatttttttgggttatttcggtttgtaatttttatcaattttttcggtttgatttgggcatattattcgaaaataatgaagatacaagtgatctgagggagcaaataagatattttggggtcgaaacagggacatagtgcccaggttgacatgcaacctggtttgcatgtttccaatcctcaaacacaaattttactccaagaattcttcttattttggtcaaaaacagggtagaagacctcgctcacaatcttgaatgccttagaagtatcaaaacgagctttgggaagtcaccggggaagcaccaacacccaggttgacgtgtgacctgatgcgctaggtattgcttgtcaaaatctgatttcgtcttgaccatttaactattttcttgtagtgaacgagcgctacaacttgtgacaaattgaattcatactttgatatttcacc

SEQ ID NO: 233961 - DNA, 809 bp, Cannabis indica
aagagtataatataaaaatatatatgaagaccgcactttatgtaaataaaattttaaaaactataaaaatatttaaaatttcgtacaatcatatttttataattctaaattaaaaattacgcaaaatatgagatttattttactgtttacttttttatggcatttttaaataaagcctttgtcatatgggatttttgtctggtgttcctttttacgggttttatgaaagccatatatttgttatatttgggtcaattcccattgttttgtatagcatttgcatggaatagcttagctttgtactcattgtttcttacagttcaatcaatcccattgtcatttcatattctgagcaagaggtattctatcacttttactctctctcagcttctcttcgtttccccttagttttagcttagggtttattcttttccttcatatttttcttgttcttcgtcttcaagcttcgacagtgatgccattgttgctattttttcatgcttcgaccggtgctgccgtgggtgggttattcgattgtggtcattttggagctcagttacttgtttaagtgaggtaagttttaagttgttcattattttttttgtaatgtctatagttttagtgattatagttcgctattatgatgtttgttggtttttttttttgttttcttaatgattttccttgatcgactgggttttttgggtttattgctgttttgggatgatcggttgggttttttaggttatgtttgatgtgttggtgtttgctttctaattttttcaaaatgtgttcttattttggttgtt

SEQ ID NO: 233962 - DNA, 1186 bp, Cannabis indica
ctttcgaaacatcccaattaccaatgtttgtcagtaagtcttctaccttctccaaaccctcaggttgcccgtttataagatagggataaaagtcccaaccatgaattacccacggatcatcccaaatgtttgtatcctttccattcgatatgagtttagaggctcctttcataagaatttttttagacttcaccacattcttttagaactacgagtctaaattcttgggagaacactttaagaaaggtataccttttaggtacttagcactcaaaaccttacaacacaatgattgatcctcgtcaaggaaagcccaaccccattcaactatgaaagcctgattcatttccaaagtcctccagaagccaagcccacctctagacttcgggaggcacaactgatccccaagcctttaaatagataccacagtttccttattcacagccccactaaaaatctctaatcataccatctattttagctgcaagtttcttggacaactttgtagtttacatcgcataaactggtaatgaaagtcccaccaattttatcacacgaccactttagataaggatttcaacttccacccctgcagctttaagaccaggttatccatgataaaattgaaatcatcatctttattacgattttggaacaatgggagaccgaggtagttcatgttaccaactactgtgctgagctcaagaacttgcttaatacttcttttcattccatcactggtattcttgctgaagaaaatagagatttttagtttattaatacgttggttcgaccaatcacagaatttctctagacattaccaaaccctcgtagcttcctccatcgtggctctaccacctaaaatttaatcatctataaagaacaagtatgagagccgagggccattccttctcaacttgattcctctaatgataccgaattctaaggcattctcaaagatacgggagagtatttctgcaccccagataaaaagatatagtgaaaggggattcgcttacctaatactgcactccgggttaagtctgctaaccttacctccattaaggaaaatattgaaggttgtcatagatatgcactgttggatcaacccataaaacttgtccaaagccttgaaactgcgaagcacatggtcaataaactggtggagatctcagatttattatat

SEQ ID NO: 233963 - DNA, 908 bp, Cannabis indica
gttaacctgaccaaaccgaccaattttattaggcagattactattttattttttcttaattgggtgggttgcacttagatttttataacttggtctttacattggattttataaaatatagcataaactgaccaaaccgacaaatgtacactcttatttcaaatgcatatcccatttttcccatcagggttatcaaaatccacaagaggcgatgggccattgtatgtgccaattgtcatttagctaacatgcccgtagatatcgaggttcacaagcagtattgtttgatactatatttgaagcagttgttcgaatttcttatgatcttaactgaaacaaattcttgctaatagtaaaaaaagaggcttgaatgtgggtgatgttcttattttacttgaggggttcgaatcagcccctcccgactgtattttgcccgagatcaaagaaaagatgaaaaatctgtcttttcagagctattgccccactaaaaaaaactatcttatgataggtcccattcctggtaaaaaataaagtgaaatcacctttcctattcttttcccggaccccgctactaagaaagatgttcatctcttaaaatatctcatatatgtaggctggaacagaggaaggggtcaaatttatcccgatgggagtaagagtaacaataatatttataacactacaatggcgggtatggtaagcaaaatcatacgaaaagaaataaggggataagaaataattataatggaggcatctgatggatgtcaagtgattgatattattcctataggccttgaagttcttgttttagaggacgaatccatcaaactggatcaaccattaatgagtaatcctaatgtgggtagatttggtcaagggaatgcagaaatagtacttcaagatccatt

SEQ ID NO: 233964 - DNA, 871 bp, Cannabis indica
agacgaatatactttcaaaatatttgcgcataaaattcctgtaaaatcaaatttcttacacctacatgtcactgtattatcaaaagaattatatgtaacaatgtgctcaaaaatatttccatgaggaattactgtatactttgccactgttccaacctcaccttgaatatttataggacaatcgtaaacattcagaataaaattggagtgtaaacaattgaagcatgcttcaaaatttctactggtaaagacaatgacaatgaagtttgagttgctttaaaatcagccttcaactcatcatatcaacgatcctcaactaatctttgaaaatgttgaaaaaatcttggtatttcatgcttgtagctaacataattcttgattacattattcatactttcacttcgttgagtagttatcatgtctgcacaaaatgtttctctcccatataccaatgcccattttcccctcaaattaaatatcttttgaagccatttattgtccctaagatcatatttctcaagcatactattccaagcttcaatgaattcatccttctcatcataatcataaatacaactactgaaatcttttgtaaattgtcgaaatttttcaaaaaaccccactaagattttttgcagcattctgatatatatatgccaaatgcataaatgatgagttgtttctggccattgatactctagagctttttccattgctgcatcttggtcaataagaatagtctttagctttttccctgacattgttttagcaaaagtgtcaaacaacctgttaactcaaacttttagatctccttgttttgatgattaacaaatatttgattattatttgttactaatgatttattgatttt

SEQ ID NO: 233965 - DNA, 1680 bp, Cannabis indica
tggatcatcccacccttcattctcccaaaaagtaatatagccatcggtgcaatacccatcttcatgttcatacccttcgccctcctctatagaaccaccatgatgatcttcaaaatcatcctcatcatcttcaaaatcattctcagatgaatcatcatcactgagaataacaacatcaggttccttacatgttttattaacatgttttcccttgttcatgtctaccaggatccctaccacatcaggcaaaacatcacaatttggtgggagttcctcaatcacacagtgcttgagctttggggcggttggtacatgaggaacagtagttggatcaagtttccattctagctcatgtgtgatttctggcattacaagatacacatacatcactgtccacttcctcatctccatttcttccaaaatttcattaacttctttgtcatttcgaatcatccttccatgcttcaaagctttatcttttggcttatataacatgccaaaaggaagcttgtatcccaaaccaattgcaaatccttctatcaatattctgctcatctcactcttatcaacccagtcaaagaaactaaccttcccaccctcatactttcggttaccaaaaggtgtgaagaacattccaccatgatgtattgcaagtgtcaaatactttagagtatcaaatgtttaattatgaatcaaagaaaaaagatcacaaataagtaacaaattagtacctcttaaaaatttcatccagaaaatcattttgcagctaatttagtcaacaatggaccccactattttttttgtaagaatatataagattgtgttactgaaaatggaacacattacaaaaagaatgatatgtagccaagcaagaactttgaggcatgaacctttcagccacacaattagttggtcaatattgtgaatgacaacatatatagaccttataacacaagctagtagccaataatgagcctaattaaacttttccaaaaaatataatctttagaccatttaaacatggggagaaggcatgctttctaaagataaagtaactagaaacagaaaataaataaataaaaattatattctgaattatcacaaagaaaaaaatccataaacaaattaatctcaaatattttattgatacattgcaattacaattacatatactaaacatttgccatgaatttattattatgaacaaaataaatattagttaaagtagaggtagaggagtaaaaatgagagaaaaataatgctagggacagatagtgggacaaaagtaatataaaacaacaacagcaaacatagaaattccaagcatatgccccctcattcattcccacaatgccaagttatgttttataaattatatatattatttcaagcagaaaaaagactgcatttctgaaaaaccagtatgtacatacaaagtggaacaaaataaaaacttttgtggagaaaatcaagaccagattccaagacgaaaatgatgatcatatgtataaatcattcttactgattttgatcaagtgcaaaaacgtaaacaagccacctatctcacaagttcagaaagaagttgaaatattgtttaaagattatccaaacttacttgtggaattcacaaattttttaccccttgaagtacaaaaacataataataattataaacttgac

SEQ ID NO: 233966 - DNA, 1472 bp, Cannabis indica
tagtcctattttctagggatttaactatctttttttgtaacttaaataatagataaaaagatgttaatatccttattttaaagagatatatgtacctatttgaattaggatcttttgtaagccctacactatatatataggatattagatcattctcctaaggctaagtcattccacatacattaaagggccaagcctaagctacacgtgcaagacccctttctctcaatcctcatactccatatatccctcttagacactaagtcaagtcacttcttgagcccttcacaagatctcatcaattcttgatctataacatattgttctcacaattgtaatactaaagagagccatagctagaaatcataagcttttcacttgtgatttgcatggcattatctcaagagtgaatacaattaaaaggaatgtaggtcattatcttactaaataagagggtcaaacctctataaatctctgtgttatatttattatttactcttcttatttacacatggtgataatcatcaattaataaggctccgctgtcagttaaccaaatttttagtcaacactcaagattcagactgatctactaatgataatcgtcgtgatatggataactctttcatgataaatgacatgttaatgaaagatattaattcatatggattcagtcatgtataatcaaattatacacaacacatttactacatgtctatctacatatgtgattcgaattataatcatgcacaatagagtatagtgtatagtaagtcatacttggtaatttcatattatagatcccttacttcaatacactaccgacttgttttattcatattgtataatcataattttctcgtatgaccttacaagattataccatctatatatgaataaggaatttttaggtatttattaattatacttctataattaatgtattcatttatcttataattgtgtttcatatattctagggtataaattccaacatgatcatcctctaatcacctaaaattattggttaattttttcattttttatctcatatctcctcttaaaatatcagacaagcttgtttaatcttctccaagagtatttaactgtgttcatactcatttgttttttctctccatttatatttactagttaagaagaagaagaagaaaacaaagagggttttgtaagattttcgagatcagaaattatcttaatcaaattttttgagtgatttaggcaatgcatgtgtcaaatgaggctttctaaaaatggagaacacaaatttttaaaatgtttttttctcattctctttccctagatcttaaataggtcttcaaaaatacaaatgtatagatcttgaaataaatctttcttgttctcacacaccaactgagttttcattggacttcgcgatcagcctccaactcttgattgggataaagagaggacatgagagagagagagagaga

SEQ ID NO: 233967 - DNA, 1365 bp, Cannabis indica
atctaacggtgaaattgactttgaaagtctgtcatcaattttaggagcttgagtgacgtctgcatgacccacttttggtaagttgtagtttaaattcgtaactctcttgaggacaaaatttacactagataacttcataattgtgattggattatcacacattacttgatagaacattgaaatagcttcaaaatgcaagttgaatcacgtcaatcgaatcaatattgagtgagctatagttgttttactgaaagttgctctaatactaatgcccacattgatatttgcgtcaacctggacgctgatctaaggggaaaatgtgttgaagatgtactttttgatgcctaagtgatattttgacatcacttagctagtttttgtgttctagtgaagtcgttcaccaattcttaaagatgtcactattttgtggaatcggaactaaaagttgctcaattcaggagtaagtcacttttccaaaaaagtgaaaatatgaagttgtgaatttgataaaatttgagtttataactctcttttatcatgaaaaactagacgaacgctcaagacgaaattagaatcggataagcagaacccaacgcaccatgtcaattgtcaatatgggcgttgaatgctctttctagagctcctagaagctttgttgatacttccaaggttcttgaaatcgaggaggtctcctaccccatttattaccatgctagagagatttcttggatcaaaatttgtatttgaatgatcgaaaatagcgcaccaggtcgattgtcaacttaggcgttaggctcaattttctggccctccaaattctcattttctcacaaagtttacttgtatctttgttatatctgacggcagaataaatgaccagagcatttttcagaaacatgattggaataacctaagttgacaaaatgtcaacttgggcgctgggctaacaccacgtgtcaaacttgcgatgtgtcaagtttcaggtcactaaacagttctgtcgaattctcagaaacacttgtaccttaatttttgacaaaagtgaagaatatgcttggaagaattcttggaaaaactctttaaaatttgcccaggttgacgaaatgtcaacttgagcgctaggccctcttcaagcctccaagatggtctatttcttccccaaaaatacttgtttccttgtttctaatgaagacaaagaaaatgcatgggacagttctttggtttgatacttggaagtgctcaaaattgacaaaatgttaacttgggcgctgggtgcttagggcaccaggtgctctaggtgctcaaaaataaaagtgctccaaattgttttttgatgcctcaaatatgttcgtgacatgtctaatt

SEQ ID NO: 233968 - DNA, 527 bp, Cannabis indica
tgttaagtttttattttaaatagcatattttttcttattaagtttccttaccatatttatagaattatcccaaaaagtaaccaattaatatcttattcacatcaaaagcaactaaatggttactttttttcaaaactccccaaagagcaaaaatttctgaaaacgagatatttctagtttttttcattttcggtaattgttttaaattttgatatgtatgctaacgtgatataacgatatttgtgaaaataattttcttaaaggtatttttgtagataaaatcaattttaagtataatattgaaaaaatccttaaattttatttcttgtcagaaaaggaaaatacctggacatttttcttatataatatttcttttcatttcgtttgtttagtgtgctaatcaattttctactttgtgtatttattttataggttttcttaaattgtttatttaggctatgtgccttttttgggatggcctcaaatggttttgtctaaattttcggggtatatatatcttttggctc

SEQ ID NO: 233969 - DNA, 1697 bp, Cannabis indica
acacaaatcacaaggcatcttagattatgtttactcagatagtgggtcctgagaaatcctaactttggggtagtgcctatttcttatctattgttgatgactattctaggaaagtatgaggtttacttgttaaagcataaaaatgaatcttttcaaaaaaaattgtacactaaaaaatacttgttgagaatttaactaacagaaaactaaaaaccctaaggatatataatggcctaaaattttgtaatgatgagtttacaggttattgccaagataatgggattcagaggcatagaacagtgaagaaaacccctcagcaaaattgtgttgctgagagaatgaacataaccatattgaacaaagcaagatgcatgcttttcaatgcagggctctctaatgggttttggggagaagcagttgtaactgctacatacttaattaatagaagcccttctagtgcaattgaaggtaaaccccctaaagaaatgtggactggtaaactacctgacttgtcaaatttgaaagtctttggatgtgcagcttatgcacatcaaagtgtagggaaattagagcctagggctctaaaatgtgtgtttctaggatatccagagggtgtaaaaggctacagattatgggtataaaggaaaggaggtttgaaaacactaattagtagggatgtaatttttcaagaaaatgattttccttataaaaatactaatgaacttgatgcaggttccacagaaactaaccctacaggtacccctattggaatcactcagaatggcacaactgaattggaaccagatccagatcaggtggaaccaatccaaatggaacctcaagaaacaccagatcaagtggaacatgaagttcaagatgaagaagataaaaaccaagaagacttaacagaatatcagcttacaagagatagggccagaagaattcctaaacctaatcagaagtacagctacaatgtgtgggatgagagtattgcttatgtctacatgtgtaaactagaagtagaaatctatgagccacagtcctatcaagaagcactaaaacacagaaactataaggcttggttgaaagccatgaaagaggaaatgtactctctcataaagaataaaacttggagagttgtacttagaccagatggcaagactgttgtatcttgcaaatggcttttccaggttaaggaaggaaggactaaagatgaacctataaggtttaaagccagattagtggcaaaggggtttacacagaaagaaggagtagattttacagaaatattctcaccagtggtgaaatataaaaccataaggttgatgctatccctagctactcagtttgatatggaaattgatcaaatggatgtaactatagcttttctacatggggatctaaaagaagacatctatatggagcagcctaaaggttttgtggttaaaggcaaggaagactatgtgtgtaagcttgacaagtctttatatgaactaaaacagtccccaagacaatggaataaaaggtttgacacctttatgaccaaacaggggttcaatagaagctactatgatcactgtttgtactttaaatgatcagaaataactaaagtcatttacttgctactctatgtggatgatatactaataattagcaaggaaatgtcaaatgtcgacaaggtcaaggaattgctcaaa

SEQ ID NO: 233970 - DNA, 921 bp, Cannabis indica
atctagttatgagcttctaatcttttttcaagattattaagataatgatgatgcaaaatgtaactagatagaattaatttttgtatacatgttgatttcctatttgtgctacagtgtccatggatttttctatcaaaatatatatctttttcatcttcaatattatgaatttttgattgttaaagcatatttcacgtagttattcattatgcaaaaatataatactctttgatgaaatatctttcattaaattatttacatctaattcttagaatatagtgttatattttttctacacgtagtttctttgattttgtgtagtttcattaaattggaacacaattaaggcttagaaattatacattttataagttaataaaaatcttacctttttgaaagaaacttgtgcttaaatagaaaatatattttgtaaaatatagtgtactttatttcaactatatatgaacttgagaattaatatacttataaatactattaaacttgcattttgtggattctaatatcttaataatcttactttacacattttatttgaaaactattttcatattcatttcattttaaatttttttattacgtctcatcaaatatttggaactaggttagaatattcttgttttatttaaaatagtttcttttaatgttagtcaactcctatgggttcgatctcgtacttacatgaatattatattccgaaacaattcatacacttacgagtataaatattaaaacactcactttgaggtacaacactacctgaccagttcattttctccagttagagagagaagcagctcgaggagagaaacccataaaggaaaattaaataaagagttagggagggaaagtgttgcgagaaacctttgtaaagaaaacataaagaattctatatatatatat

SEQ ID NO: 233971 - DNA, 834 bp, Cannabis indica
ttaaaagtaagatttaaaattttatggtgctagtgattaatttttcttatacacgagttaagtaattgtttgaactttatttttgacaatataaattatttagaattttctaaaaatttaaaggtagtcctaaaaactactagtaggatttatacctaaaaataagtaattaatgagtaatatattattgaatatatataaaataaaaatatattataaatgattatattaaatattgttaaataattaataaatataaaaaaaatagtaatatgcagcataaataattaagtttaactccagttgtaaataaatatctaagtttaatttttagcagtaataatacttaagttaaaattctagaacttttataggtacctaactattaagtgttaagtaaattgaaacgcgacaattcttgattggtccaaatcattaaattttatttttttttaaaaaaagtttaatttaaatataccaataagaaaatgacacgtagataatgacttaatctttaacggttaggtacatacaaagttctaaaaatataacttaagtattattaccgccaaaaattaaacttagttatttatttgtaactaagagttaaacttagatatttatgccgcaaattattttgttgggattagactcacttaatctatcaaagtcagtagttccatcttatcactcataagatggatatgaagaaagcagctgttagctataactgtttattgagatttttggcaactgaatatttagagcttagaaaagaaataacagtttaaataacaagtgcgagatttttatgtgggtcaggcgttaactatc

SEQ ID NO: 233972 - DNA, 606 bp, Cannabis indica
tcaccaagcatcctctaaaattttaccattagagattcttttagccatgtgtcgaacattatactgactaccgatgtgacgtattaagacttattaacagcttttatattttttataaaagtgaaatgtgtggaattttatattaatttgtaccaataataatatgtcactttttctggtgtttggcaccataagataccgcttagcatttctcaataatttatcgtcttttcattataaattttttagagcatcttcaatcatgttctatataattaaacataatatttagtttaaatagggagtgagacttaaaaaaatgaaattcaatcatataaaaatagctcttttataatagagaatgaatatgagctctctatatattgggagctatttctgctaaatttttgtaataatattttaatcacgaggagtattactttttcattattttattaaattaatttatatttgataaattaaaattataaatgttaacacaaatttttattaaccaaatatattaacttcttatgtaataaatttactacaaggttgttaataacaataaatgaacaccaaatttttttttatgtggttttgtag

SEQ ID NO: 233973 - DNA, 1602 bp, Cannabis indica
gaatgtttatatttgtttcaaaattttggtttccagagtttctagagcaggaaaacccaaaatttcttgccttacccttcaaaccaagacttgatacccaaaaataatttcagaaataaatgatgagaaattaggttattcaacgaaaatcttggccgagaggatgcctcatctcgctctaaatattttattaacagggttattgatgggaagcaccgcttcttacgagatgtggcttggccaaagtttcctagtttaataaagtatcctttggcaagaccattatttttacccgagattaccattgctttttctctaggtaaactttgacatcatgcatccaaaggagcacaagtctaaattaccctagaaccctacgattcaattcgaggttcaaatgattgagtctaaggttaggtcaattgccctatgtgggtccgttcttaaggtcttgtgatatcaagaatgaggaggggcgccgaatttgtttagtcgaacaaagcgagttcatttgattcctcaactcgcttgtcaaatgaagaagattgcagcagtagtggttctttaaggataggcgcttggagtatcgagcaaattaaagtaggagtcatccttcctctcaattagtacttgaaggacttctaaaattgtattggggtcacacccttttaacttgtcccaaatacatatagaatcttagtcttctaaaagtcactttaccacatcttagtaagggagtgcacaaatcccttagagatcatgtgcttctatgccgaaataaaagagttcaagcaaggattcttttggacgattgggcttgatctaattaacaccattacctttagaattatacgtaagtattcaatatttcaaactttaattccaagtttaattttatgtttggaatttactaacttcttttcattgttgttctttcaattctttcaaaaataccaatcccaactgttgtcatccaaaggcgtcacaagatcttggtgaacttgccttatggtttgcgagcagcagaatttcttcttcacgaccaaaaattaaaaacatgcggtcttctcagaacgaaccaatgcactatgaattttaaggatccaaagtatccaacatggtaacaactcctaatgcctgaggaataagaagatcgcaattacgtcactcatacccattttttgaacaccttagctacttgggaagccttcgagactacagaaggggctccctaaggtaaaacttcttatttctatggctggtttcctaccgtccttaggaccgatccaacgagtttagtcaaaattaggaataatcaatataatttttctatttggaaatgcatcgacttaatagcccataggtttgataattggtaccatgagtctcatgtccaaacctcgtgtaatagtttatttaatgggattgcttatcaatatgggacttatgattggcgagctaatgagtgggagttatctccctcaaatatatttgacctttatgatatcaccgagtcgagaggacctgacaatcatcctattatcaagtctcctcgcactgatctttctccacttcgagtaacttctaatatttgactgtagt

SEQ ID NO: 233974 - DNA, 1100 bp, Cannabis indica
ttctcatattttatttttagacaccaaatatgtctaaactttctcatattagagtatacacccccacactttcacatttcattatcaagacaatatcttgattttaaaatatagaagactactttgtctctataactcttttaaattaatttccttcttgaaattatttttactaaaatttgacactaaaatatgtcaaaattttacatatgcacatagccaaatttgatttattagaatttgaattcaaaatcaaataaattaatcaacaatgtctcaacacattttgattaaagttgtggctcacccccacatttctacaataaagtgtatttaaaatatcacttttgtgtatttcctcttgaaatgactttttaaggtcactttaaaaaataccatttgacattttcagttttctcaataaaactaaaatatcaaactcacattactactcataaaataatatgattatttttacacattattttaaagttatctcctcaatgagattaaccttaatattaaaccaaagttaagaaaattctcatcaattttgttcactactttgattatttaagattcaaaattccttctccaattttgttatcttttcacaatttttgaatccatattgattcactttattttgagtccaaaattgatcttccaatttatggctcatttcacaagtttggatccacttttggtccatttgttcttgctatgacaagacaattctcataagtgtaactcttcacttttcttatctcataaaatgagacaattattactttaatttctcaaacaatataacttctcacaagttacactttcttttctcaaaatcattatcgaaaaaagaatttcaaattctctttattcacaatatatatgataataatctccacatcaatagtaataaacactatcaatattattatcatatatacattaaataatttatatattaatgtacaaaattaatatataactcccatgcatgaattaattctcaaataataattatatgcaaactaatgtaatatgaatgttactaatcaacacctcatgtataacatacacacaatatattaattatt

SEQ ID NO: 233975 - DNA, 507 bp, Cannabis indica
actagaaacaaagagtgaaaactaaccgaaaatatgacccgaaacttagactaagtttagcctaacaattataattatagtaggtatcatatttatatttagaaaattttaaataatttatgtagctaaaaaatagaattttgaactttattttcatggataaattatttcacaataactacaatatataatatacagcaagagtatgaaaaaattggggaatacataaattgggctaaatttttctttaatgctgaaataaataaaagaagcctaaaatcacaaccccacccaccaagtgattgttgtccataaaagaaagtaagtggtgttgattggaaaatagacaaattaatagtgaaagtaagaaagaaaataaaagtaattataatggacaaaagaagacaaaaaaaaaggtaattatgaatacaagtaagtagataagtactaattaataaacaacaatgactatggttattacttattattagtgcactttaagttgta

SEQ ID NO: 233976 - DNA, 744 bp, Cannabis indica
tggcctttgcttcacttcgaccaagtcctttaaatgcaataggcattggcgagaagaagagaattgtgcatgaaattctaaggagaaagccttccacgagttgaaccttcctggtgtcaacttgaaataccattggtgggcggcttctgagagtgtggcagggaaaactctgcaacatacatctccacgtactcctagtaggtccatttgcatttcaaaatatttaagatgtgacaagggatcttccttcccagtatacatcttccaggtcagcatcttgaacttgtgaggcaactctggagaaaaaggggatccatgtgctcggtctaactctagatcgttgttcttctgaccgaccagaccttggaacatgttttttagttcatccaactatgcttgcacggatggattaacttgttcggtctcttggccgaccaaggtcacgtcaggatctctttgagctggattttgagtacggaccgcaggctgagtggctggcgagacatgttgttcgtctaaccctctccttctatttatatcgtccctgagatcatgagttgttaccaatctattaaatacagatgcattaggttgtcttagtgactggttggcctggccgatcatttggccggaaccattaacctaggtagagttattaggtataacctctcctaatgaattactagataaggtctggccgcctacctcttgccccacagctgcaacctgttaccggggattggg

SEQ ID NO: 233977 - DNA, 1075 bp, Cannabis indica
agccattcctgtttcaaactttgttttttacggcaatcagtagtggcatgccctattcctttacaatttccacaacttataggtttccactcataaaaaatttcaacaggtgtattattaccaggctcatcctcaaaatagatagtacctgggaagtcttgatgaatggaaacttggataaggactcttgggtagctaagtttgtctctctctttggtagaatcgtccaccataataggttatcccacttggccaatgattttaaacaaagctcttagcccctaatatttcaactccaaatctgtaagctgaacccagattggaatagtacgaatatcctcctttttgaagttggtatttggatcccaccccttcatgatgacatgcctcttattgaagaatatatatccaccatcaagcacttcatcatgatgatccattgtatcaaatctgattaagaacaccccatatgacagaagtccgaccttgtcaatctttccactccatatgcatctaacaaaaccatccaaaactgataatggaggattggctcctagcacatagcaaacaatagatgacttccagtaagctatctcatcttctatgtcttccatagtaatcttgactgccttctctttctcagacttatcaaaagtagtctctaggtttctcaccacgtttccagatctaagaattgggggcgtcatcgtatttcctctggcaattgagacattacaattcttattttcctccatgaaatgagcaaaatcaaatcaaatatcttgctgaagaatcaatttcagggatgatttcggagacataggagctggcaagatgtctcgcaaaggatcaaactctgctgcatcacgagcagttgctccatcatcttcttcatcagtgaattccattggttctaccccaggatttctttcatagacttagttttcttagcatcgactgttgagttaggtccttttttcttcttcttcgcagacacttgaatcttcccctgaactttagctcttgtgttcgccacaccaccagctcgagaggagctgcaagagagagagctcga

SEQ ID NO: 233978 - DNA, 795 bp, Cannabis indica
tttctttttctttctttttcttcgacagaacccccttacattttcttcgtgctcttcaccttcatcatccccgccctcacggccgtctccgttaggcaaaggctgtcgacggaggaaggcagcgaagacgattccatggtcatctccttcaaatcaaacgacatcaaatctcaccaaagcaatcaataagtcggtttcaacgacggcctccggcaccggtcatcattttgtggcttttcattaaacaagagtaattcaacagacaagtgaacacaacaccattcattcccgcctccatcaccaattcaagaaagagtttaatccaacaacaaattttatttataattcaggagagagagagtgtgagagaaagagaggatggagttgcagagaagagcatggttaaggggcatatgggaggccttgaaggaaatccttttgcagagggtcttaacatatagacttcattcttctccacttattattccaaagcacaatgttattgtcactggagctaccaacggtatccacctccaaacagtcaagttctctctcttttcaaaacttaattgcttcagattattagttcataggaaccaaaaatttagagcattaccgaatcagttattctcaccgattttgacctttgacccacagatctttgtctgggtcgttgatcctccctctgcgtcactgccgtcgagtaagcgaaggggacgattgactttgttatatagggggttctgtcgataggaagaagaagggttaggggagggggttctgtcgagaagaaag

SEQ ID NO: 233979 - DNA, 893 bp, Cannabis indica
cctggtaaaataatttccaaccgaattcacacatggagattaccctaaaatctcatctagagctcatcaaacataatccatacatcaccaaacaatttacaccaaaacttatcaaaattaacacaaattctaaccatacgcattcaagagcaactcaacacctatctcatgcttttcaatcataaaattctcagaaataaattcaactaaaaaccagcaagagaaactacctccaatctctttaaactcaagcacaaagtcaccaactccaagcttgaatcaagcaaaaaccccaccaattcaagacttgaaacaaagagataatgagagggagagagagaggcggttttgaggagtataaaccagaaaatgaaatttatttttcaatcaacattcatttgttgcaaataatcaaagtatactaagtaaccaaaatgcacaaatgaccacataatccctctcatgaacatttaatggcaatatagtcatttaacacctcctcatagtttaaataaattcaaattattcacttattaataaaattccaataaaaataatcccaaaattgtatttcggccccgaacccggttcgggccgaaatactcaattgttactataccatgccaacttgtcagaacacacttgaaaaagacaacacagacatactatataataatatagttccataagcacgttaataaattaatttcactgttttacccttctcaggtcaaaattactaaaatacccctagctcactaacgaggtcttaaaacgttatatatcatattaatttaagcataatagattatataataatataatcccacaataatacacatttaactggttagggtttgctaatccatttctttaaatcttagggtattaca

SEQ ID NO: 233980 - DNA, 707 bp, Cannabis indica
catgtgtaggtaaatgaaaggctaagactgaacagcaatgagtccaaagcttgttgatgattctacatgtcacgatggtagagagttttggtctcgagatgacttttggctttcatttttgtagtcaatgtgcgacatgtttgtaaagtttattttgaatgtgaataaaagttttaatagcgggatcccaaattttttgtacaaataatatgtatgtatttataaaagtttaaagttaagccaaaagattaattttatcaaggttttcgagaaaaccctttgattagcaaaggtgtgcactgtaattagaaaattactatagcgtgcctaggtgttagggcgttacaattttggtattagagtcgctaggtttttcatcaaagatagtcaagacatgtacaataattgttggagataagctcaactcacgattcaggaagcctttacttgtttactaagttatgtgattagaaaagcatgattggaagcatgtcaacaacgtgttatttgcttaaatgtgttgcctaaaatccatgtatgcggtatttaaattatatgtgattgctatctaaccaacctgacttatggtttagaggccaagtcttatagtatggatgcctagagaaacataaggagtcaaggtaatatggtcgagaccgaaggcagtcggggaggtcaaaatcctccaaatctccatggacgcggtg

SEQ ID NO: 233981 - DNA, 1117 bp, Cannabis indica
gagagagagagagagaaagattcgccaagaacattatctgtacaagaactctcataaataacaaagactcgtggactacagctcattaatgtccgaaccacataaaaattacctgcattaaagcttccatagctcttctcattctatcattaaattggttgtcgaaaaacctcagtcagtaagtgtcatgtccaactggcctttgagtgctattagtggacgggatcttggtgccaggagtggtttgatcggtcgacgtactggtgttttcagtttctagtacgcctggtgtgaacccagctagagaggaagtcagtctgtggcctaccggtggtggttgtgttgttaatttgttcaaggtttgtccttggtagtcctctcatgtttctaggagtttgcatgtttagatcagtcaccattggatcaccttgatcagccaggcctccccttcgagtttgtacaaccatcctgttaacctgtcaagactttaaaataaaagcttgtgtttttgctcttattgaaagcaccaaaatgttgacctcgcttctagcgaacgacagtgagtcaagataaagcgattagataaaataaataataaaaaacaaaaataataaggtaaaaataacaccaaattttctagaggttcgacctcatgagaatggtaatagactactccccttttaattttattgacatgagagtaagaataaagtattctttctctccaaagcaatggtaatagactactccccttttaattttattgacatgagagtaagaataaagtgttctttctctccaaagctcttacaattgatctcttagtaattctttctcttagatcaattttctctcttgaatgttcttctgaactcaatttctcctccctcaatagttagattatgccactatttataagagcttattgcatgaagagtggttttccttaatctataataaataaaatatgaagctatattaattccatgattacaatgtaaagaatgggaaactaaggcgtattgcctttattcttgacctaatcccacgaatatcggggttatcttcgtgtcttggaaacgacgagacttatctctaaaattgccaactcacatat

SEQ ID NO: 233982 - DNA, 938 bp, Cannabis indica
acagaaaattgattaaaaaagtgttaccaaacgccacctacaaaaagtaaaaagctgctacttttagtgccaactttttagttacaatataatttttttgtgactaaatatgacttttagtcacgataaaatattacttgtgactaaaacatagtatttaattaacaagttgtcactaatttgtcactaatttagttttagtcacaacaagtattgtgactaaaaaatatttagtcacaaattataattttttgtaattaatacttttagccacggaccttttagtcataacataaaaatcgtaatttataattagtcacaattttttttcacttttagtcacaagttttgttgtgactaaaagtaagattttttgtagtgatagcaataagattacaaataaaataaggatgatagttgcaaataagaatgttagaattgtaagatgtatggtttagaaagtaggattaggtgagtgtatggtaagttgtggggctccattctccttcaagataatggctattttttatgctcaccaatcttacacgactcgatcacaagtgactcttctgactcactattcttgaatcacaaacaactcttctgacttgtctttttaagactggtttttggatttgaatcgggtactcattagagtttagtttcgttatgataccatgttagaattgtaagatgtgtggtttagaaagtaagattaggtgagtgtatggtaattaaagtgtatgagatttcatttcaaaattaattcgcaataaaaagaatagtccatgcatcttacatacgatatttagttttcacatattatcaacgtgagactctaacaaataacaaaataataaaagaaaagaaacaacattattacacttttattattttgagtatagaataataaaaatcaccaactttaacaatgttca

SEQ ID NO: 233983 - DNA, 947 bp, Cannabis indica
cttcatcatattatctctgagaatcagtcggcctttatcccgggtcgtcttatttcagataacattatgattgcttttgaggttatgcattacttgaagcgtaaacgtaaaggcaaagatagttttatggctttgaagcttgatttgagcaaagcttacgatcgtgttgagtgggattttgtttgcgttatgatgctttgtatggggtttgctagttattttgccaacttaatcctagaaactctcagcatggtggagtataatgtgttccatggtggtaagattcttggtccaatttgtccaaaccgtggtattcgttaaggtgacccactttcctcctacccgttcttaatttttgctgaaggtttttcttcactgctgaaacgttttgagagcaatggttttattaaaggttgtaaagtagcaaacggggctccaaccatatctcacatgctattcacagacgatagttacatttattgcagagctaatgacagagaagcatataatgttatgagattacttcaactctttgagacggcttcggggcaacaagtcaactttggtaaatcatccatcttcttcagctcaaacactaatgctgaagttaaagaccgaatttgctcaatacttcacatggagattgctcctgacaatagtacatacttgggatttccttgtacaatggggagaaacaagaatgcaatactgggatttcttaaagacaaaatgcaaaagcgaattcagagttgggagggtagactcctttcaaaggctggccgagaagtgttacttaaaacagttgctcaggctcttcctagctatgccatgtcggtttttttgctgcctttagacacttgctctgctctggagagtatgatgtctaaatattagtggaatactacttctcaagacacccgtggcatcacctggatgagttggaagag

SEQ ID NO: 233984 - DNA, 1646 bp, Cannabis indica
aaccatcgaacaagattttatctgcatcacttagaaaattatcgaatctttcaagatcattaagaaatttctcatgtgcttcatcaagcaagtccattggatgatcatcgaaattattatcttcaatatcatctactcccacttccctaataaatatggatcatcagctaaatatttgccatgccaatactaagtagtataacttctattgaaacttgttaaatacacataatccttaatcatcgtaacgtttcctttgatctattataataatctacacaaggacaatgaatacattcagaatttctagaattcgttaggaaaaactctgtaaatgcatcgaaccctacttgaaatcccagtgtgtctatctcctcatgcatccacgatttatctataacaaaaatcttaacaaaaaaaatctcactatttagtaactaattataactagttactacttacataatgtaactaactaacattctcacatctatttaatatttatatattactctaattcttattttagtttagatcatgtaattatattactcatttcaaatattgacatgataactaataactaattgtaaatagttactagttatataagttgtaattaaataagtagtttcttacaaccaactagtaattaattaagtatttgtgttatgtgtaaaactttttctttaaatttatgcatttttagtaaaatttatcataattctaccgaaattttaacagtataacgactgtaattggatgttctaaaaaattttaaacatgccaaaatcaacaaacaaaataaataaaacaatacacaataacattaacaataaaaaaattatccacacttccgaccgcagtacatgtattcgcaaacctacttcactacagctgaatatttaagatattcaaactccactaagtattgataattaattaataacaaaaaattagtaaatgtatatatacttgtagcaagctaaaattcgattaacaccaaattaaattagctcgcaacctataatgaaatatgacaaaattaaaattttaattatttagcaacttactagttatatcatttatgagtaactagttactagttagtaaaaaatataaaaatacataaataggaaccaaaaaaaaatcaataaataaattaaaaaataaataaaagagctattgtttcttatctattactaaaaaagttacatatatgtataatacattatatcctacaccaacaaaattttaaaaatttaatttttaaactaattgatactcaactatcttattcttattcacaatacatatacaatacttagaatatatataatacaattacaatatttttataagtacaatacacaatatatatacacaaaattcataaaatatatacatatattcaataacacaaaatatatacatacatactatatattaaggtttaaatttttactttataagcgcaatgcaatgtccaattccgacaaaaatctagccactatcatcatacacaaatacataatatttaataatatagaaaaactctaaaaaaaatataaaaaacgaaaaataaagcaatgtacattattaaaatgaatagaaatcatatttataccttaatggacgttgagaat

SEQ ID NO: 233985 - DNA, 1356 bp, Cannabis indica
ttttttttgaatggaaaataaattttattaaccaacaaaatctgttaccaaacaatgtaacaactcggtaggaacagactccataccgaagatacgaccaggaaataatacagaagctcttgcaaagttatgagctaccacattagctgatcgtttaacaaaataaatagaaacatgttttaactccaacaggagttgtttacattcaagaatgatttttccaaacaaagaaagcatttttgttgaacttcgtattgcttgaacaaccactaaacaatctgtctcaatcgacgcatgttgtcaatttttccttttaatccaactcagagcctcgcagaccccgattgcttcggcaacttctggtgtagcagcccccgagaagaagtccattcggccttcaaccaagaagcagtggtgatcacgagctgccattcctaagccatagctggttcccccttcaaaaagagcagcatcaacattgatcttgattctattttcacttggagcggaccatttctcaaccccatcacccgtctgaaaaccagaccatgatgactcaatgagagtattttgagcatttgtccattgatcaagataaccttttgccaatactacaattccttcagcgtttaccaactttttttgccaaacaaaatcatttctagcgctccagatagcccaacagagcgttgccaccaaacatttcttgtttgaatccacaccagaaaaagttccatagcaccagtctaagaaagaggtatgatcatgaaggatatttgttccaattccaacacggtcccatacccttttaacatgagagcaagtaaccagagcatggagtgcagtttcttcttcaactctacagatcgggcagagagattgtacattgactcttttggtttgcaacatacatagcgttggaagacaattcctacctgcacgccacattaagttctttactttgggggggattttaagccgccacatagtagtccaaaaccgtgaagtagtgtcatcctcattgtcccatctgccattaatttgttgaagtactttataggcacttttgactgagtaggtacctgaagcctcaagtgcccaagtcaaagtatcatcactaaccgatggttgcaaagggatcttctcaatgagcttcctatctctttcttcaaagagatcttccaagatttccaagtcccaacccgtgccatccatggtcatgagattgttcactttcgcctgaagtagactaggatgagaggtagtgacataaggattctcgagacaaggtaaccaaggttcattaaggatgctgattcttgttccgtttcctacgcaccaacggaggccttttct

SEQ ID NO: 233986 - DNA, 725 bp, Cannabis indica
attatgacatttggcaaaaaaaacaagtgaaaaattagttaggctcaagagtacgtagttgttaaattaggcaaaaaggtttcctacaattgagtagtgagtgcacatgcatacattaaaagccaatttgcaactgttgttaaaattagtacttagaaaatttatggcagtgattaattgctcacaatcttctatggaatattgatgcaagacttgagaagtgaaataaggcaaaaaagagcaatgaaaaagattctttaaaatttactttttcagtttaacttgtttgttttggtatggtagtgtgaaatgtgaactacatttcgttctattagatgcagaatataaattaggaaaactaaatccaaagaagaagaaaaaaaaaaaagaaagaaagagaaaaacaagtaatattgatttgatctttgatggtatgatattgtggtgtggatttcattaaagatggtgggaatctatgatatttgttcagaaatatacatcatacatggacgatcttccactcacaactgccaatattatacatgttgtgatggaagatcacctttgcaatccagattgaacactaagaatcaaaggtaaaattaacagaactgacagcagtaatgttgcagcaatactggtacaaaaaccagtcaagaactaatgaacagaaagcaataatcagattgaataaccttgagttgttttattgatcttggagagaa

SEQ ID NO: 233987 - DNA, 735 bp, Cannabis indica
tatataactaattttgttaagtataactataagtataggagaaaaattttaagataagtaaggatattaatttgaatttcccatatggtgaaccaactctcctgccaatgcagttacttctctagtcacatgcctttccgttccactgtcattcacgtcaacctgaactgctccaccaatgcgccggtcaccctcacttgctctctcttgttcagtagttgaacatttaattggacccatttccatatcattgacactcaatcttcgttgtcagaatgctacgaaacaattcaaaattgaatcatcatccgttagccatggcccatatttcgaaataagaactccatcctctgttttctccgtcgaaacttcaacatcacattccctcggctcatgcccccaaattccacaactttaacacaacattatcatatgttcaaatttaaattgtatccagtgttgttttccattaatacaaaataaattacttaaaaagaagtttttgaagcttttaaagttctagcgtataataatgatatttgaaaacatggtgttatgctttatcaatgtgcgatatagctatttggcaattataagaaaaggagatccataaatagagagtgcatataaaactaaaaaaggaaattcagtaccaggaggtggagggcctacaataaaacttcgtatgaagctaccccacacaccaggctggctggtagacagattcagtctaaa

SEQ ID NO: 233988 - DNA, 738 bp, Cannabis indica
acaatatgaatacacgttacaaatccatagctgttgaatttcactggttttcagtcatcttctccggctgatttggccggagtttcagtcatcttctccggttcggccaaagtgttctcggatctatctcttcgtctgtggatctcctaacctccatagctctctctctctcacgctcaagatcctatttcagcgagaagagaaatgctctgaacggatcattctttcgagggatcactcatcggagtcgaagctccgcaaatctgttaggttcatgtcgggtctcatttagccaaataattctttagaacgagatctactcgtacagatcttccagatcccatcagtgatatttgtatacaccgttcgcgatggagcttcggtgagatcaggcagagcttcggcgagatcgggtagtacccgttatttgtcatgagttctatatattcacaataatttctgtattttttgtaaatatcaagaaaaacccactcttagcatttttggtcgatggcccatctccgggcaaatggcggaagtagcagtttaaggtgaattgggaagggtttctttttctatttgctgattaaagttaggctattttcattcaactacaaataaaaatatataaatatatgttaaatattgatatttccagggaagaaatcacaaaggggttttttcgaatctggtttttgggtttcaagttcctgattctgggtctgaatcaggaagaca

SEQ ID NO: 233989 - DNA, 773 bp, Cannabis indica
aattatggccaaaacattatcagtcattgcactaggaagctcgctggccgaaatcctcctttaagagccacagcatggagggctaatgtcgcggccctctatggtgttttggaaaaaattagggttcttaaaccctaatattaagatttaaagggacctttttgacactttttgagaataacattgttgagagacgaaaagtagaggcagaaagcaactctggacactttcaatattattttttcgatgagttctttgttctactttatttttcatgttcttaattagttgttatcaattttttacaatgattctgagtagctatactttaaatagggttgttagtggagattatttgacattttattatagttttaatatgaataagttcttccctaattttccatgtacatctagttcatttcatttgtatttaattattttagttgtttgatcactaattaattgtttataacttcaatgcaaaatttaagaagtgaatattgattttgctaaagtaaaatagacacagattttgatattggacgagagtacctatggtcgatgtaacatttaggatttttatgcgtaatgccttctatatatttaaatttatcacggaatgtagaaattttgcatataggttgagatctatatgtcctaacctgaatataagtttctttagtaaatccagtatcacatgaaaatcagaaattacaattaaattataatctatagaaagtaaattcaattgaaattaatcaccctaagct

SEQ ID NO: 233990 - DNA, 674 bp, Cannabis indica
tttggaaaatatttttacttttctaattaaaaaagtattatcaaaggcacccaaaatatctactattattttcttaatgtgatattagattaaaaaaaaaagtaatctatgtaaaaacataatatctttaagagtaactaattcaaaattatacaagacaacaatcacatatatagttgcatgaaaagggtaatgcatgcaaataactatattttaaattgtgtataaatgtagttagatctatctattcgattgttttattgaaattttgtacatttcaccaacgattgacagattttctttgggaaaaagtttgcagtcactcggaatttttttataaaaatactcttttttataaaacaatcttaaaacaacaaaaccgaataattaaaaataacagtagaacaattaaaaaaataacagtaaaataacaataaatagtgtaaaaacttcttataaaaacttcttatcaatcaggtgtaaaactcatttaatcttagtaatcggttgtaactgaattgatcaaattttcctttgcaatggtggtaactggcaatactctgggcctccatcatcaacttgcgattatatagggaaatttatatggtaacttttgccatttttttataaaaatactaccaggcagtattttttatttttttactgtgtttttt

SEQ ID NO: 233991 - DNA, 1419 bp, Cannabis indica
aagatgataaaacactttagaataagaaaaaaatatctactctactttacgtttagatttagtcacattcttagaaaagtagtatttgttgaaacaaacactttctcttaatgaccaaaccatggtccacccctaattactttagaatacctatcaaacatgcaaacttaagttaatagttctagcttttcttaagttcatgattaggacatccataaatctaaacttagcatttccttagagagactcaggcagtggctagtaattaataatagacctttcattttcatcaatatgcaatctaaattttggggaaggtaagtttggatacaattcaaaattcaactgaatgatctttgaactgtataaccaaatatttctccacccctatcagtttgcaagatctttaaccacttaccttaatggttttcaccattgctagaaattcatgaaatttctcaagcatttaaaatttcattattcaaggtataatctagagtgattgactaagaacttaacgataattcatatccacccctgaatgtacatccacatgttcgaatacaaatgatcctacttccaagtggatattaacatattttctctttgcagagactgattttgtcaaaaccactatggaaaagatgcaaatgccatagacatattattatggtttaatgaatcttaggtctagttacaacaaagagttcttagaatagtttaagtggattatggtcacaaaataaaaaaatcataatccatacattaacatacagtttggatccattgttagaaaatagatattaacaacttgtgaaagttataccctagtgttcaatgtattttagaaactaaaattaaatttctatttcgaatctaaaatttaaagtgaaagacttaaatttgtacaaaatattccttgagtagttattctagttttgaccaccactattattttaactctaagtttaatttgcctttagtaagcatatacaagtatgagattctaagatccagaatttatatcattagaggatataatatctagagtgtaatcatttgcgccactcaatttcatagaaaaaataaagtgacatcataagcacatgaattataattcttctttatccaatgatatattatctacgtaatttcttaatgaaaaggtgaagaagaaaacaaaaggattatttcaattataataagaatccaacgatagcacggaaggcgagagtcaaagttattcttattttataaacttttttattgtttcatattgtaaacattagtctaagttgtcattgtagggatgagtcaactaggttttgtatccacaaagacttatctgttgagatctaacactattatgatgtctaacggatgataatcttttggaaattgtcccattaaaaacaacaa

SEQ ID NO: 233992 - DNA, 926 bp, Cannabis indica
tccaacattcactaatcactcaattagatgtccattaatttacatctcaattcataagcttttccccattctgggtgagtatgcctttccataattgcttaataaagtaatcctttcttagaatttcaatggtctccttatataccacattgactatccagtcaattataaagtactttccatcattaccgtatcaccttaagtaattcaggtaatcttctttaccttagtaataccactactcttcctaacattcttttatacgttaccctggtaacgttctcgcttcaagcctccattgggcccttattctcacagaatgatggctcttatacatgagtgcatcactctagctacttcccagactgacgacgggcccccacggaccaatccaagtgtttccaacgtgctttgcttcgactcgcacacttcatggaaaaatttcctaaatgaaatcaccccaagttaaggacactcaaccatggagttctctcatggtgagctactaaaacaagatacttcttgctaacataggtagtcccacgcctacataatctcaaaattactacacaatcgctgccttcaattcacctaggattctagacaatactcgtaaattgtctcacctttgataatgctagatcactcctagataaaagattttgttatttgaatcaattagatcgatgcctccattaactactcatgtcctatattccacttgggaatacttgcaaatttaactcatattgtcatttctctaatttgtctaccccctcaaataggttgccactaaataacatacatgcacagtccattcagatttcttgatgtctctaacttaatgtacaatgttttatattgatatcaattgaaataacagttgtaatatttcccataaaattctaatttgagtcggccaaagg

SEQ ID NO: 233993 - DNA, 3490 bp, Cannabis indica
ttttttatacgaacagaattgttttatttttttttttctagaaaattttaaaatttagaactgtgataaaaatatttaaaaaataaaataataaaggctaacagaattttagagaaacatttatgcgaaggcctatgataatggaactggagaagcaacagtagactttttccaaagtttaagcctatacagcttgtatccagttgcttcagacctccagtataataataattgcaaacgttgaaaatatgagtggaacaagattaatacctttcgaattttaaggagtacaatgaaatatatctttaataatttgataaccaataagattataaatctcaaattttgaagccaacccccaataatagaaatttatcaagaatgactttaaactaggatttattttatatgtatgttcatgcagaaaaccttggaagttgatcaactaaaaaatgcttacagttgaaagttctcgtgacatattttgggagaattacttaggcaatagaattaagagattaatcaccaacaattggcagaatgatttaatttcaattacacattcttaataagatagacaatggtatcgtaattatatttaatcatcgaatgtaatcttattaaatttcaacgttccaaaccctgaattgaatccacacattcttgcataatcacagatactatacgggaccagctaaaaactcacttttcacaatagaagaaagaaaagtatacgaatagtatacaagccataaaggaaagactacatccttcttaaattatctaacctcgcctgtaaatcactgtctatgccaccgtcatcgggccccgctgctgctgtttccgcttgagcaactttggccttagcagctggtgcagcaacagttgctgagggcgcattaacaagctgcacattgtaataagaataacatcatttttggtacattcaaatttcagtaacaacatacagatacaccggtgacagattgtttgttgtctataaaatgaaagataatagttaaaaaaatacctcttggttaacatcaataccaatctcatcgagcacctggtttaccaactcatcagtttcctcctcttcctcatccccttccaaagcatcatcgattgcatcagccatcacttcagatactaactccatcttctcattctgcctctcaaactcttgcataattttctgtagtgatggcaggttcatttgtctattcatttggcccattgcctttgtcacacctttcattgcctctcccattgcttgtgtggatttcaaagtctgaaaatagaagtacatgtattaatcaacagttaagaagttaacaaaagctatacctcaaggaccaataagaaaacagatattgcattatttagattatgctcaaattccaattgacagtactcttactattcttcaccagttagaaattagcaatatagggtcttatattcacagttcagaactaccggagaaaataattctttcgatgtttgtcacagtttaaattaataaaattcacaaactaaatattacctggattctaagagatactccctgaagttgtgatttgagcttgtaaaacttttcaatctgatgtcttgttctaaccaggtcttttgccataactttcacagctccctgaaacaaaactaaactgcatcaaaatatagttggatgtccgaagattaaaaatgtctccatgaaacctaaaatgaataagatccacaaagggccggttgaaatcacacaccatttgcccttgcttagcacttttctttatctcttgaattaatttcttctcttggttttgaagaccttgtctctccctttctatttctctgattgatttgtccagcattctcttgttttcccgcagaagttctgacattataatcatatatgtttaatctcagcttaagaataaatacttttaacagagtatttatatactcataataatgccaattctagattaaacatttgggtgttcaggaaacaatatataataaaacataaaacacatatagaatgcttcagactcaactagaccaactaagctcctcaagcataggcatggacattaaaaactccattctctagctgccaatacaagtaaacgttgtggcacaatgcaatgcattgaggaaaatccacattaacatataaactaaggcttcttaagaaaaattaacaaataaaatggatgctgggtctcgattctacgacaactacagtccaattgaggaaagaacaaaaaaatatacaatttagtttttaacaacaaaccatcatcttagcatgaaaagccctaaacacccaggtgaaccatttagcagaactcaaagtaagaataaaaatttacatatccataacggaagtaaaatgattttccgtgctcgtctagtagactactcccaatcaaattccaacaaaaccatatacaagaatctaaacctaaatcaaataataattcacttcaacgattcatctcaattatcacaggattaacgatttgaagaaataaaaccctagcaacaaaaaaatcgtggtccaattgtaaaatcacagaactaacctgcgggagtttttcgctttccaaagagaaaactcatgacgctagatcaaacagtcgaaaaacaatctgaattagaaactcagctgggatcggattggatcgagtagtcgtcttctatctggtttgtacagaaatacaaagaaagaaagaaaggaggaaagttttgatcgtcccaactcttacgcgttgtatccaactggttgaggaatagaatcaacgacgaaccctctaccttaacacgtggcgtgcatctggtaggtagggcccatctgatcgttaaacttagcgcgctcactctctgtttcttttttagtccgtttaagcaacaagtcttagatttgggccttagaaaaatgagtgaatcctcacaatgggcctttagaaagcccagtctgcgaaaaaagatgttgttttgctctttttacagtcatgataacttaccgttaccaagaagtatttgaattggtaaacttaattgtatctcacttcttattcataacatttatgtaggttcttcaaaatgatatgtttaatttttttttcgtaataaaaaagtaagaattcattcgacatacacacattgaaaaagttaaaatatatttatcgtacaacaaacgttacacaaagaaaatattattctctctgttagaaatggggagggagagagggaacagcatataaataaacaaaatcagtgaaaatgtgttttctaatagcatttatcaattattgaaactctttggttaatttaagacttggtagctaaataagacttatgtcttagttttattttctttgaacacgtacgaagtttgtatttttttttttttttgggaaacgtaatttcgaaagtttttttttttttttttttttcttgaatacctaaaacattcattagaaag

SEQ ID NO: 233994 - DNA, 3092 bp, Cannabis indica
ccatcacgaaagaactccacagttaagcgtgcttgacctggaacaattttaggatggatgacctcctgcgaagttttcctaggaagcgtgcgagtgacgaaaaatcatgttggaaacactcgtgttggtttgtagggtcagtcgtcattccatgaagtagccagagtagcgtacccgtgtataagagccattcattctgtgggtttaagggcccaatagaagcctgaaacggggacgttacagagatagtagggatttgtgggatcttcaagatgactcttcatagtcatcatttggagactctgatttccttagatgatcaaaatttaggcagtggaaggtgtagttactcctgttcctacttgagacaaggtttgatcatcactcgacatggtgggagaaaagaaagttagagattggaacagaatagagtgtttgagagaaaagaaaggctatattctttcatcagaggaagaaacacggtgaatgaaagcagaggaggaagaaagaattaggatcgatcaggggaaagcatctctttcctgctttgataccatattgcgaaatgaaaaaaattaagagtgaagaaatgagaatctgttattgaagaactgaataaatgaattacaattctaagctagctatatatacacgaaggttaaataaaagacctcagctgaaaaagaaaattaactacctaaactaaatgacaataaacatagtaaatatatcccctaacataacgataataactaactgagcaactaatactaacgaaaatggaaatgtaataattttcttatcttgttatagttttatattatttatatttatttattaaagcctagtttttagtgaaagaattttgcaggtctacacagcctagtgtgtaaatttataaagctattatagtttcttaaaaatatattaaattaatttcgagaaagaaaaactacatgaataagaattattgaagagtaaaaattttatttggacgatatgtacaagtgagatatgatgatgacaacaattctgaatgtagtaatgactataataaagatacaataatgataacaattttaaaatcatataatgagttaatgagatgatctaaatgtaactttactttaaatgcaatttttaaaataaatatcataatacataatttattattttacttttacaaaaattatgtaaaatatacgataataaatatacatactaactaaaaaatatttctatgtactaaccaataaacaaaaaaaatcctttatttttcaatatatatatatactaaatgaaagttacgtggcgagccacgtaaatattagtttcatttaagttttagtgaattttgtttaagaattcggtaataaattgtaaattatttattaaaggatatgttttatgaaaataaacttgttaagaatgtcataattgtgtatataaacatataatatacacattgttattcaaatgttttaattcaatgatcatcgttttaaaaatatttcagaaaaagaaatcttaaattaagcctcaatctttccactaaactaaaccagattttccacataatatcgcgaacaaacaaaaatatgcaatgaagtaaggctcactgtcactgcattatgctcttttgttcgttcataaaccgcaggtgatctttgatcatttgttccaacttcctgataggaggagaagccctgctagagaaaacttcatccatctcgtggtgtatctcgttaaacatttgcttaaattgtcctcagatcttcacattcatcttcaggaacacgttagccaggtactgcttgctaattttgaagacatgtttggtaagacaacattgtgacattaatacaagatctatctcacatattcgttcgagatcacctaaaacaagataaagaaagtcagaacaaaaacttcaattcaaaattttggcttaatatgaactcaaataatcacaaggaaatgtcaattgagtaagcttagctgacaaacattatttatgatttaccatatagggagccattgttgtcaggcaagatagctaacacaagctctaattctttttcttttgttttgttcatggaatatgcatggtaaacatgcttcaatgccttctctacttgctctggtcgagcattgtaaattggaataacaggtttcgtgttaaattcctgcaagcccacaccaaaattaggaagaaaagaatttcaaataccgaactattatatggaaacatgcagacaaaatacacaaaactttaccatgccagatacttgacacatttgagcaagttcactgcaaaatccacgagctacactctcttgcacacttcttgagaagttaatgcacgcccaccggctaacagtcattccattaatcattttctgtattacatgaacaaaagacataaattgaattagtcattatataattcaaatacttaataataaatacccagttaatacttaataggtacacaaataagcctatggtggatacatacacaattaccataccttgttcatcatattccattgaccaacttgcggcaagcaattcttttcctttccagtgtcatgatactttaactgcataaaagaaaaccaagacaaattaatattataattaatataactgaaaagttaaaatttcatgtatggtagaactataaaacatgaaagtgaaattggattgctccattacccaaggcgcaggaagaatttgagcttcaacatatgctagtttttcactgatcctgattccgaactcttttgcataaggatcttggtcgtaagcattatgttcaacagtctgtttaaaatttaaaaatgaattatttccagtcattgttcattctgtaccagtttccatacttttctctcataaacagttgtagcaattaaagtagaaaagtaactctatgattagagcatttcatcctataatttaattccaaaaatatgcaagacaacaattaaagtagacctacaaaacagaacaattagcaagtacactaacatttcatccatcttcctattacatacaataaaataaaagatttatgcgaatagagggct

SEQ ID NO: 233995 - DNA, 1040 bp, Cannabis indica
ttaattttaattttctttatttaagactgagggatccattaatcttataataatgtattattatttgtaattaattttaagtacacccctgaattaataataataaataaaaaaatacagtccaaacctgaatccgaaccaaaaccatttccttcaatagtaaaattattattaaaaaaacaatatgattatttaaatagaagaaaaaatgtgatctttgacgataaagacaaggagagatgaaggattttgtttatgttttatttatttatttatttatttatttatttatttatgtataataataacaaaccataaataaaataaagagttttcttctgattctctctcagcattttttgtaaactccgctttttaattaattactcattcatctaattcaaaataataataataataataataataataataataataataaatactttctattatattttttaatatattttaagattttttttcatttttacactttaaaacattacataacaactaacagaacaacttaataaatcgtaatcaaaattcatagtgtaacctacaaagcattctaaaccgtaaattttaaaaaagaaattaaaaaaaaaaatatataaaataatttctccatattttattttatatatttattaataatatagataatgtgaatgaaagaaaagaaaacaacaaaaaataatgatgaaaaattttaaagtattataagttatttattgaaaatgtccttttaaaaattttcaagtctattttaactttgtagctattaggacaaggcatttatttttgttggactttttttttttgataaagaacctgtatccattatgaaaattatcaagaacaagatacaagatacaattaagattggaccgattaaatcatccataaagcttcctgctctaagtttaaagctgtcttagctaaacaatagacaacattatttgctcctcttgagatgtagctaagagaaacattagcaaagtaaaactagctcaaatagacaataagattaa

SEQ ID NO: 233996 - DNA, 1215 bp, Cannabis indica
tcaccaccccgaactcacatcctcactctagtatgaacttgtttttccacatcttacaaagatttatcctcactctcctatcccaaataatatttggtttgtccttgataaatttcagcgattaggttcgggttatgaaggatgaaatttatgtgtgtgtgtgggtctattaactttgatgggtgttaagaaaaactaggcttttggctcaatgaggggtgactattgacaatcaaaattttttcgggttagcttgaaaggctcaatcgtccaaaaatggcctaaatcatttccaagttgtaaagctagctaggatttcgcctcaagaatgacgctaaccaattctagatgcttaaactttctcaaggtgttagctattctagaaactcaaagtatggtgggataacacaagtacacctatttgaaaaaattcctcttaaactagcatttaaacttagcattttcaacacacaaaaatcagggcacatcacaaatgaaaggaaattgttattcttcatcatcgagcagtgctaaaccaagctaaagcaaaaggacatatacttctcagttacaagctaacacaacatagcacaacatgacgacataacattactaatatgaccttaactacacaatgttgctacacaaacaactagagacaaccataaaacacacataacaacaagaacacacacaacaacaataacacataactaacatcattcaaactaaacaatggacacatagttacaggaaatcaaatagattaaggaaagaagaaaactccctcaagggtctggctcttcgccatcaatcgggtgccaaggcccaagaatctgatttggaaaattttgatatctcgggataactttgcgcaagttgttttgcatcgtacgcctcacccacatgtctctttccctttcatactcccagtttatagatttttttttgagctcaataatcccagttgttgcagcattgcctcagcaattcattctcttatgcatcactgtttcaaaatgctgagccaatgctataactcttgggacctgctgctttaaacaacaaatcctgcttttcaacatatttcaataacttcattttctgccttgcacctacaataaaaatcaacaccatagcaaaaccataagtaactgtagaaatttgaaagttatatatatgtaattatttaagtatgtatataataattttttt

SEQ ID NO: 233997 - DNA, 1395 bp, Cannabis indica
tcatatttagggtgtttaaacagcatacttgtgttaatgctgtgaaaaagaatggaggagctgtgttaatgctaccggagactatggccgacggagaaaatggatcgaagggagtttcgtcctacctgtctcgacgtccaagccatcttgtgaaaaggactgctcatgcggctgatggtctcgggaagacccaccgtgctgtggtttcctaagagtcgtctgtacggagtagagaagtcaattgccatttctggctttggaggagagaaagtcaatctgggtgtgagaaaggaacctgagtctttacctgttttgccttacaaacagcctagtctttggtttaaacgctggttatttcaattttttgaccgttagagagaaaaacatggaaagtgggcctggtgttattgggccgtgtggtaagttaagtggacaggccggttcttgtgaggtgtttggtcatgggcctagtaataaagttagtagtaatggtaatgctgataatgggcttcattttatttctagtaagactcaagtgggtgggcctgttttggaggagacttatgctgagtctaactttaaccaaggattggtggggccgtgtatcttgggtaatggctctaattctaatgggccgacttctctagccaaagacaaagttgggcttgtggatgctaatttgtctactaatatccacggagcccaggagcaattaaatgaagaaaaagctttggctcaatttttaaatgctcaagagagcttattgcatgacctcaagcactttgggaaacttgatttgtatgagtttcaaagcataggaggtgacatcggggtcccggcttcctctgaagttaatgagcgaacgacacctttcaagaaacgaaaatttgaagcgtctgcttctctctgctctaggccccataaagttccacgcaagtaccctgacgttgttcgtgtttttccttgggacaccaggaataatgtgtctaaccctgagttggagattgaagatccttcggaagacagctctagctccccgagctgctcgggtatcttgaagaacccgattgtgggttcctttgtgattgatgaatctatttcgagtgggtctgcttactcccacaaccctgtggaggagaatgtcgaatctcctccacaggagccatgagaggtatcgcttggaactgtagagggttagggcagacctctacagttcgggaactgaagtccctgatccagtctcgttctccggattttgtgtttctatctgagctcaaagtggatgctaatcctctggtacgcattttaaagtctttacacttttactttaatatttgtgttccgtctattggtaatgcgggaggaattattttggcttggaaggcgggctttagt

SEQ ID NO: 233998 - DNA, 600 bp, Cannabis indica
tttttaagaagtatctcgagcattttcttcatcttcatccaaaataagaaaacaagttcttcaggaaagaaatagatcaacatggaggactaaagtgggagccaacgcccaggttgacttggtgctaggtcctagccccaaagttgacatgttgtcaacctgggccacttacaacagcagttcagacatagtcttttgggcatattctttattttcatcaaaaatcaagatacgagtgctttcaagaaacaaacggagccatctaggagttagaactgggacccagtgttcaggttgacctggtgccaagtcccaacgcctagattaacatattatcaacctgggcaagtcttccatgcatattcttcgtttttgtcaacaatcaagatacgagtgtttctccattctaaaaaaaaaaaaaaagatacgagtgttcctgagagtcaaacaaaatcatttggtggttaaaactaggaaccaatgcccaggttgacctgatgcctagtcctagcacccaggttgatgttttgtcaacctaggccattttcaagtattatcttgttaggctatttttagcctatgttttggatccaatttatg

SEQ ID NO: 233999 - DNA, 1771 bp, Cannabis indica
tttattttttttttaaaagaattgaaatgtatatacatatatattgataagttaaaggaaatgtcaaaaccctcctcatttcttcgtctttcctttctctcaagctaaggaaaccaagccaagaaacaaaaaaaattgatttgatttctgtccaagtaatcctagtggaagggaagcaagggctcaggatcgttgatcattctctattcaggtctgccgacacacctgaattgaaacttgaggtaagaaaagtacatacgtgccacatagcatatcaagatacgatcatgatcgttcgtgaattagttaattatgaaagtaaagagacaatcattaccgttacgatcattactgttatgaaagtaaagaggcagccattactgtagcgccctgtcccaccaggacgccacgtgtgtgcttttacaaacttattttaacttaatttattagcttaagaaaagtgcggtttaatttaaacttttaattaaaataaacataaatggtattaaacataaaaccatcgttaagtgtgggaatcccctctataaaacttttacattctgttccaaattttattttacaaaataagattacatttcaaaatactgccaaaaggggtggatcctgtccactggtagtcgtgacactgcgattgatatgtacattgctggtaaacctctaactcgtggtttctctgctttacccttccctttacctgcaccacgaagcacccatgagtcacagagactcaacaagaaaagctattaaattacacacagtgtaaaatataagtaatcacatctaaatataacgtacatactcatcattcaacatatattcaacaatggataatcaattaaacgtctacaagacgagacaatctcagtgcctcataaagcacacttaccactcgttattcacgagctacgtatgtcactatcattgcccaaagcaaacgataagtaagaaacctatttgcggtttcaaacaagtaattactcataacggtaatgaccatttctatccctcaatcataatcgaggcataacaaatacatataattaactcgatcataatcgagacactaacgattataatcatttcttatctaacatacttagcggtgcataaaacttttcttaccttagtccagaaattatatgtgcacgcccaacctgaatggaaacaacgctcgataatcacaggtgttatgtcacgataacaaaatccagtaaataccttaaccaatttctgacacaaaccctaaaaccaaaaccggacaaccctaacttctaataactccaaaataggctatacaacactaaaacaacctaaactaggtactggaaatcaccccgagccaaaaccgaccttgaagataacttgaaatttcccctccagaccaaccagtcgatcggttctactataccagaaccaaccggtcgaccggttctggcaggtaaggaaattttaggttttcctccccaaaatcgattcaaaacttcttcaaatctattcaattgttccagaacattataataccataaacacaatatattcaaagcaccaattcacaataattcatcaatttaatcaaaatgacataatcaagtgaaataaaactcactaaactccatccaaaccaaaatcaagtcaaacaaccattgaattcacttaatctaagctcaagtagaccctaaatcaaacttaaaaatattatctaacctcagtttaacatcacagccccgaaacccgaaaaaccctaaccaaa

SEQ ID NO: 234000 - DNA, 835 bp, Cannabis indica
ctacaagaaatattacttttgtcgaaatatgttggcaaaattgtcggcaaaagattagactcaagccccaattaattcaatctagggttttgccaatgtatatatgctctggtaaaagttacctttatcgacgagattcatgaattgcgttgacaaaaggttaaaatagaaccatcgtttggcgtgaacaaatttcaacgattcattaccttttaccagtgcaattatacgtcagtaattgctgggtaaatccccgcgtatgaaaaggttttagcggcacaaatgtgtactgacaaaagtttcaaaaaaaattagtgagaatttttctaggtgtgtttttgtttttgtgggaaagagttttattaacttatatatgcagtaacacaagtcagataccgactcttaaataaaaactcaaaaaagacaagcttgacaagttttcaaagtagtagaatagaacgaaatggacaagcaataacacaagttagatactaactcttaaaaacaatcttgagtgagccggaaatttttattaaattattaactagtaattaaagagaacaatttttttacatatttagtttttataatattggagtaacatatatatagtagtaggagtaacatatcttggagaaacaattcatcatattaaaattatatgtatttttttaaaatggataaaattatgtatgttttaatttgataaaaaaccaatatatatatttatatatgttgacaattaaattgaatggtgttggatcatgtatgtgttggattttaaagaagttcttatagaagaatcaatggtggttggaaatagaaattaaatcac

SEQ ID NO: 234001 - DNA, 505 bp, Cannabis indica
agaagactctataaaagtagtctcagccaaaaatcaataattttttatcataaatgcacaacttcattagtagaacatttaacaaaaacgtaaagaaaaattatggatagaccttatatgggtcttacaatcctcaatgacgaaaccaaatagagaactcataacaaaaggccttcgaatagcttcgaccccaattgggtggggtagctaccctgttttttctgaatatgttgctaaggctaaagaatttgagttagtagtttttaaatgtattaatcgctcttttaatttctatgcggatctccttgcccacgaggctcgtgttgggagaatccatgttgttggttttgctaggaagtagctccccttgtggctactattttgtgttagtcttttgttttaatatatgaatttttaattagacaaaaaaagaatatcttcgacagccaacaaaactatccgactcaagaaccacctctaaaattgttgggtcttcaatcaactc

SEQ ID NO: 234002 - DNA, 997 bp, Cannabis indica
atggacgtcgtctatgctttgaaaagacaaggacgaactctgtacggattcggaggctgatgaatttaatctttgtgtaatctttacagtgttaatggttaacaatttctagggtttttcaatgtgaatgaagcttttggaaatgttctaagaatctgattacagtcaatatattttaataatgaattattataatttcgtttgttaatgatcttcgaattagattgagcttgttagccttttgggtcaatttaaattcagaaacaaaaagaaaaattattttattaacggataaacttttaaccaggaagtttgttacacataagctcagttataagacatagttgattcttcttctgaatatgatcattattacacattgtcttaaaagaataaaaagaattagtaaatgcaatttacaaataacaaaaatacgataaaaccctcccctagctatgaatcatataatacttttcctaattcatcaaacatttcatcacttataaaatttaattcttctgaaggatctgaatgttgtgttgattgaagaagattttcattggttggctgttgttgttgtggtaatgtaatcatgaatacagattgtggtgcatctttggttttgagctgttgcgatgggtagcctgcttggttatgattcaagaaaagtatatcttcctactgttctactgataaattaggaggacttgagcaatttcaccatcattcgttggcggctgttgtgtaatgatgagtacagattgtgatggaggaaggttggttgaagctgttgagatgggtgctctgcctggttttgattcaaggaaagtgtatcgtgttcttgatctactgatagataaggaagaccatcgttccttagccgttgttgttgtgatggaggaaggcttccaatatatgcttcatcattgttgttgtgtttgttggtttcaccccacaacaatttttctcctttttcttctactctactgtagatgta

SEQ ID NO: 234003 - DNA, 1268 bp, Cannabis indica
agcttcatccagctaacaggagcgaggtttacaaccctagcgagttagaagacttctttgtaaataatcgtgatcgacacaagacatacattgtcggccctggaaggaagaatggccccaacttgctattgggatcactacaatcaagtttctgtcgagacatatccagattcaacagttaaagacgtgtttaatacacaatagttttgacccagtaaaagtgggtaaataacagttatacaatttgcaaatcataaaccgcatttacactacttgatatgtaataaaatcccacgatttttgggattattgcagcaaaattatttcaatgaactttgtaattgaatgtccactatgtaattataaatagtgacagaatataaaaaaatgggtggaaaaaactcatatgaaagaggccctgaaaaatactctgaaacctgaataagattgacttgtggattatgcagaattttatctccaaaaccaagtcaaaatcttgtgttcatattctttacttttctatagcttttctttgttctttaagaaatcatcactatgaggctcaaattttgttaacaaaaatctacgttaacactaggcattgtggttatttcttggtcatgtggccatgataccaactctagggatttatcccgtatgacgatagagtcgtctctcgagcatttgctttgtcacagaatattcgtagtgtttgttatctagatctcaagaaaagtacctaactgaagcacattattcatctcggaagtacatttgagtgttgagtagctcattgatcttcaccctccaaattagatcattaatctttaccctccaaatctcataatcttcactttcacagtagagcttttggtatcttcccctttgtctgattgtagaattacggttggtcctattagctacatgtggtggacatctatgtttgaaatctcgagttttattctgtttggacgctcactcgtacctcatttcccttacaggtgattgctcttatcagcggaggacccataaatccaccttcctaagtgttagtcatttaagatgctcgctcgtagttcacttacctttggggaatcccaatgccttctacattatgagcagtggcatggctaccaagtgtggtagtgtggctttgcttgttcatggatgaatacttgtttgaacttatgaaatgtttttgaaacaaagtttttagcaaagaattcaaactgtagttggggaactcaaattgtgactttcaatgaaag

SEQ ID NO: 234004 - DNA, 462 bp, Cannabis indica
tcgctaattcatgggccaccgtctccggttatgcttctatggtacacctctctctctctctctatatatatatatattaaatattaattatatcgatcaactttgtgttgtgtgtgtttttaaaatttgctggatcaaaatctaatctttgttattttttttacatgtaaattatgattaacaattgtcctttttcttaaatttatatgatataaattagatgcttaatactaattgttaccagctataataatttgttactagggtttctaagttcttaaatccttagttgtcttttttctccgaccaaccccgctggcccactttcggtttaggcgtggcttgatcgggatttgtcgttttgctaccgcaattaggtttttgctgatatagttttgtagttttttgtttaggttacttcgattagtctcttctctgtaacatgattttgttttttgtatc

SEQ ID NO: 234005 - DNA, 887 bp, Cannabis indica
cctagtcaaaggtgagataaaaagaggagataggtattcttgctcaaagtctgagattgtacctaattatgatttatttctagtatcaaagtatatgagtaatcatcctaagcgtaaggtttttatttctcatgatgaggaagacatcagatgtgattgctattggtttgagactaaaggaataccatgtagacacatttttgcatccatgaagcactcaaacaaaggtaattttccagcttgccttatcaattctcgttggatgaaagatgcaaaagacattgatcctaaatcagttggtaaagagagaagatgtccacatcccaatgcagtacaaaatactaggtatggtagaatcaacacccaaacgagtttggtatcatactatgctaccaaatctcaaagagcattcacaaaggctatgagtgtgatgtcaacattggtagaagacctacaaaatatgacaaacaatgaagatgatgatgatggaaatgaagattttcggcttacaattcaaattgacgatccaaaagtagaagcaaataagggtaggccaacgaaatcgcaatcctctcaaagattgtttgctgaaagtggtagtaaaataaaggagctaattaagcctagattatgcaaaacatgcaaatgtactggacataactcaagaagttgcccacataagcaggatgatggagaagaaagctcaaagggacaaaaaagttgaaagagcttcttaaatttggactggttcttaatttttatttgataataatcatattgtttgaagtatttttttttttttttgatattataatttggacggatactattgttcgaaatattttaccaagatctagattaactaacaagtatgtttcattaacatc

SEQ ID NO: 234006 - DNA, 1136 bp, Cannabis indica
ttatatatttaaataattataaaaattaataccacatatagttttacatataaatattacgtataatacaattcaatataatataatacaatatattacgatgtaatatgacataccaaacgaactttagtattattcaatacaatattatatttggtattcctttcctcttgatgcttcggtggttctggggaaagattttgtcgaattgggggtgtgatatgggatacggcatgtgtggtttggttagcgtggtcatttggtgtgttagatcatttttttgtgaatgtgtcgacggagctacttgcctttcgtttagacatgactattgcgcttcaatatgatttcagtatctctgtgattaatagtgattctactgtgactattggttaaattaataaaagtcacataaattttagttgttagtctattttattagatatttaataattattagctgctgttggtggtggttcttgtagcgccatttcgtgttcggcgaatgatgttgcccacacactgataatctctattattattttaagagaatgtatttggatagatacttgtccacaaattttaaattctttgataacaacaaatttattttaataaattatttttttcaaaaaaaaagttaatctatctttacaataaaatgttttttttaccataaacatagcatttgtaaaagttgaatctaaaacacttttcttaaagaaagacagtgaactttgggaatgttgttggcaaaagggaagatattttactcttaattaattgaattaacaatttcatataagttgatggaagatttaataagaagaacaaggtttaataggttagaaagaatccattcaaccattgattttcttccactaattattattattattattattatattgtgtgcagaacttataccactatatcatgttttggttcattttatgttgaattgatggatatgaagaattagtttttaattattattgtatctcggaaattgacaaataacacggatgcattatagaatatttaggctccttttaggttgaacttttgtgtttcttgtctttttgatgattaatataacgataaaagtatttcatgcatgaatttcattgataaaagtt

SEQ ID NO: 234007 - DNA, 784 bp, Cannabis indica
cttcttcaatataaataaaataaatgaagtaatcataagttttaggtgtaggcatggatagttcattaattgggccacacgtgaaaagcccatttggggcccattacaattagagggctctcgtattagctgtcaattgggcctctttgttatggattttttgcttcacaaataaaatatcaattttattgcttatctttttggctaataaaaaaacaaagaacaaaaaaagaagtttattactttcatgtctgtaggtcttctccttgggccatttaccctctttgtgattctagtattcgcatgtgggacttggtcaaattcatttgggaccttaaacataagggcattccttcagatgaggttttcttttatgcttcgattgttatagacacaattttagcgactgtgcaatgaaaaggtacataataatgctactattgatgtgaagaagtgtattgattccatttgtacttcttttgcagatctacatgcttctattttccttacccctgcttcttacctgaaggaggactggtctcctccctccaagattggataaagcttaactgcgatgttaaagtggggtttgaaagcatgtgtgctgcagttgtggccagaaaccatctaggtcaagtgatttggattcaaacgtctcggttagatttctcggatgtgttatgtggcgaagcatcggcttgttgtctggctctttcggctacgatagacattggctccgacttcgttattgtggagagtgactcgaggatagttattaatgctc

SEQ ID NO: 234008 - DNA, 617 bp, Cannabis indica
gtaatacttcaaatgcaaataatcctaatcctgccatggcctttgcttttcaaggaaacaaaaatgcttggcagaaaatggacaatcaaacatccaagaatcaacctccaaaacgaaataggccattctgtacacactgcaacatcctggggcataccatcgagaaatgttacaaaattcatagttacccacctggtttcaacaagaacaagtccaaagaatccagtgcaaaccaagttcaaactgctgatgagaatggtagcaaccagcaagaaaatcatgctctacttcctcagttaaccacaacacgataccagcaattactcaatctactggcatctcaacaatcaggtctaaacacctcagaaccaagcactttctcaagtaattcaggtatcgttttatctcatcattctgaatctcctttggataattcttggattatggattcaggagcaacaaggcatatatgctcaaatataaagttgtttcaatgcttatgtaaaatacctactgtcaaattaatcctgcctgacagtacctgtttctatgctaatcaaagtgggactgttgttttgggtaaccaaatcactttcactaatgttctctatgcaccc

SEQ ID NO: 234009 - DNA, 734 bp, Cannabis indica
aaacaatatcaatgcctggaattatgttcttgtctatcgcagagccaatcgcctttgcaccataccttgctttcaactccacgttaccatcagcatgatcatgatgatgtcgagtattcagaatgtatgtcaatttgtcaaatttttatttttcttacttaaagcttcaataacaggcacaacttcaaaaggattaaccgcaccaactgtgtcaatatccacatcatgcagaagatacgcatacttatcgctaaggtatggtaccaattcaatttgtaatgaggatgacttattaacaaaactataaaactgatcaactcgaagggttctactagctccaggtctttaatggagacaagaacagcctcataaacccatacaacaaaccctttatgtggcaaagttgtctcataccctgccatacagaaaacccactccttaccctagaaaacaaggtaaggagcccattgcacatgaggatgccttagagatcatttgcatccccttcctttccgaccaacttcttcgactcacctttcttttttcctcttcaacaatctcagaggaacagaggagaagaagaagagaaagaaagagaaataaaagtggtgtgtaattatatttattactatagtaaattacacatgttattttgaaacctgtattttgcaaaataaaaaatatttaaaattgagttcaaggtcctatttttactattttagaaaatataagat

SEQ ID NO: 234010 - DNA, 1383 bp, Cannabis indica
atgaattatgaagaaaaaaaatatatatatgtatgcattttcggagttataatatatatgtttaatacaaataaataggatttcaactagtttaaagttattacataagactctcgtactgtaactatacttgtgactcgtgatcacttaagcaaatggtttttaaaattagcagaattgaactgaagtaggtattttggggaaaattttgtaacaaaaaaggttcaacgattaaaactctacaaaggtcatagttgagaggaaaaatcatatttaataggaaaaagaaaaggaacagtatttgattggatttatgtgttcttgttcattaaaaagatgcaagtacaggaatcaatgtaagactcaatcatgacagcagaagaagaaacattgtcatttcatcactgggttttctagttgcatccctatgggacttttccaccactcttggacctgctgctgcagcccaattcactgacagtaatattatctgttatttctttaaatagataaatatatatattctttgaaagcatttgcaaaagaattattggctatatgtttgtatgtatgtatatatgtatgcagtgccagcactaagagggaaggactatgggaaaacgaaaatgaacaatccggattatactcaaacagaatcaggtcttcagtataaggttactcatcttccattcccactgcatctgccattttctcttttatatttaatccttttctatcttaatcatttattcgagctgaattcaggatttgcgagttggagaaggccctactcctaagatgggagacactgttgtggtatgctctttgcccagattactataacttaaaacacccaaaaagtttcactcttccaatgttcgatttgtatctattttcaggttgactgggatggttacacaataggatactatggccgtatatttgaagctcgaaataagactaaaggcggttcatttgaggtattatttgctgctacacatcctttaaaaccaatacaattatgatgagtatttgattcaggcactgtctttcgatcttgcagggtgatgacaaggattttttcaagtttcgaataggatctcaagaggtgatacacactctttttccctttatctcttgttactaggatagggggtttatgctcaattgtctcacacacaacaatgtagaatttattagagagagaatagaatgatagattgagcataagatgaaatctatgcacccactgacaataatttgattatataaatggatggctatgttggttcttgaatggcaggtaataccagctttcgaggaggcaataacaggcatgactatcggaagcattagaaggtgctgcatccgctttttcttttc

SEQ ID NO: 234011 - DNA, 878 bp, Cannabis indica
aatcgcatcctgcacatccccctaatcctccatcagcttgctccccttattggtctcaaccttttgtacccatggaagaactcaccaaaaccctttctgccaatctgaacttaactgaaattgagacaaaaatacattattttactgaaccatctgaacttcctgaagatgagaacagggaagagccttcagctttccttgctgtcaagctgctgactacttgccactttaaccctgaagcttttaaaaagcgtttaaaagaaatgtggcctgaacacttctcaatcaatgtgctagaaaaagaacccaacttcttcaccgtggaattcggatgctttggtgatcgcaggcgtgtactcattggacaaccatggcactttgattttaaacttattgtgatgtcaccccttgaagctggttcggttgtcacaactgatatgctcacttcgactcctttttggatccaagtatcgggtattcccttcctcaaacgttcccgggctcttgctagaaaacttggggaggttttaggccggttcatagaggttgacactgcctctcttaaggaaacctggggtccttatctccgtgttagaatcgagatcgatgttactcaacctcttccccgtggcacaggctttcactttcaaggtacggcagccccagtatggttagaatttcgcttcgaaaacctacctgacttttgccatttttgtggacgccttaaccatattgtcaatcactgtccagaatttcttgcaaaatgtgactcctcttctgccccagccttgcttcaatacgatcacactttgggagccaaaatcctcataacttccaaccctttatacatgctcaagcattaatgaaattaaatttcg

SEQ ID NO: 234012 - DNA, 1805 bp, Cannabis indica
gttctgggtactctaccaatttcttccttattcttcttctcaaagttcctcatttcctatctggaacgaatgacccctgaaggttttcgtttttggatagtgaatctagtggggacctctccaagcagtttatggaggaggattctcctctgccctctctctatattaagtagttcaggtagctaactgcttcgttttctttctttccacagaaatcgtgtctaagaaggtccaacaagaagaagttgagtcagaataggaagtcatggagtaggagaatgctccaaatttgatgctgatcgacagtccatgggagatggaccagtacattaataaattctaaatttatggtaacctctggaaatacgagaccctgcgggggcttgaaagtgttctagggttgtactggaataggctctctgtccaaggagagaaaccaagtaaatgcgctaactattaatatagcttctatttttgacactttctcgagaaattgtaaagaaaattcttcttaccgagttagtttgctttcagtcatttgtaacttcgtgacaataatgaccatggggtctgaatcgtgtggattgtccttttttttagtaccaccgttagtaggcatgtcttggtgatcatcttttggtgtatcttgatgatcatcttcaaggtcatcaaaactattctcctctgattcatcatcttcaattataggattgttaagatttaggtctttaccacgttgatccttgtggcgacaggtcacctcattcaaatcttttgtatcccctgccttagcattagaatcagtataatgaagagcagacttattttgggcgagtaccatgattactgaatgtaatctcgagatggtatcactgcttcctttaactctcaatgaaagtactaaaatgtttaccgagattttcaaaaaactgattataagaaattaaaattgaagaaataaataattcaaagagacagaacaagacaacacttagagttttttacgtggttggaacgttaaagagccttagtccacgagtcgatattattatgtattttagctagaaaaaccttttggaatataatgactatatgttctctgtttttgcctgagcaaatactgcaagagtgttcaacccttaatctgaagggtttgttgagtatttatagagtttacatgaattatacttagtttttctttccttctaatggagagtttacataaaaatacacacacacacaagtcaggattgtattcgtgtggcccaatccatgaggcgataagcttgctgactaggcaggttgagcacgatcaagctattattaccgtgtcctataattgtggataattaattatgaattaattacttgatcttcattttatgtagtttcccattttagcttgatatgatcttttggccgagatttaaggagagttccttattctgtgcgatttgataaaaagagaaattgtgctaggcttccaagaacacattgtctggccttccaaaaatgtagtactgggattgcttttgcatacgagctgtccttggcggaagctcgtctgagcaaagaacgaagatgccttcctgaaaggtccagctggacttgggcttgcctcaagttataatcttttttaggcccactggtgggctttggatgctaatctggagtccacgtaagttccttgacagaaacgcgaaaaactctattaataacaacaaaatacaatccaaaataatataaagcaatcacaacaacatttagctatacaaaaatttgctactcatctgactgcagtacat

SEQ ID NO: 234013 - DNA, 1126 bp, Cannabis indica
ggtatttataggccaactttcttacatgggccatcttggatggttcatcgtagggatgaaatcctaccgttggattggtaggtggcatattatccatgtggcttttatgggtgtcatattctaccagctgtacaggctgggcttcggacgtgtgtcacctcaaggtcattttcatttgaatttctattgctcctaactgttggatcacttagcccagtatacaaggacacacatgctttgcacgataccatgtcgtgagggacaacctctgacatcgtacatgaaaagcctggtcactgggtccgtaccctgacacgcgtgggctgaacctttgcgggccaaaggcataccccatattggttacgattttatacatatacattatttatattacataattaattattattagtaataatataatatttatttaattaaaagatatataagtatatatttaaatttatggtgatctgatatttaatctcaaccacttaaaataatttaaccttttattttaattaaataaatattttaaacctaaacctattatgtgctataaaaaaagagaaaaagatagaaaaccctaatatctcattttctcttttctcttcactttgtatttttgaaaatagcttttgccattagagaaattccatttctcttcctcattgattttagccaaatatgactctaagtgagttgagtaccatcccacactactccagattacacttagaccattatggaagatcatgtagaatgctacatgtcactcattaatggaaaagaagattcgagttcattacttgacaataccctgctacagaatgagaatcaatggttagagtaattgaacggaatgagacatttaattctgatgcattcccaatgtaagaaaattctaatattcatatgtgtttatttatcgtttttaggttgttcatatttaggatattaaattataattttaatccaacatacatgagtaataaattaagattctggtaaaataaatttctaacaacaacaaccctaacacttaattaatagacaaatcatccttcataagaagaaatacgacagttgagcaccgaatagggagcataggtccctccaaggcgac

SEQ ID NO: 234014 - DNA, 608 bp, Cannabis indica
tgccaaaaaaggactttacataactaattataagtacaagtgaaaattataaatttttatagacttttataccatttgagcaaaaatataagttaaaaaaatatgaaaaaatagtataaaatattagccttgtggagttttcaaaatgtggggcatatttttgttttgtttctcatttccgtgctttttaaattttatagggggctatttaaaatcaatggctaatcatagcaaatgattttgatctgtcagatcatgtgcctgctgttataataataattaacaaattatcaagtaattaattaatattaaaaaatatataatgattcaattaaaagttttaggggttgaatttaggtggtgtttggtttgatggaatagaatggtaattataatggtaatagtaatgtaatagaataagaattgtaataggaattgattgtttgttattggaatgaatattggaataggtagtaaattgacaaaattatccatattttagtaagaaaataatataaagtaagaataagatagttattttgagtaattataatgagaattcatgaagtataaaaatttaatcacttttttatacaagtgatgtaata

SEQ ID NO: 234015 - DNA, 1067 bp, Cannabis indica
attttatatctatatggaatttgatttgttatagataatgaatgaatactaaatgaaatttagtttgctgcatggcaatgtagtgtgctttactaaaattgcttctcattatcacttcatttactaactttaattagattttgttcatatgctatcaacaattctagaatatgaaagctagatcatttggctgctattttggtccgtttaaaagtttaagctatagattggaagaggattgtgttctgtatgtccgtattcatcaaaatcaaggttttcttcttcttcattgctcatatatagacttaattgttgagaagtaattattgttattttgtttttcatatcgattactgtttttgaattttgatttggggagatttacttctttagggttatgagatattgatttggggctatacccttctttaatgaattcgttattcttcaaaagatgcatttttttttcctcatcatgacactcctttgacgacgttggtaaaaataagaaaggactgcagaatcataaattaaaaataggaatgtcatgtttttgttttgtgtctctctctaattttcttagtaatttattagcatgaataaaactttcttagacatctagaataagccctccttgtttagctattttcccattattcttatgtgatcttctgtcaagtacatttggatagtattgttcaagtaaaaaatatataaaattaaataccatcttataaaaaacacaatgatagtaataaaaagctttgcattttgaacttcgccatatttgtaaggaagtgtgtgcattcctccaacaagaaaggcctttggctatgctaagctaagctctgaaaatgcttacagtagtttttggtgaaataaatttaacaaaagttacaacctctgatttgataatttctaagtttggattttttagaattaaacacatttgttacataaattttattggatttagtaatgtttttccatcatgtcttttatagcagtccttttgaaaccaaaagcagttggttgcttcagttgctttgacaaaatgtatgctttgc

SEQ ID NO: 234016 - DNA, 5615 bp, Cannabis indica
acagaacaaacactactactactctttttagtggttaaagccttaggaaggtcatttggatcgggtcctaacctgttggttgaagcaattaccatagattgggatgatgatttcatcatcaagctggaaactttggctgatgttggttttgattttgatttcttgggtgtgagggaatggtctctgtttgtctttctggtatttgttggaggaggaagaagagggcatgagaggcctctgtttattggcgatgatgaagaagagaaggggagaattggtagaggaagcaaaggtgggttttgttgtcgttgatgatatgagttattattattattattaaacaggtaaatagaaggaaggtgttggatgatgccggaaccgttgaccgttgccggagctatgttttcagatggtttattgatataatagccagaagaaattcggctgttctttcttggggttgttcttttgatcatcacttgcttcttgttattgttgttgttgtactcaattgttgatgaagagtaatacctgtcaacattaatcactgcttccataactaattataattcaaaaaaattatacacaaattagccgatgatctttctaataacacgatcaataatagccttgaaaaaaaaagctgatcaaatcaaacgctagcaataaatatttataagataataataattaaagaaagaaagatgagattaatagacgttctatttctcgtaatctcaatgatcatggaaatgaatttaacaataaaaatggtgtaaacttaacaacagaatcttcttcttaacgcactctttctctctctctctaagctctatttatatttatatatggaagtaaacgatcggagccacagccacaggcatgggcaaaggcagagtctttgccttttccaacggctactttataaataattatttttattattaataattaaagaaaaaagaagtcattgtcaatccaaattgaccgacaaccgttacagtcggctaaactacactcaaatggtgggttgggtgggcggcaaccgccgattcggttatgaccgttggatgatatgacaatattaagaaatagccgttgagaggatttggagcgttggatcattcctcggtttcctcgaagtttgtctgaacataatcaatcctagccatacacgtcgttattcctctcctttttatgtacggttccaatcactgtgacctcacgcctcggcaagggttggctgccttggcttttgatatttttatattaacaatttctttatatataaatataatatatatggattatatgagtgggaaatctcaatctcaaaatctgtggcattattattattattctttttttacgtaaagatggatgatgaggtgggcaatgtaattgacacgtggcttttctctagccatatatgtgacacgttacacgttacatgtaacatgactacggatattagcatttgctatttgcgctattatgagataatgtcttgtcattataattagttagtaaatttttataatttttattaaattatatcaataaaattaatatacctcataagagcatctttaataattaaatttttaaaaatgcttgttaaggtagacaagttgtaaaatataagtgttatacttattttgaacactaatatgatcctaaaacatgtaaaaaaggctaggatataaaccaactcaggctatatgaaaataaatacgttcaataactcgtctcgaaaaatataaatggtagacatttgagcttctccttaaacatttaaggatgaattatgaataataacaactatcttgtaagaccaaaggtgaacgacatgtaaaaaagggtcattgatacacagagtaaacaataaaacaatagttagatggaaatgatagataatgaattctttaagagcttgcaagtcattgatccacatacttgtgagtatattgaaagactaaagaatatgtatagaaagtgattattaatactgcgaggcgtaaaatcttagtcagcataaccgctttttaaataaagacaagagtggttgtgaggttatctatttatcccatgtgttataaatatgaaatgtgaaaaagtgtgcatgtttcaggagcagttacgaggataggattttaagagaataactgcctatcccagacatctataaataggagaagacttcccagaattagggacgacaaaaattaagaatcataaactcgtctaatcccaataataagagggactcgtagactataaaaacttaacttcaaaaccacataaaaatcttcttgtttatatatattattactattattatttattatttgaagtttatttattaaatcaagacttgtttattggttaacgaaaattagcgttaatagtttggtactttcattgagagacttgtaaaaaaaactcaaaaaacacaccttccataaataatattcaaacttttctttttctccaaccatgtctaggcatacccctcaaaacgatgacaatcaatcgagagaaacaactaagcgtactgggaaagaaccccagggtacccaagggacaaatgtgactaagatcccacactcgggaaggagaaatactgatgggggttttgagcaaactggtgataaaatccatgaaagatgtagtcaggatgcatacgatcccacaagatacgtaccatttgtggaattaaaaaataaataacttcaatagagattggcagaatcgaattggagaaatgataaattggaacgcgaggctgtagctgtaagagcggcacacagtgatgcacctcctaaccaaccaaacacatccataaggcgacataggggaagacccagaaggccgagaaccaagagaaataaggaaacccctactagagaaaataaccgcaaaactcccacgaatccctaggatgatcaaccagggaatacgagggatattctagtggacacggaatgtccacagaatctaggaaacactaacactagacaaactcagtccaatgatctaggatcttctcccggtattctaaatcatgggagtacacaacctaaaaactcagaggtgtctcgtaggaacatggatactagacaaaagcgacaggatgatcaaggatttacccatcgtaatgcgaggaatccaaggggacaacttaggtcatgacacccaccgaggcacccgcaagggccaaaccaaaacaaaagagatagcaagtatacctacttgagtaaggactgtgtctcaatctcttttaaaggcataggcctactcgagaagattcccaataaatggaatcaaatactgtctcgagtgggtcgagaacacatggtcagagtagatcgaccatatcacatgcaagggaaaggcggacatgaagagatggaagtactcgttatcgttcttgtgatgaataagagagcatgagtaacttgcaaagtttccagtctgaaagtttcttagcgacaagattggtcagtaattatgaccggagagatgaaaggcaacgcaaacccaatctttctgaatatttgaactgcagacagcctgacttgcgtgagcagctgagccgcaatattccagaattctgagaacgattaaatcagaacacaacaaattagcattaacaagccgagcaacctgtcatggatcccattcaactaagggttatacagttggaggacaagttcaagcaatatcgggatagagaatatgagaaactgttaggatatgattctaacgaggaaacaaaacctttccacccattcatacccaactcccgatttcctcaaggatttaagaatccccatgtcgcggaatacgacaaaaccaccgaccagttgcacatctgaataacttcaacgctataatgcgagcaaggaatatgtccaataacttatgttgcataccgttcccgacatccctgacttgggcagcaagcagttggaatgataaatttacgaatcattgcattacttcatgggagtaattatccaaggaattcaaaaagtaattccaagccgcaagggataaaaggccagaagcgtcattgctaacaaatatcaaacaacagttagtggattcactaaaggcttatatgagttgtcttagcacggcatcaacgaaagtgagagaattgaatgactattcagttaaaaacactccaagctggtataactactgacttgtcaactgtgggaggcgagttgtgggatgatttgcaagggtgcccagtcaggtcgatgaatgaattcaatgataggcattaatctttgtgcgaaaagaggaagcacgcaatggaacaaaaatacttaagtctggctcagaagataaacccagctcaagtaccgctactgcaagtactgtaacgacgaaggtgggaaatgcgagcagtgggaatgggtttaatggaaaaagaaaagatgagtcaaaagattcatcaaagaataagataaaacagaagaaacacaataaatatgttcccatatattctgtttatacagaattgaatgaaacttgtgaaaatatctttctcgcaaacgagaatcgagtcgctttccgaaggtccgaataaataaagaactcaagaagtaagcgagatccaaataatatttcgagtttcacaaggatattggacaaaataccaaggaatgttaccaattgaaagacaagattgaaggactcatttgccaaggttatttcaggtagtatgtgagaaacagggggagcaaaaccagtccaacaactaaaatcaaaaccataatgtacaacctcccccagttgagggcgaggatattttggtcatttttggaaggccacatctcgccgagactagaaatagtgctcaaaagaggtacattaatcaggttaaaaattaagagtcagcctttgcacctgaaccactcaagcatagaatacccaaggaaccttcaataaccttcactaacgaagatgtggcaaacgtgcaatccccacacacagatcccctcgtcatcacagttcagctcgcgaacaaaaaataaaaaagggttctcattgacaacaggagttcagtaaatattctttataaagaaatgttaaagagaatggggttcgaagatgtgaaattaaaaatatgtatggtaaacatatgtggtttcattggggacagtgtagcgagcctgaggatcattgaactcccacttaccatgggagaaccttcactatcaacaacccaaatgtaggagttccatgtggtggatattccttcagtatatgatatactaatgggtcatccatcatatactggaatgggggtagtaagttcaataaaacatatgtccttaaaatttccaactcagtctagagttggaatagaaaaggcgaccagctaacagcaaataatgttatagtgatgagttgaagaaaagaatagcaacccactaattgatggtaactataatagaagagaatgagatatgcgagatggaagatggaagatggaagatttggatcccaggattcaagacgagcacaaccaactcaagccaattgaagtgttgatagaagtgaatttaaacccaaacgacccaaccaagtgtgttaatatt

SEQ ID NO: 234017 - DNA, 1312 bp, Cannabis indica
attaatttattccgataacgattacgctttagtaaacgtgccattagtgtaataaaaattgagattctactttcttccaaaaaaggttagatcactttgttaataattcttcatgaatgaattgttttccaaactctcatgtatctcaccttactttttgagagtctgatcataggcctattgctttggccacgacccaaggtgttggggaagcaagattatttttcattttaaaaatgcttgggcttctgagattgagtgtaaggacattattgctaatgagtggagttccaacgctactgatcctctttagaatgtgatgaaaaatgttggtgttgttggtgaatattacaatcttggaacaaggaggttcataaacatcataaaactgttattgacaaaaagttgaaagatatggcaattcttgatgctaatcttaatcaagtttcttgtggggagcttcggaaattagaaaaagaattggatgttcttcatgagaaagaagaaaagtattgggcctctcgtgctaaatccaattggttgaagcttggtgacaagaatactttctattttcataagtgtgcttcgagtaggaagaaaaaaaataggattgctatgattcttaactctgatggagtgtctgtctctgagatgccatgaaggatgtttttgtagagtactatttatctaaattattcacttcagttatcccctcttgtagtgaccttgattgagttgttactgttgatcatgttaagatctcgggacttatatataatcagttaactcttcctttctctggtgaagatgtgaagagttcccttttcaaatgggtccttctaaaagtcccgaccctcaccatagcatgacattttgtttttatcagaagaattgggataaagaaagtgaggatgttattgtagctattttggcttttcttaatggttcttcaactctcgaagatattaataaaagtcttatttgtcttatttttaaatttgattctccttcaaagcttgttgattttcgtcctattagtctttgtaatgtcatttataaaattatcactaaaataatgactaatacaatgagataagttttaccttatgtgaattctgaggaacaaagtgtctttctttccagtcgtctaattactaacgacacttttattgggttttcgtgcattaattcattgagaaaaaaaaaaaaacgagttggtaatcctgggtatttttctatcaagctggatatgtcaaaagcctatgaccaggattaatggtcttttttgtaaaaagattatggagcaattggg

SEQ ID NO: 234018 - DNA, 1353 bp, Cannabis indica
tttttattgattttgacaaataaataaaaatatatataaaaaaaatgatgcattattagttcttaaacaaataaattttggaaaaataattataaatttagatataaaatatatattttttttttaaaaaaaagttgggttggatcagattcgatccgtataaggcgggtcagatctgatccgatccaagtatctgatctagcggggcggggcgggacagattcgtacatgatctggctcaggtcggatcatagtcggatcagatccgacccgccccattgacattcctaatttccagtctcttgcacaccaggtgtgatcccagccagacgggatgtcacaccttgacccatagtaggtggttgcgtgcttggttgctcaagattggtaactggtgggacccttgtattcccaggagtctgcaatgtaggatcaaccaacagtgggtcaacctgatcaaccatgcctctgcgagtttgcaccaccattttgtgtgtttgatcaaacttaaagcaaagagaaaacttggattattgctctcaatgaaagcaccaaaatattgacctcacttttagccaacaacaatgagtcaattaataagcgataagaaacgtaatcaagataaggtaagaaccaataaacaataaagaatacaagattttgaagtggtttggctcctttagttcggtaatagcctactccccttagattgcattaacacaagaacaaagaatacattgttttctctattgaagctctcacaatgaaatctctgagtgttttctcttagatctctctgaagtaattctttcgaccccttttacagtgaggatggatcactatttatagggctaaatgcatgaggaaagatttcccttttgcttacaatatttataattagtaagaacacacattacatatttagaatacatagattgaggaatttagatagcttgtcatattcctttgatgcgatccattgattgtagggattgcttttgtgcttcacgatgtacgtcttgatacattgttcgaatcatctacccttaccatgctcggtcaggcagactctatccgtgcagatgtatgctgagctctgtttggaatatctcttcagctagatgtaggaaataggagccacgtgtcaccagtatgtgttgccacgtcgtagtgtgaaaaatgggataacagaagggatgaaactatttggaatgattttagagtgccacatcaccgcctcatatctctcctttatatatatcgatgattgatgattagctaataaaaattataaaattacatttactacatattatttttttaatatatatatatataataatttattataaa

SEQ ID NO: 234019 - DNA, 553 bp, Cannabis indica
atttcccgtgacaggttatagaagatagagctccaggacacttcgctgttatttctaaacatgatcagaaataacagcgaagtactcagttacctaatttatataatatctttgtaatcagttacctagtagaagtaattaagttaaactaatttatataatatctttgtaatcagttacctagtagaagtactcggcgtaaaagggccaaaagacagcggttgagagaacaagcgaaggccagagaaaatgaggtcgtttgattttctgatgactagcattttattattattttctttatttcacattttttatttatattgaataaaattagtggagggatttgtatgctcatatgcacaactcagacgaaacgtggttagctttatgctttagtacaatagtattagtactctctacttctctgcaaataagttgattatactggatttgcagctacatcaggcacaagtacttaaagcagataatcagcaaacatcaagtttgcagtcacatcaagcacaagtacaccaaacaaataaccagcagtcat

SEQ ID NO: 234020 - DNA, 1183 bp, Cannabis indica
tataaattaattttaataaataattaaatatataccgtaaagaaggtggtgggtgccggtggccacgaagaggatgagggtcgtgattgggaatggttggtggttgagtgaacagactgagagaagagagaaagaaagcatcactggtgatggagctcaaacgggggtttcttagttgttattgtgaagacccggtttgactagtcaaaccgagtatatatataataattaaataaatataatataataatatatatgtacattaaaaaaaaagaagagaatttcttttatatacagtagcagcagcccccttcgtcctctctctctctttacctatctctctttctctctcttcaatacacaagaaataaaatctataaacctccataaccaccacactccggcgacctatttttggccactgcccgacctcatgcgcaggaccactcaaacctcctagtgccggctacctcacccgccaagcggcgccgcttctcttgccgccgttagcttaggatcgcaagccaaagtttagggtttcaaactttgaacggattttccagtcacccccggcgtccgtttgacaaatcgtcttcaccactaaactcagctcttcgaggagaacaacctacactaaaccatttttcccggttcgctactttttccggtgacatttttgtagctctgcccctttccggcgactttccggtgacatcgtgtaccgttttgacaaacggttggcatgggtgtgatctactcgtcgaggtggtcgttttgatatatactactcctatttttggcgacatttccggtacaccaatttttaccgccaccgattgttaatgtgcaccgcttaggtgaggcatcggaacctcaaattttaaatatagtcatattatatgtcgttggactcggttttgaatgtaaaatgcgataatgataattatttaaccatttggtggtataggtgagagtaatatgtaagtttggactaaacaattggagctcaggacttaagagcttacgatcgtcttttggaaaaaaattaacaactccggagaggtagggactcgacttgattattggacttgatctttaaatgcgttgtataacattagacatattctaatttttatgatttacaaaattgtttgaaaaattgaaaacttaatttgcatatttt

SEQ ID NO: 234021 - DNA, 1157 bp, Cannabis indica
tcattttatatgcgagcaattaacattttgccatgttattcacgagtagttaatatcctaccacattatttacgagtagttaatattctgccattattgttaagagcaaactttaaatattttgaacagttttttttaactactttaaatacttctttatttctcatatgaatagttaattttctattcatactttagcttgcgtactatttttcaagacacattatgatatcttgtttataatacatgctataatatgtgaaccgttatttattcagatcacacttagttttatattgttttatgagaaaaatctcatttacaactgctattttattttatactataagaaaggtttcaaaatatttgattttatgctgtttcagaccaacttttaatcaaacatcgttgtaaaaaaaaatttgttttctaggtctatttgcgagcctagtttcttttttttttttttttgtcatatacctctaggtagaatctagttattgtatatgccctccaagtaattttaaagaaacaagctttatgattacttgaaatactcaaatctttaggtaaaaataaagtataacaattacaaagatgaactttaatattacaaaatacattactggtaatatggccataagtgttcaatattctagtgattttgtattagcaagtcattaagccatgctaatttataaactttagttctaactatagttttgataatgtacgggccttcctaatttgggttgaacactctggctgctagattttacgtatttacaaatacacgtcttaatactaaatctcctattttaaagaagttttttgaactcttttattaaagtatctaaagatgcggtgttgatatgcagcatcagttatctgtgactcgatgtgtttttcttaaaaaaaaaatccaaggacatatttagaagttttgtgttttattcctgattatagaactcacgcctgtaggtcgtaatatttacttctacgggtaatattgcttccgagccaaatgctaataaaaatagagtgtgtcccgatgttattttctttgtcattctatgggcccagagcaattgtggtagctcgtcaacccatttatctttgactgcgtctaacttctttttttatagtatctttcaagg

SEQ ID NO: 234022 - DNA, 1115 bp, Cannabis indica
aagatacaccttattgatataaatagttccatttaagcactcctcaactgtgtagtctcatatctacacagtttcataatcatcccacttgaccttctccaggcggtgtgggattgtacaacttacccagtatttctcttcaaggatcacgggactaccgactgtcacatgtggtctaatatataattataaatcttgatgtaaaatttaattaatatgtcatttaatgatcattttataatttattgaaaatataaaataacagtttgtttaataataataataatgcaagttatttaatgtaaagtagttaactaaaatttaataataaaatatcaaaaaaaaaaatggtaaatataaaagtaaaatatgatataatgtaaattttgcataatatgctatgttatgatcaaaatttggatcattttttttgttagagtatttttgatagagtactataaatatggtttatatgcattttttagctcatatgaccgtctccaatggatggtgtatattctagtttatatttgatcaaaaatataccataaagttatatttgacctaatttttatatttgtgctccaatacacaagatgtaaattaactataaaagttaatattaccattaatactcattgaaaatatacaaaacaattaattttatttatattattttaataacttataaatataaaaactttttttattaatgaataatattaatgagtggagaatatgtaattaaaaatgtggcatttattgtgggctaaattttttacatgctatcttttgtgctaaatttgacacaatttttagcttaggctaaatttggcacacattttacatcaccattagaataaacttttagcaaaatattctaaaaaatggcaatacactacgtttataactctctattggagatactctaatgtgatctaaatttagcacatattaaaagttgtgccaaatttagcacaaaatataacatgtgttaaattttacaccacaataaaaattactttttcatttactttttggccattcatcaatgacattaataattttttgtatttttatttatatatttaatatacttttaataaaaatttagt

SEQ ID NO: 234023 - DNA, 794 bp, Cannabis indica
gaaatgagaaaattctcttaccttctctttgcttgggctatcaactgtaataatctagcatcagcttagtgtgggttgattgttattactaaaaatatcctctacaacttgtcgaagtttaaggaccgttagtatatgggtatcgttcatgaattcctcttccgtcgatttccacgctcaactctcaaaagtgggtgttttttagacactaattatagggtatcgctggttgaatgtataaacatctttccatcacttgggatgtcatcctcttttgtcctctcaccattggtcattgtgcttatcataacatcatctttgttccctatattcaacttaatgcctctcatatgcttgtccatcgcttctggtctccttcttctctgtcgatgttcattcattttctcacaataacagatattatgattcatttattccctggtctcaaactaaagatcctgactttaacctttttaaattgatcaaaatgaacaatgtgagagggctcatggggtccctatgtttcctcttggcgagagtcaaatgaaactcttgtcttcttcctttcactatggcacgatggagaggagtgaggcccctcgtcttactaaggggcaagagtggagtggtggtagagctacatgtgtggatgtgggcatgaggtgcaggtgcatggagctgggtgtggtgcggggagcacgatacaacacgatgtgagcaagcatgacgcagggtttagaaagtgcaggtgcaatgcggggcgcgcatgtgtgacaatgtgcggtctatgccag

SEQ ID NO: 234024 - DNA, 865 bp, Cannabis indica
tctaaattttcaaaatttaagtttaggaagagtgttctgatttctaaaattaggctcctatttatagtagttaaatctctttaattaaattatattattaaaaaaaatatctataactaaattcagttactaatatttatgagagaatctctcaactacttcaaagaatatctcaacaaacttaaaatattaataactacttttcaaattaaataattaattacccaaaaaaaaaatccacagggacaagaacaatagtaggtgtctatactagtcttttaggacaaggatggtgtcttttgtcttgacaacttttgtcttgacaaatcttgtcttaacaattttttcccttttcctatttaattaattttaaaaaactatttatttattacaaaaaataaataattactattttgtccaattcaaaatagatttttttgtaacatctttatacaactctttatccatatccttgacagtgtttcaaggttgccaaattcagggaccattgacctataattctaagctctaataaactagattatttatctcatcaatcaaataaccccttatttattaattccataattactccactataaatatgaattgaactcttagtaattatagattatatttattgtagttaattgtagtgtccattgatataatcaattccaatgattagccctccgtgaaatggtttgtaattagtgttgatcaaattactgttttacccttctaattatttatttatcctttagttccattaattcactagtggaagtataattcaagatcccatctaaatttgtgcccaactttccagtaccaaaattaacacataaagggaaccaacattcga

SEQ ID NO: 234025 - DNA, 1079 bp, Cannabis indica
accttgaccaacaaacaaatagcaccctgctagtagaatcccttgacgaagtagaagaaagaggagaacaagccaccctaaaggtgcatgcctaccaacaaaaggtagcaaggcacttcaacaaacacatcaagaggtgaaaattcttcatatgagacttggtgctctgaagagtgttccttaacacaaagattcagtagtaggtgtgctctgacccaactgggaaggcccttgtcaagttaccgagataactagtaagggagcctacaagctgggaaggtacaagtagaacatggagctcattctcctaccaagagactggaatggagagaaccttcgcaaatactatcagtaactagcttacggaaatgtactacaaagtagtagttttacgtagtcaacattagagtacaaaaagcactagcacccatggccttattggcgtgaacagtggcctctacttttctaggcgagtaggggtggccacttgacatatagaagctaattttatgtaatgtaagcttgtagattcaatttatggaagtttcacaacaataaagaccaattaatgaataataacaatattcatattcttgtttattgtgtctatgaaccacttcctcatagattaatttcttaaagttattcttttagttccacatgcgaactatagtaccctcgccagacagaacccaggcaaaatctatgaatcttggtgaatagcaagtgaccaagagacttgtctgcatggtcgcttggggggcacccatactttacaacgcattgaactagtacaaataacttgtgtagagaaattttcacccttagtataagctactaaacctgcctctaagtcgtgtaggcatactttggcttggaaaagtaaattcgaacccttactgtgaaggccaaatactagtagtgttaaaaaatagagggcttatggccaaagatacgaacatgaaggccctggagctgaaaataaagtaatgttctaaaaaggcctcaggccacatatgacatgaaagtaatgttccaaaaaggccacataccacgtggaacacaaaagtgagtattgt

SEQ ID NO: 234026 - DNA, 1433 bp, Cannabis indica
atttcggttaattttgaattcataattatttaatttatcatataagataattttaatataatattttaaattaaaaggataatgtaatgttttaatttaaaatatatcaaataataaaatatctaatcttattattaaataatctataaatttaaagaaatcaataaatttttaaaatctcaccataatttaaaatataaaataacaaattttcaaatctaaactttaaaaaattaaatctaattaattttaaaatttggtaattaagtttaaatattaaaaattatattttatttagatatttagaattcaaaattcaaaaaatttgaaattggtggaaaaatcccctaaaaatcgaattttagatgcataacacctagctatcgagagacaggctgctggcagcctctacgtgcgcgcatgagaaggatcagcaggatccttggccgagatttctcagccccctgtagccctcttagtgcgcatcatcgtgtctgaatggggtgtgtacccctgtctttagacatggtttgtccgagggatccgcgcgcgtgcatctgtcttgtccgagttgctggtatgcgagcaccatgctcgacaccacctggacccaaaacttcaaactttcatatctccttcaatttgtatcgaaatcgagtttcgtaaaaactaaagtggcttaatttttcacaaggaatccaaataaattattttcagaataaaaataaaattattttacggaaaaaagttgtaattcactaacattcatcaaattacacataaaccaatatgaacacatccaaatcaacaaatcattgttttaatccatatttcatgaaagtaaataattaccatggctctgaggccagttgttggaactaattttaccatgatctagatttactaacatgtatgtttgattaacacccgaaatataaattctctaatacgatgaaattaaacacataagaatttatgaaatcttacattgatggcagcaaaataatacaactccttccgctcagattctaacctttgttcttttctgtctcaaagtaataacaagatctcagcctggattcccttctctccttcggtttggttaaccaccgtcgtccacactacgattaagtacttaacttactatgtgtgggcatggtactccatcactaaaggatcaaatatcatgaagaacagcaaaaaggtttgaaattactatagaaagaagtctctcatctcctagttgtctgatagagttagaaactaggtttagtttggttgaagagggatggatgagaatgagagcatcatgttcctttttatagtatttcaactagggtttagaatctaattatatatattaaggtggtgtttggttacaaaataaaaattaaataggaatgggaatgataataggaataggaatagaatgg

SEQ ID NO: 234027 - DNA, 730 bp, Cannabis indica
tattggaagcagcggtcaaaacaattctggttaaatggaggggataagaatagcaaatacttccatgctactacaagctctcgcaaacggaataatcaaatagttcagcttcaggatagtaatggtgtgtggaaaggctgggattcgggtcttgaccaggtaataattgattatttctcagttctttatgctactaaccatgctatatgtggctctgttgtcaatggcatacgacgtaccgttactactgaacaaaatgacgccttactttgccccaacacacctgatgaagttaagcaagctctcttccaaatgcatcctgataaagctccaggtcctgacggtatgagtcccggtttttatcagaagcattgggatatagtcggcaccgacatcatcaagtttgttatggagttcttcaacaatgaatgcatgccgattggtcttaatgacactcatctagtgttgattccaaagaagaagaacttctcctctatgggtgattttcgtcctattgctctatgtaatgtctcctacaagattctttcgaaggtccttgccaatagaatgagagtgctaattgatcatatcatctctcctactcagagtgcgtttattcctggaaggcttatctctgataatattctgatagcctttgaaatcatgcattacctcaagaggaaaacaaaaggcaaaaaaggattcatggctatgaagcttgatatgagta

SEQ ID NO: 234028 - DNA, 3042 bp, Cannabis indica
tgtggtatcgaatatctatgatgaatgctaattgttactataattaatttattttttaaatctaattgttactataatttaagattagacattagagattttagtttagtactagtgatagaattaatagtcaccgtcaacattttataattgttttagtatttgctttagcatctgtaaaaagaataataagctagttacaactcagatttatttttttaacttttttatttttacacctcaaaataattttttttaacgaaattctacataaaaattcctattgcaactatagcgctgcaacctaaattgcaacaaaaaatcgtatagaaacccctattacaactagcgctgcaaccattttagaaactcaaaccgtaaatttaaaaaaaaaaaattaaaaaaatagtatatcggataatttccctatttttttttcttacttttaagttttttaaaaaatatgccatatttattacaattaaattttaatgccatatatatcaaaacttatcttttttttttctttcaaagtcctacaaaaattagttctaataattgaactattgtctttattacttttttttttgggctaaatatatagaaattagttttaataattaaaaaagatgaatataattgtggtaattttcataaaagggtggatatgtttgtattgtttgagttagcccaatatgagaagcccaggcccaggcccaggcccatataaaccgaagtggcgggttccagtcacaacacaacttcttggctctctctcttctctattggcttgaatttttcaaaatattctgttaaaattttgtatataggcacatatttatattatatgtagataagatttagttttcaaattaggtttttttttttgtccaaagcaaatgttatactattggttatgcttataagcaatgtagttttagtgttttactaagaagtagaacaaattgttcatacatcagactattgaccaatccataatcctgctttgatatcattaaaataatcaaatgggttttgatttcaactgcaggttgtgtatcattggctcctccaacaaccaaatggtcagtcagttgaattgcatccgtatcttcttaaaatttgtatttaatacttatttgagtaattgacatataaataacccatctttctaccatttcccaggaaatttttaggagggccatactgcaacctgggccacccgaaacttttgctttacaaacagttcaacaagtcattaaacctcaggtatataatatctcaatcttttcttgtctttgaattttaggttatggaataggatattttaatttgaaggcatttgacttggttatccttaattattggaatccttattacagaaacaaacaaagttagcgcaagatgagaatcagttattagaaaaaattctccgaactttgcttcaggaactggtggtatgttttggctatatatatatatatatatttaagtatgcgagctacatttttatagtatttattaacgttctatgcccttttctgtaaattgaatttgggtgttgaggattgttttcttttatagaactggagaaaaccttcactttgtttgttttaatatactgtaggcagtcagcctcactttatttttggtgcttgtatcatacagtcatgtgcagtacagtcaggggagccaataatgcaatatgggcaatcgatagatgagggggagagttccctgggccatattccgcgtcttcttggtatgtgcatgttttgatttgttagtcttgttatgtgtgtttccaattatttagtgctctagatttgttgcaacttcaactctttaaacatttataatggaagagtataatttcacttttttcatactttgttctattttatagatgtagtaaaatccttggttcctttaatagcaaaaatgtaaacgcatcacgtcaggttatgcttgtaccatttgttgaagctttgatacttaattctttactgaaatgatagtccctttaggacttgcctcgtaaacttgaactacaactagtacaaatcttaaagctaaccaattgtaaaacaaataatctgaaatttgtagagctgaaatattagtattaactatgagtatacattacacacctatctatttaaaaacaccaaaaatttagacttcctataagtttttttgcttacggtggatgttgtggtgcttaaatatgcgtgaaaagatggtctttggaatcactttatcttcacttagtatgcattgtttctttctcaaacacggcccttacctgtctccaccttcctgtacagacattgtattatacctttgtgaaaaggagcacattgaaggcggcatgattttccagctcttagaagatttaactgaaatgtctacaatgaggaactgcaaagatatctttggatatatagagagtaaacaggatatattagggaaggtttgtgctttcttgattgtcatggctcacgggatacatttaatacctatatattgagagagaaaaaaattctatatatttattaaatgtttcagtattctttcatccactcaatttatactagacatataattgtgtatatttacatacacattcatgctatttattctgaagcaacctagtcatattttctactagacattcatgttatttactttctactagtcatattttctttctgaagcaacctatttattctggtatgtaaatttattcattcacctacaggttgagctttttgctcgtggtaaacttgtgatgttgaggacatgcaatcaacttcttcgtcgtctttcgaaggtataggaattgtcaccatattgtagattacaagctacaatttcatattgtactaggattttcctattgtttttctttgaataaagtgactccatattgaccttatgaagtgtctacagtttttgaagtagctggcagctgagggtcaatatagggtgtttgttgcttggcagtttgtgatagtaggcacaaattcaaattccaacatt

SEQ ID NO: 234029 - DNA, 1300 bp, Cannabis indica
atgttatcaataatcgcccagaaacaaaagcactttggaaaggggagattattttatctagtactaatttaagccgattagctaggactttagaaatgactttatacatagtagtacaaagacttataggtcgaaaatcttttagagaattagcatgctgctttttaggaattaaaactacaagagtagtattaatatcagaaaaatcaattcccttatttaagcaatctaaaatcgcattaacaaaactagctcctaacgtattccaatttttttcatagaaaaaagcatttaatccatccaaaccaggagctctatccccagagagactaaagacagctttcttcacttcttgagcagtatacgggctagccaaatattcaacatcagactcatctaaagggggccctaaacagtcaaggatttgactagttgcctcagcatcacaaccctcagaactgaaaagagtagtgaaaaaagaggaaactatactaaacatagcctcagggttattagtactattgccaagatcatcctttaaatatttgatagtattattctttttcctatgagaagcaaacctatggaaaaactttgtatttttatccccagctctaagccaattaaccctagatcgttgcttccaatagacctcttctttgtaaagaagagcatccagttgggactgtaaattctggattctcagagcagattcactactacaagaagtagaagcttgaagcctagcaatttccttttgagtatcctgaattctagattgaaacatgaccatagtggacttattccaagactttagagctgaaatacaaccttcttggcagtaaaggaactcactaaaagcatttggacaagaagagactctggaagaattagtccaagagtcctgaacagtggaataaaaagcaggactttggagccagatattttcaaattgaaaccgcttcctaaaggagtgagttctagacacattcggctcagtaagacaaaccttaagaggacgatgatccgagccataaaatggtaaatggtacaaagtagcattaggaaagagattcttccaagactcagattctaaagcccaatcaagacgctcatgcacagaccgtttatgccaagtatatttatccccctcaaaagagagagtagaaagacagtacttatcaagaaagtgagcaaaattttccatatcactataattataatagttactccctattttatcatcaaatgacaaaaaactattaaaatcacccattataagccaaggaagattaggagc

SEQ ID NO: 234030 - DNA, 1470 bp, Cannabis indica
cacttaaccctagatatataaggtaatatttctaaccttgaagctcttcttcctacaataatcactcttttctattctaagttcaaatctttttaaaacttcttctctatcaaatagtcactccaaaaaaaaaaaattagggttagggttctaatgatttcttgggttttataatgtttctcttcttcttctcatactcttgttgccgattctttgtaaggtttgggttctaatggtctctcttattttcttttcctctaacaatagttgcacacaagggtgaggtttctaaggttctcttagccacggttcaaaaactcaacccgaaaaaactcactcacggtaaaactcaaacccagaaatacaaggccactcaaacccaaaagctcacccctaaactctcgacaaaacacaatgaacctaaaaatttcttcgccgaatctcaccacaccaaacccaaaaccaagaacaataatacaaacaaaatatcagagaaatcaaaaagttaaggttatgagaaaacaaatagtgcaaagacaacacttaaaattattctcggagttcgcccagtaatggctacttctccgtcaagctctcctcaaagtagtcttgatcttcattcatcaacatatcaagtaaagattacaattttgtctctttttgttctcactgtttttctctcattttacaagttactaactctctctttttctctcttttgcaaatacacactgagaaaataacacacaaagtgttctctctttcttacaatggctctctactggaaaagctctctctcaacggctctatgttacaaactgaaaaagtgtatcctttaagatctgtgaacttatgtagagctgtaattatttgagccctagagatttcttattgtaactgtttttgtaactgttgtttcttgaatctggttgagaatatctttgtaattgtctttatgtcttgtgtttcttttttgttgtaagttgtaatttgttgagggtaggtctgtaatttcatactcaagaatttgcttctaaaacttaggttatattagaggatctaattttaacaaattggaattgaaaagtattatagtacgaattttttgcctagaaactcgagatcagtctcctataaaatagacatgtggatccaatccttaagggatggatgagctattaattaatgactttccgagagttggcctcgcttaaacaaaactcgcgagatgatgcagccttgacagggtatagtcgcatactatgccttgcgtataagataagtaggaccgagagggatttatacaagctgtgcatatatcaaaacatatgcgatgactaagtagccttctcctgcaactaagtaaagatcgcttctttacataacgattggtccaaataatgaaacatgttcgataaatcgataaggacttgcgcgtctcatgttgtcgacacacaagatgtccgtcaa

SEQ ID NO: 234031 - DNA, 1819 bp, Cannabis indica
tgaaggtacaataacgggacaaaatcatatccctatcttctaaatatatttaaaaaactatgttgtcacaataattaaactaatgctatgtatcatctaaatatatacttaaaaataatctatatagtaataattaagctaacgctaataatcatctaaatatattcacaaatccatatagtaacaataaactgaaatatattacacactgattaacaagacaactgttatcgctctacttctgctttcatgtaaagaatccaccgatcacacatagcatttatctcgtcatttgtgtataaagtggagaaccgattctgtaaaataaaggtatatattaattagtaaatactattatcatatgctatttaataaagaataatatttattataatacttattaattattttaccggttgtgtcaatacgcgtattggatcttttacggtcatgaaactttcaatgaatttcatgatataatatccacattatttgttgtcaggttgtttatgacatataggagttatccacttgatagttctatcaagccgtcctatcatttgatggtatgtggtgaacgatctacacaaaaaataaagttagcatatatacatttataaatataaacaagcttaatgttgggatgttaattatagaaattacgtgggaatgatgaatttcaaatcatctggtacatcgccattgcctgattccaagtatgccactgtctgcgtacttggttggatgagtacaagcaaccagtaaaatattatcttgcacaaataaatatgtgtaaagttgttaatatatacacaataattaatattatgaaaggttataaatactaaaattatttattttaaatctacatatactaattattgtatgggacaataagccatttatctggattggtcaccctagtcatacgagtgactagtgcttgacaacagttactattaactcctgccttggttggaccacgtcagtattttgctacacaagccgatgcgcttcttaacgatcaacttgacttacaccacaaagagaaatacccctactccctctacttatttccctatcgacccgagtagggcgagagccaacagtggcaatctctgacaagtagtctgagcagaattcaatcgtctcttcaacgatgtatgattcaacaatacaaccatcaagcctacttctatttctgacataacccttcaagatttttatgtatcgttcaaattggtacatccatctcaagtacacaggtccacacaactttacctctctcaccaaatgcactgtaaggtgaaccattatgttgaaaaaggaaggcaaaaaaaattgttctaaacaacacaaaacttatataatttctaatatgagattctctaacttagtcacatcaaccactttataacaaagatatttgaagaataaacacaacctcgtaattgcatatctaactttcttaggcaacacagaatggatactcactagtagaatgtgttgaatcaatatatgatgatcgcgagatttcagaccacttaaaattaatttgttcatatatatccaatcaaagacatttgacgagtacccttcaggtatttttacctgggagatagaaccacataaagatttttttctggtttagttagagtatgacaagttggtggtaagaacgtttgttgaccaacaacttgtcggtgtatgttggccgaatccctaactctttcaaatctaggcgagatttgattccatctttgctctgcccaagaatattgaacaagatattaagcaagctgtctgacacatttttctc

SEQ ID NO: 234032 - DNA, 641 bp, Cannabis indica
aaactgtatcaattattgaaaagacgaggcattttggagaaaaatctgctgaagctgtcaagaatgcgtcagtagtcaagaccagttatgcccatggtcgcgactaggaggccagacagagagcatgtatttttcatttttgcctatggtcgtgactaggctttatagtcgcgaccatgggcgaaacacgagatttttggttagttttgaatttttaccattcagagatagcaaccatattttctatttaagagactcgcatttcatgacaaaaattatcagagattagccccaaaaagtgaaagaagaaggagaggaaactattgtgacgatctggagcacaatcaccaactagttctttcctaactcttgatttttttatgttaatttctgttctagattcaattatggatgttattatgggttttatgaactaaactcccgattggggaagatgatgaatgtcgattgacattttgcttagttaatgataattgttattccttccttcttgtttgtgaaattatccatcgttgtgtgtatttccatatttaagattgatcaccttctacatgttctatgtaacgtccccacttcaagcctccattgggtccttacacccacggaatgaatggctctta

SEQ ID NO: 234033 - DNA, 1730 bp, Cannabis indica
tacatataaaaaatttgatgtttatatttgagtgagggctttagcccacatatgggctaaagtccctccgtccctgcgtatatataaaataaaagagttgcacgtacaacatacaacttgtattaatcatattttcaacgtgttaaattttttcaaatttatcaaaattctacaaaatgttttaaataactataattttcacgaacataaaaaaaaattgactaaaaaaatcttccaaataccgaaacaaataagagtatatcaatacactattttttttaaaaataaaataaaatatcaaaacactatttttaaaatagtgcatttgagattagttttgttgtttattacttcccaaatctcaaacacaaaagacttagttagtttaacctctttcacaagacatagttagctttacaaattaagcaaagcaaagcaaagagaaaatagtttagagttacagagtccttacttgcacgaaaacaacagtgccacgtgtcaaccaatcagaataataattcagattccattaaacaacaccacacgttcgctgccgacgtcatttaacacgtgtcttgttcctattcgtttgtcctgtattaaattccaccctcagagtcacagtaatcgcttatggataaaatcatattagatagtgggccccacacctcgagaactccaaacacgtggaccactccacgagccatctgatgcgccgagcttcatgagttaatagcttgacacgtacgctttcacccaatcattgctcggtttttagtcggctcggctcggcttgtcgtttttggtttttggttatttatttggcttggcttggcttgcgtgtgaagttggaccgtcttaagcgctccgtataaagttttacctcattacgacaattttattttgtcgttttgtggctttttttttttttttttgaataattgtggctttttttagtaaaaaataaaattaaaatcaatttatgtacttgttgttttaatattagttagaccaaatataataaataagtttgacatatggaagttgaactttttattttgaattaatttttttctttcacctcattattatactaagaaaaaggttttaaggttcatcgttgttttaaaccgtcgcctataatattactgtctgcttataagaccaacaattatgttaccgatgtaaaatgagatgaaataagtctcggtttgaaacaattaattattgaacattattaattgattgtttaaaattaacgttatagaagagcgttagttatgagcaaaaagtattacagtcgatttagaagcaacgataaaaaaaaaaaattaaaaaaaaacattcaaccaaaaaacgaacttagatccaaaacacacgaaaccctaattaatcaataaacacaatatattatcaacaaaaaatagtatattcaatttataataccaaaaaaaaaatgaaacatccacgaactcaaaactgcagtgaatcgaaaacacaaaaaattacaaacaaaaaaagagatttcgttgtgagtgaaagagagaaatatatgaggattactctatttttttttttaaaaaaagtgatattatcatagttatcatataaaatctaaaattctaataaataaaatggaatcattacatattacaatttattaattacataaatgatgaaaataattaactagtaaatttgcctttttatttatttttatatgcagttaa

SEQ ID NO: 234034 - DNA, 598 bp, Cannabis indica
ttggagtgaccagtttcgtaacgaaatcactaactgataccgaaatagggttctacttagtggtgccgatgtacactcgcaatcgtgacgaaatagggttctacatagtggtgctgatgtacactcgcagtagtgacactatcactgtaggtgtttaggggtaccgcgacacaaagtctgtaataaagttaggtgcagtttatcgaagtaaccagtttcataacgaaatcactaaccggtaccgaaataggattctacttagtggtgctaatgtacactcgcaacaatagcactatcactgcaggtgtttaggagtcccgtgacacgaagtctatattaaaattaggtgtagtgtatcagcgtcaccaatttcgggacccctaaacataaagtctgtatcgtaacgaaatcacgtagactttttgtcacgggacccgtaaacacctgcagtgatagtgattaaaatgatggttaactgtgttgggttttatgccctaaataaaactcttcacaatctgattagttatcaatataagaaatttgaagtgatttatgtttgcatgaattttacatgctaatggtttaatatgtttattac

SEQ ID NO: 234035 - DNA, 1290 bp, Cannabis indica
ataaaaaagttatatttattgtgtatcaattttagcacaagagtatatcttgtgctaaatttcaaacaacttttaacatgtactaaatttaacacattttttagaacactattgaaatagtgtttttcttaaatttgctaaagtataacaatataatattttttttaacacttcattgctctaagatctttataaaccatgtaaattattaataaaaatgaatatatcatttttttctctaagatcactagctgtagctttaactattggttcttttattgtaagttttatctgactcttttatttatgagaaattgatagctaggagtatttaataattgtattttaaaatgtttattggaatgtataattttattaaaatttctcgaatatataattttgcggcttataatatagttaaatgtgtatttgttaacgacctatatgatatgattaaagtgtcattaatattaaaaaatattttatgtaatgaccataaaatttaattatttttatttatgaaacacttatttttcaagaaaaaaaaaaaaactgacctatttatttaggagtttttacaaaaatattagatttttgacaaaactttacaattttactgtcatatgaaattttttacaaaaatactgtatttttataaaataaccgtaaaacaacaaaacagaacaattaaaacaatagtggaacaactaaaaaacaactgtggaacaacaatgaaaacttaacacagtatacagtataaaacttacacaatattttaaaaaaaaaattctaccctttaaaattttagtatactgtggaacaacaatgagagagtccattccagactacattccaaattcatttatcccaacccaaaccagattactatcatactatgcataccaaatctaagttagaaatatatataacattttctctatacaaactagagtcttcaaacatggagtagcaagagaaaagcctttccccatacttaccacagcctatactatctactattagcatctatattttagttagaaatgtctctcaaacatagcctatactttataatttctttcatctaaatccattggaaggacccctctatagtataaagcatttaattatctttagtactacacatgaaatgttatatcatagtatttgatacacatattttaatttaataattattattaattattttttaaagtagttatttactatcaggaaccgttgttttcatttttaattaagaatttgacgttgttttaatttaatagcgtt

SEQ ID NO: 234036 - DNA, 602 bp, Cannabis indica
ctcatgtttatcgtaacgttaattttgcgattcataaattggtttaggatagatagtaagtttttttgaatggaagaaatctcttcgtttctctaaaaacggctacccttgtaaaaaaaaatataaaaagacaaatatctcatttaaaaattcacaaataaaaagttagaggtaagttgaaaaataccacttcgattaatcaattaatcaaatttatctctaattttataacatacctctgtttatatatattgtacccaaaataccctgacataagagagtcgagtaccttgaagtgatatgggcaaaattgggacaatgtttaaaaaaagagataaatatgatagactttaaaaagaaagtaaaaataaaagaggacaatataaaaaaggtacaaagtgtaatttcctcaaaaaattattacattttgttggcaagaattatttaagaaatttcaatattatttttaatgtagtcataagtatagtctgttcctcttgtaggtttcaagttaaaattcctccatcaatataaagaaaaaatgttatttttaattattatatattttatttttgagtcattgtggggcaggtgttgtgttt

SEQ ID NO: 234037 - DNA, 1131 bp, Cannabis indica
ggcagtgatccagttgaggatcctacccaatacaggtccattgtaggggctttacaatttgcttgcattaccagaccagacattgcattcagtgtaaataaagtcttccagttcatgcataatccactccaatctcattgggtggctgtaaaacggatattgcgatacctagcagggacattagactatggtctacaactgaatcgggtttcatctcttcacattcaagcttattgtgatgcagattgggcggtcgatcccgatgatcgaagatctacaactggctattgtgtgttcattagtgaaaatttggtatcctggcaatcgaagaaacaaaagaccatttcccgatcctctatagaagctgaattcagaagcatggctgttgttgtcttcgaaataacatggattcagtctctcatgtctgaattacatatgaacagcagcctcaccccatctgtttggtgtgacaatctcagctccataatgttagccgccaaccctgtgttgcacgcccgcacgaaacacatcgagatcgatctatattttgtgcgtgacaaagttcttaacaaggaaatttctgtctcacatgtaccatctgaacatcaaattgtagattgtctcactaaaccgatctccaacagtcgttttccgaaattgagagacaaactaagtgtcttgtgctcaagtacacttaatttgagggggcctgtcaaggatgaagaagctgaggtgtacgataacagttagaacagttagaatattgttaggaaatatgttatttggttgtaactgttttctgtctttgcacctggtgctatataaacattgtactgttcttttattcaattaatgaaaagcttctttcctttcttcttcttctttctttactttcttctttctctgttttctttgttcttaataatcttcacagtcattactttcctacttgaggttagtcttttactatatttttgtacaagtgtccccttatttttactcttaagtgttcatattctatctctcctatctataaatgtgtaactttcttaacttaagatattaaagttgattaatcttgtatgtgtctctatccattatgtaagtcatctatttttggtatataccttt

SEQ ID NO: 234038 - DNA, 1221 bp, Cannabis indica
accatgcaacattaaatgttatttctgatctatattaataaataaatctgattatattgaaatgagttttatttagggcataaaacccaacagattcgttgtaaagttgacaaaaattattaatctcccctcacagcttggtagctttagctagaggaaagaacattgattagaatttcattgccatgtgggtagctcgctccttcagcgagaatgggaatagtctcaggcgaatggcatcatcactaactccattcaccttgaatatttgacataactccacaaagttagacaaatgcagatttggatcttctgagggaagtccaccaaactggactgaagattttaccatttggagtatggttagctttatttcaaaattgttagcctctacgacgggtggtgtaatgaccgcattagtaatttagattggaaaagataattagcactaatttctgagatttttataattatttatgaatttaattaattgtgtgccccattattagaaatgggcactagagttataatttctcaattccagagattttattaaactctaggaaaattatttgacttatatgtgaattatgcaatttttacaatttttgctcggcgacaacggaaaatgtgatggatagctagtttgatcacatgggtaagtttagaaccttacttcttagtgggatatattttggagaaaataaaatatcgagattatgcggggttattgtttttgactattttacccctaggttttaaataggcttaagttatgtatcaagggcatttcagtcttttccaagggagtgagtggtggctgccttaggtgttgacacctagcctccacattcagccaaggttaatgtgattaaccttaatgtcatcttaagaaaataaaggaaataaaaaaaagatcaaaatggaaggaaaaccctttctttcccttctctctcttcgaaccagccaagatcaaggggattgattactgaactttgtttttttagcaaggattagaggaggattcaatcaaggtaaaccctagatactcagtagctatgtgtttcttaaggatttaattggtttcaagtagtgatttcatgttttggtggctgttagggttagaaatgcttagggtatagtttttatgttcaatttaagttgattctaggtgctggttgctggtatgagtgtatggtgttatgatttcgcaagtttgtg

SEQ ID NO: 234039 - DNA, 923 bp, Cannabis indica
aataagagaaaataatacaaatacaggcttaagataccataccatggaaaaactaaagtggcagcagtggtgggcacgggacaagtggacgacgggtacgggcggagctttcttggaggaggagtcgtgggaggatttggatgttagggagagcctctctgtcgttggactgagtcggccgccgaagaagaagaaggagatacgaatatgagatggtggactggcgaggagatgagatgaagcaaaggaggcgggttaaagttttggagaaaacgaaaagagcagtattatatatttatattattcacttttatggttaatagttaatagcttaatattgtttttaaatgtaataaaaataaaagaaaataaatattttagttattctcgaattacaacccaactgttatgttgtggttttttaaaatccgaacctgatacctgtgtggcccatttttgagttggacctgacctgaccctaggtttttaatttttcaacttttttggcagcaagtcgaggcgggtggtcgggttttcgggtctaaatgttcagccacataataaaataaaacattgtaatttgattagatcagtttctaaatggattttgagatcaacatccaataatcaattcaattcaataaaaattcaacttttaacatttaatccaatccagttgtaattagattggttcagttattgaatcatgtccactcataactagtagtgtgcataaatcatctaatctaatgacaactgaccgatccaattacagtcgaccgtcaaacattagaaatctaattgtaatcggatcggattggacattatttttaatatctaattggatctgatcgaatgttggatggggtgtccaaaaatccaatacatccaacatccaatcgaactaattagtatttttattt

SEQ ID NO: 234040 - DNA, 1310 bp, Cannabis indica
acactattgtcagtactagtactgtaaataattcaaatttttttaaaaaaatatatagatttgatattaaaagtacaatgaatattgctatgaaaaatataaaaaaaaaaatatttcgacagagtaaaaggttaaaatacaagatcgacagttaatgatttaaaaattcgtgtggggtacaaattttattccaaaaatttgtttattttttttcatgagaattcaaaaattctagttgaaaagtgaatttagtcaaattttaaacctacttaaaacttatatactaccaaactcaatacaacccctagttaagtgtaatgaaaaaattaagcgcattaaggtgtcttatatctttgaaaatttcacatgatcaaaatgtgaacttggatataatgtagaatataattaataatttttttttttttttgggttttaaaaatgaccttatagagtgtataagattacccaaaaattcttgaatcatttgaaaatatcaaaaatgacatttaaacacaatcagtagtccgtatcatctataacaaggcgacatgatgcctggacaatgcatgcaatatatacagaaaacagagcttcgcaaaatattctaggcgacatgttgtctggcggccattaaatggtattttttagctttccgtaaattaagtgttttagctccgaaattgatttcaagtgtcctaatcctttttgtaagacataggaggacctctacattatatatagaatttgtgagtgaaaatatgatgatcacatactctctttctctctctctcttactagttttttcgaagaaacttcatcaaaaaatactttacatgcggagtttcaaaagacttgtatatcccacttctcattcctacttgagagaggcttcaagcattaatggaggcttaggaattgatattttggatagcattaaaacaaaaaataattagtatttttactcctgaacttttgagactacctaattttgcccctaaaatatatcgcttgttaaaaaatttcccctaaaatataacagttaaataattatgcccattctattagttctatttcttttacccttaaaaattcacatttttaccccctaaattttgaccaatacaaaatattgtcctcctttattaaaaacaattaattataaaaattataatgttctattaattttgaaaaactttataaaagttattaaaaaatgtgatcaaaatattaagttaattaaaaaatattaaatttacttaataaatctaattattcttacaagaaataatttcaaaatttattttatttct

SEQ ID NO: 234041 - DNA, 1422 bp, Cannabis indica
atatgtaattgtaaggctattgtaagatatggattgagaaaatagaactttggttcaattggagttgtgcactgactcgaagagtgcattttaggagatttgtcctgtccgtgtcggatcgcagagagcgcaatgggaaacagaggcgacgacgatcctggctgtgtattcactggtttgcagggaaaaaaatataaaatatatatacttatatacatcttttactggttattttctgcaaataaatatgtagttcaaattgtgagtgcggatgaagcttcaattgagggagatctcactggcttcatggcttacaaaaaaaaaaaggtggttgcaaggttgaagacgacatatcggttaccctagggcttaggctttactatggatttgggatttgggcctagcacacaaatgggttaagagagctattataatttgggctaaaagcattttgggctgaaattagtttttgtatctcttatatttgtgcttactttttgtatttgatttttatttttaccaccttgaggacaaggtgattttgaaaggttggggagtgttacatgaaagggtatagggactaattagtaattgttagtattgtttagttagtataaatacgtaattgtgtagttattgttggatatggaatgagtaaatagaactttggttcaactaggagattggcactgttttgaagagtgcatttcggagatttgtcctgtcttgaagaggactattatctaacaattggttcttttattgagaggaattatagtgagacattcactgtaagaactcccaaccatggaagatgaagagattgttcaactcttcaaatctatggagtaatttttcaagtaaactttggattctcaacttgagaagattacttctatgcttgagcaacacttcgcaactattaacgataaatttgatcaattatatgtggcggcacaacctactctgagatcaactcctactgcaaatgtggaggaattcgtggatgtcgaagaactcactgaaagccatgtggtgccttcagaggtggattcaatggatgattcttcagtcgatcctatcggtatcatccgagatggctgcgaagcactgccaaggttgaatcgcagtttgccggaggtagaggaaatgcactctgctcgaacggagactggggatatgagaatctcgccaccccttgatcgggcaatctgatcgtcttgcatgtacatagaagaagaagatgctagtggagtgtttgtggatcgtaaattggtgctacgagagattgtgtctggtgttaatggtggttcaccatgggaatcgattcacacgccgctgaaagatcggaagaggatctttgatcggggacgtcaatggatcttgaattgaagacgatgaacgaactttgacgaagatgaa

SEQ ID NO: 234042 - DNA, 1245 bp, Cannabis indica
taagtggtgccacctccacaaagtaatactcgtcaacaaaattcccgattttgctcatgaccttgtccacagtgcctgtcaaccacttgaaatctggctgagagaagtagaagtagccctacctgctttgcttaggggtagacttctggtcaaaaaaccaactgacctcgtgcggagaaggcgcaccccacttctagatggcataaaggatgaacagggcagacaaatacttaatgaccttggtagtaaactaggtaagacaaagacgaaaatagtcccccatcttcttgaagtatgagtgcaaaggcagcattgcccctggattagaggctcagcatcctcgtcctcttcggcttcggaagggttgcaaggacggatgtcgtccggctcatcaatctcccaaacctcaatgtccccttcgtgatctccctcctcctggacaggaagatcctatttggcactgggtagtgcggcgagttgggccatgtgaggatcagatacgttgactttccgcattgttttctttgttcgagctatcatcctacgcctggacgaatactggtgtgaattctgagcaaccgtaacagcaggaacagcaatggggataccaaagttccccgaacttggacagccaacaggaagggtgtcaacaacacctggcagaacaatgtatgtccagttggatggaagataacgcctccaacctttattcaattcccaaatgaagcggtcgtacccctctccaactatctactcggagtaatagtggtttgtgttggaattattttaccaggatctagatttactaccatgtatgttgtttaacatcttaatatgaatttctaagacatttaaaataaacacatataaagtttaagaaaccttacattgattgcagtggaatataatgactccttccgttcagatctctagcccttgattcctttctgtagcagcgcattataaagatctaaacctagatctctttctctccttcttgttgaatggattttcacagtcttacatactatgattgaggaccaacttgatctttggaggcattagtttggatgaagagaccatagccttccttttatactatcttcaatagggttagggttgaattattaggaataaaaaattgataaaaatagaatgaaaatccctcctaatggtcggccatatgatggacccaacattagtgtgggctttgttatttttctcaactattttaccttattttca

SEQ ID NO: 234043 - DNA, 2489 bp, Cannabis indica
tttaattttttaccacttatttatacttacattggagatgctatgagtcattggctaaacatatagacactaactctagccctatcccctaccgcataaattctctcttatatattatgtccaaatgtcttccttaattttatgtgcatgctcttttctcttcattataaaatggtaatctattatttttcaagccaattagaatgtcgagttaaaagttgatttggaagtaatggacatttcattgtctatatacaactaccattaattaatagtatactaagaaaatgacccaaaagtttgtcttttgcctagagagccctgcctccgttggttcatcttttattattctattattttaaaaatcaaataattgatgatgaaagacaatggcaaattggcaatgccattttaatttgagctttcctccaaaagaaaaaaaaaagaccaacaaacaagttgaaaagagggagggtaagttcttcaatgatagatgtgaatatatttacgttaccattggtcaaaatttttttttttttgtctatgaaacaaagaatgattaagccaaaacacaaagtttggtgagcacatggagactcacctcccaataacgcaacaagctattacaagagtgagacaaatcccacctcgcaagagcatgagtagccttattaaaaacacgcaaaatccaactaacaacacagtcaccattcaccaaagaaacacagagtttagaaaatgagaaatgtaaattctagaacagagagtgcccaaccaccaatgcattgacgagccgaacatcatctgaaaagaaatcaatccctccaaactacattttcaaggacaagtcgacaccaaaccgcagcgcctccatttctccatggaaaacactctgaacatccaccttctttgcaccaaaagctttgaccgaactcaaattatcaaagaacacggccgccacagccccgactccgtcagccaaagcaaaatccacaaaacctctaactctgccaggtctagggagaacccagcgcacctccgccacgcctcgaagaccctcaccattacctttctcttcaacaagaagccgattatgttctagaaaataatcctccactctcttgcgcaccatgtccacatccataagcatcccacggtgaaaaatctcattatggcaaagccacaatttatggtacaagatagcaccataaagaaaaaaaactagacgcttccacattggacaagagatgccgaaacggaggttggagaagccaagaaaccacctctctgccacttgaaaactgaatagaatcaagtatgatcccccaacgagaagagaatcacaaagatttcgtcacaggacaggaagacacaaaatgactagcatcatcacacccctcttggccacacataacacaagcaccaggagctttcccaaagatattctacaatttagacccaaaaggaagggcatcctggcataatttccagataaacagcttgaatcgttggtgcattctcatcttccaaatacaggagcaaacatcatccttagtttcaaatcgatccttattaagatcccaataaacaacttttaaagagaaattaccatcattagacgatttccaacaagccaggtccgtgacaggcagggcattcctatctgaggaggaaatcgtatcagccacctcagggataaaaaccatattaaccaattgagagttccatccagagacactgtcaccaacaaggtcacccaccaaaactggttccttgatcaaatgattaatagcaccctcattcaaaatcgatccatccccacacttccattgttgacaccaaatatcaacagaggaatcctgaccgatggtccaaacacagttcaaggcaataaactcacgagatgcccaaatacctctagccacaagagaggccttagaaggaaggctggaggacaaaaaacccgagtgtctacaatacttagcagcaataaccgaagtctagagagataaagttcctgaagccaacagtcatccgagcttagagagtaagcaaaaattaatattctttgaatgcctgaatccgaggctgccaccggattaaggcttcaaaatgggaaaagataatttttagcacatttatttaataacatttctaataggtgttaaattagtgaagtgctaaattatatcacacaaacaaaaaataaatactctaggtctagtattaaaaagataattacataaaccattattttttataaaattttatttcaatattttttttttacatttttacggttgtataccgagattttcataaacgggattaagtaagagtttaagaaattaaatagtgattaagtaaataagatggaggatttttacgtggttcggatgtttattatcactagctcacgggtcagtgtattggccttttaggctttgaaatgtattatcactagttctcttgaagaagtagaaagctta

SEQ ID NO: 234044 - DNA, 1063 bp, Cannabis indica
gtctaaaaaataaaaaataattacaagtttaaagaccgcttggccggtcatgatgtcttagaaaaggccttacggccgaataagatatataaaaaataaaaagataaaaggagaagtgtttaaacagctggagtcccaggctcttggttcgggtcatctgagccagtagaagctggaggatgtgttgtttgaacgggaggtacatcagcagtttggccagaggtagaagtagccgcctcaggttcaccataggttacttgggaagtgcagaactcgaggtacatgtccttagcatcacccaagtagttaaagtttgcctgaggattagccttccaaaagtcaaagaagagctcaagaccagcagtctctagagcattaaccttctctttcagcttcgtcacctcggccgaaagctactcctccttagacttcttctcctcctccacccgtcgaagaattgcccgaagagaagtcctctcatcctgaagactgttcactttagtagataaggtctcgatggtctcttcaagacgattagaaacctcgagatccttagtcagctcagctatcttcttctgggttgtaaagagcttcttgttggcttcacccaactccatccgaatagctccaagttctgccctagcgtcgttagcatgcttcttggccaagtccacctccgccctcatggtgttggacagagtcgtgttcctggaagcagcagacttagcccaagagtaagtgtaggccaatttcagaccggcctgcacaaagaaaaaactttagcattttagcaaattaaagaaaattaaaggaaagtgtcaagaaagacttaccctggtgaattccttcaagactccacccatcagcagctccaaagaagagtcattgtcagcacaagccagttgctcactaacctcatgaaacagccggttcatatagtgggcaagcatctctttgcccgtcttggcctctcgaagcaccggtaaaggtggagtaggggcccacacctattcgggttcacttctgactagctcagaccaacccttcggtagttcagacctgt

SEQ ID NO: 234045 - DNA, 585 bp, Cannabis indica
aacttacaaatatatattctaagaaaatagtagttattttcttcatcatcactcatacataactataaatatttttcctcaacaaaattctcacacctttataaatatataaaacatcaatatataatgatgtgaaaaagaatgaataaggattttattgtatagggttaaaagaaaaataagatcaatatttaggctcaaattggatcaaactaggaatttaagaaataggataggcttgaaaagctcaatcgatctaaaaaaattgcctatatcatatcttaaaatcatatgaaattaatcaattttgcctaaaatgattatcaaacaagttctagagtggttgagactttaaatcagaagtcaaacatgcattcatctttctaaacattagcaaatacaataattaattgatgtgcaaaaattttataaaaattaagtttgagcagtaattaatcatgggctaagcacacaaatcatgagaatctatcattttcctagaattataactatcagagaattaagaatttcatcatcaacaaaattatttttcaaaagaccgtgcgtaagacatcaaagtaaaaa

SEQ ID NO: 234046 - DNA, 1148 bp, Cannabis indica
ttcttcacaataaagtcttgaactttctttgatgtaatgtttgcgagtagttcggcctcagtccacttagtaaagtaatcaaccgctaccactgcacactgcactcaacctttacctttaggtaattgtccgatcagctcaatcccccaaatggcaaagggccacggactttgcatctgtgttaactcattgggtggagctcttgatacctttgaaaatctctagcatttgtcacacttcttaacataggcttttgaatcttcaatcattgccggccagaagtaaccttgccttagaattttcttggataagctttgtccggaagcatgatttccacaaaatccgtcgtgtacttcggataggagccgtgcagcttcttcttgagtgacacaactgagcaatggcatcgagaatcctcttctgtacatgactccctctactatgatacaccgtgcagctttccttctcattttctgagcttcatttcggttatctgggagtttcccagactcgagatatgctgctattggtgtcatcctgtttggggatgtatcaatcattttgatttcttccatgcgagtgatgctaggatctttgagaaactggataggaaccaagtttgccttgtcacttacattgctgcttgccaatcgagctaacgcgtttgcagttatattttcttctcttggaatttgtctaagaccgtagcttttgaattgtgtgagcagatcatgtattttgcttagatatgctagcatcttttctcacagagcttcatattctccggatacatgatttaccaccagctgttaatcactgcagatttcgatgtgttcggccttcatctcctgggctagtcttagcccaagcgattagagcttcatactcggcctcgttgttagatgctttgaatccgaacttgactgcagcgtgcaggtgttgccccccaggcgtgacaagggcaattcctgcaccagataattgacctcgcttttagccaacgacaacgagtccatttttataagcgataagtgatttataataacaaatatatgataaagcaatataaagacacaggaattttattgagattcagccccgagcagttcagtaatagcctaatcctcgttaattgtattaacttaaga

SEQ ID NO: 234047 - DNA, 1379 bp, Cannabis indica
tttgtgtcgtgctcgaattcgtgctgtgttttgctcgtgccgacttatatttctcaaatagaccagcccatttcatatttggacttaaatttgtattttactttttcatatatttttttataattgctaattatatgtatatttcaaaattttaattatatttatataacgttaaagctttagttatatttatataacgtttgaaccatatattttatagataaacatataaaaaaattattaatattattagaaattaaatagttacttataaatactaaaatttttatatcacaccctataaataaattaatatataatcttaaattttcatgctttaataattttaattatagaattataatattcaatattattttaatttatttataatttataaattcatatcttattattattattattaataaattgtaagatttttaatatgttttgtcgtattttttaggcttgtcgtgtgtcgtattttttgggcttgtcgtgtgttgcacttttcgagctagtctattcgtgcttacgtatcgtgcttttcgtgcttctcgcgtagtgtcatgcttaaggacatattttttgtgtcgtgtcatactaattcgtaacattgtctcgtgtcgtgcccaagcacgtatttttcgtgcttagtcgtgctcgtgccttctgaactcgtgtcgtgtcaaaaagcccaacctatatttatagcacttatcggtattggtgcaattcaatatcaagtcctacttattttaatttaataaaatattatagaaaatcactaaccaattataaaatatcatctcatagtggtattagacaccttagtgccttataacaatgctaaaaaaaagagccttattataaggtatcagtattgtctagcactatctagaggtagaaccttttaattgattagtaatattttataataattattaaattaaattatgtggaacttgatttttttttttgaattaaaaaattaacttttattaaatcaaattagctaccaagatagcttccaaactagtaaggacctaacccccgcgagaaacacagccaagaatagaaccagaagaatgagctaaaaagttaaccgcctggttcccggaccgtttaacaaaattaattgaaaaaagaaacaaaagagaggactgcataagagcaacacaattcgtaattaaaagtcctaccggagacaacaaccgcctcttctgttgcatgacttgtaccagcagcagcgagtccgactctataaccacactagtaggcacaccccctctacccaccttcccttcacccaactgagtgcctccttcaacgtcatagcttcagccaaaaacgggtcgggttgaccataagtttta

SEQ ID NO: 234048 - DNA, 1300 bp, Cannabis indica
ctggtattttataaaaacacagtatttttgaaaagatttccgtgtaatagtatttttgtaaaagttaacctaaattccagtatttttgtaagtttcccaataaagtttatgaaagactgggaagatcaaagctaggagtcgagatacaagaatatataactaagatggtaaagttatatttaattcggatcaatttgagatgagactcatctcaaatcgtgccaaggaggatattctccaagctgggatgaaatctgcaaacccaaattttaaattgttggcttggattagagaagttcacaaatttccatttgtgtaaagtatatatttatttttgtataaattacagtaaataaatagtgtggtttataatttttatatttgtgatataaatctgaaaaatgtgagtaaaattgttggtttataaatctgaaatgtattctagttttgtaaatctgaaatgtattttagttataaatctgaaattgttggtttgtaattatatatatatacataatactagaagaaaggtacgtgcgaggcacgtatacttagttttatgctaagtgttttctacataatttaaaaataatacaataaataattgaaaaaaaaatattataagttattttttgaaattatttttacgtatattcaattaataaaaataatggagttccaatttaaaaataaatacttgaatgcttagtaatggagttgcaatacgtaatattttatttaaaaagaaataaaaataaaataataattattataaataaatattcttaaaaatttttataatatattttcactataaattaataattatattgaaaattagtaacgatatttgttctatataaaaggagaaacttatcttgtcaaatgtaattgatgccggctgaaaattttgaacacagactacttcaaataatttaataatttaaataattcaataactttacaactctattaataaccgagaactaaaaatctctaataactaatatcactaatagtcaaaataaaatctataattaataataaagtttagaatgaaaatttaaaaattaacctaataagctaatacaacaaaaactaacacctcaaataataataataataataataataataataataataataattagttttaaaaataagtcataaaaaacaacataactaaaattaacaaaaataaagaaagtaaaaaactaagctcaaaagaaccgatagcagttaattaaaataataacttaaaactaaacaataccagtgactatagatcttgaatgtt

SEQ ID NO: 234049 - DNA, 1228 bp, Cannabis indica
ataagttaaatgggtttgatatactatgtttttgttgatcaaaacacttctgttagcatgttaatttaaacataacaaaatttgcttaccgtatatattttagttagacagtatcagctttacaatataactgaaattttggttcaactttttattttctctttgcaaaagttaacgttaacttatatatataaatatatatataaatgatgaatactaaccttaaccgacaaaaagctagctatctcagcataatttctttcgcacggtattttctgtatctctcaaccctctctcaaaaatcttcattcagccttgtgatttttatgttttgaagattcttaatttagtttttgggtttccaaataaaaaaaaaaatggcagatgaaatagagttgttcaaatcgatgaagcaaattgatgatgttggaagctttgataatgtcgcaaaactttttcgttcaatattaatttcatacctcatagacaagacgccaagctgttcgatcgagcaatatgaagtggaggaccttttgcttcttcttccgagactgaaacccctctttgacttctaatttagtgtatttttttcttttttttattgcattcgttaactttctattagaagtctatggttaagttaattaattagctataggctgttatagagggttgttaggattctgttacttgaattgttattttctttaatcttgtaacaaattttgtcatgtatatataccctattttgggtcaatgaataagatttaagtttgttttcttctaatatggtatcagtcgcttagaattttctctctcacgatcgctgctatggctagaactcgaactactggttcaggaactccatctaaactcccttcccaaacaattcttcctccataccagatgctcctccaaatcctcagatcattcctccaacctctgttgtcaccggagacattaccaatcctcagcccaacgtgacaacaagacctatctatgaaaatagttcaagtccatactttttgaaatctggtgatcatcctggactcaccttagtcactcctctgtattctgacaagaactttcagtcatggcgtcgtgatttcgaacttttcgttggtgcgtgaaacaagaccgtcttcctcaagggaaccttaccttaacctcctatcgatgatccactgcataaccattggctttattgtaaccaaatggtgatgtcatg

SEQ ID NO: 234050 - DNA, 707 bp, Cannabis indica
actcgtgtaagtattttcttctttattttatcctatcttttttaccaatgtaggcttttaactctttctcatgcaagtcaatctgaagatggattatgcctactctcgagccaaatctatgaccatgaagaatatcaccaccaacaacaatttgcagaaggaggtggattcggccaacaagcaggtcggggaggtaagagctgagctgggagaggtgcaagaagatttttgctgccaccaaccgggtcgaggagttgactaaagagatccaagagatgccatcaaccacccaactcgaggcaaacaatgacgctttaaccaaggaggtcaacgggctcaaggacgagagggagggcctccgtactcttctcgcgaatttaaccaaacataagacggacttggaaaatgacgtcaaatctaggaaaatgagggaagaagagcttttgaaggaggtcaaaagcttggaaactgctgtcctggaagtcttttatgaattttggaaggcaaacccaacaagaaatcactactacaaatataagaattcgcgacggtcctaaaaacgaatttgttcgaagaccgtcgctaaaaaattaagtaactatttaaaaccgtcagaaaaaatttagtattcccgacggtttaaaatcgtagtaaacaaaataggtgacgttttttttgataaaatgcgattttttaatggaccctta

SEQ ID NO: 234051 - DNA, 717 bp, Cannabis indica
aactaggttttggtattccttctcgagcttctatttcgtccgttaaatgagattcgggaaaagatggaataggaagacgtgtttccataacaaacaacatatgtgcctttctttctcttctttcttttttggaattatttattaggagaatctttctaaaaaaaaatatcccttttttattcttatgtcattttcctctttccttcttacatgaacgtgaagatgataacatggcctggtctcgtgatgacggccccatgtcaattcgtagctgaatccctctcattctcagcggattcagttagtcataatcttggaaatggccttataaacaatctggggctaataggagaagaattccaaaacaaaaatgttatagtagtagatggacaggttttgctttcacctaattcagcacgtctagcgtattttttcacagcagctggatcattataattgattccattgagttcaccgccatagaactcaacagttacacctattggaagactagctcgctgctccatataactaatacaaagaaataaaaataagaatgaatgtcatgtacggcgctgtcgaacgagctcttaaaagagtccacctcggatactaaagaatttcaagggcgattaggtgtggtgtgacagtcagtagtcccgtgatccgtaaggggaaataccggataagctgcacaatcccacatcgcctggggaa

SEQ ID NO: 234052 - DNA, 1179 bp, Cannabis indica
tttataacagagtttttacaactgaataacaaactctttgtgagttgtcaaagtctagtttgttacaatcattacaagcagtttgttcaatgcctaactgattttctaacaaacttcctaattgtctcgaatcactttgctcagtatttctaatagccactctcaagtgacactgaacaccaagtgtcaacttgtccctgaaaaaagtgaaggaggatataagtaaaggtttagtaaagatgtctacaacttggtattctatctcgaaatagcacaccacaagttgattagctaacactcgatctcgaacaaaatgaaaatcgattttgatatgttttgtgcgagcgtgaaagacaaggtttgaggccaaggaaccggcacctagattttgtcacaccacaatattggacagttaggtaaaggcatagataatttgttgagtaaggattgtatccaaatcagctcagaagtggccaaggcaagggcacgatattcagactcagtactcgaccatgcaacgacagattgcttttttgaacaccaactaatgagatttcctccaaggaacatgctgtaacatgaagttgacttgcggtcatcaatgtttcctgcccaatcagagtctgtaaaaccttggagattaaattgtttggtagcagtaaaggtgagtccaagatgttaggaacttgctaaatatcagagaatccttttgcacgcatcccagtggtcagtggtaggagtttgcatatactgactgagcctattgacaacaaagttgatgtctggtcgagtgtaacacaagtattgtaatgctcctaaaacacttctggattttgtaggatttggtagaggggtgtcagactgagctgataacttggagctaaaacacatgggaatggaatggggtgttgggaatcaagcatcttagttctagctaaaagaatctatagcatacttgaattgagttaaatagattgttgaatcatctcggagaacctcaaacctgagaaaataactgacttgtccaagcttctttagagcaattctctgtgaagtttgtcaataatttgagttacttgagtttgatcagcactagtaatgagtatgtcattgacatacacaagaaggaggagaagtttcccatttgtgttggtgaagaacaaacgtttaggttgtctg

SEQ ID NO: 234053 - DNA, 1657 bp, Cannabis indica
aattaagaagagaacaaaattaataaaaaaaaaaattaaagtgtcatgtcaccgccttatatctctcctttatatttacatagatagatactaacaatttgtacacttgtgtacacgtgataaattttgattggtccacataatttaattattttaaatattgtaaaattaattaaattttaaaactaatttatttttttaaaaaataatttaaaaaaaaaatcttttttttctttcctttttctttttttctatcaaagatcaagaacaatgatcttggaaaaaaaggaagaagaaagaaaatgatgactgaaaaatactgctcagctaaaatgcatgagcgagctaaacttatatttataacagagtttttacaactaaataagaaactctttgtgagttgtcaaagtctagtttgttacaatcattacaagtagtttgttcaatgcctaactgattttctaacaaactttctaattgtcttgaatcactttgctcagtatttctaatagccaccctcaagtgacacgagtgaacaccaagtgtcaacttctccctcaaaaaagtgaaggaggatataagtaaaggtttagtaaagatgtctacaacttggtattctatctcgaaatagcgcacctcaagttgattagctaacactcgatctcgaacaaaatgaagatcgattttgatatgttttgtgcgagcgctaaagacagggtttgaggccaaggaaccgacacctagattgtcacaccacaatattggacagttaggtaaaggcatagataattcgttgagtaaggattgtatccaaatcagctcagaagtggccaaggcaagggcacgatattcaaactcagtactcgaccatgcaacgacagattggttttttgaacaccaactaatgatatttcctccaaggaacatgctacgacatgaagttgacttgcggtcatcaatgtttcttgcccaatcagagtccgtaaaaccttggagattaaattgtttggcagcagtaaaggtgagtccaagatgttaggaccttgctaaatatcagagaatccttttgcacgcaccccagtggtcagtgggtaggagtttgcatatactgactgagcttgttgacaacaaagttgatgtctggtcgagtgtaacacaagtattgtaatgctcctaaaacacttctgaattctgtaggatttggtagaggtgtgtcagactgagctgataacttggagctggaacacatgggaatggaatgggattttgaatcaagcatcttagttctacctaaaagatctataacatactagaattgagttaaatagattgttgaatcatctcgaagaacctcaaacccgagaaaataactgacttgtccaagcttcttgagagcaatttctctgtgaagtttgtcaatgatttgagttacttgagtttgatcagcattagtaatgagtatgtcatcgacatacacaagaaggaggagaagtttcccatttgtgttggtgaagaacaaacgtttaggttgtctgccctaaagaaaatctatttcaatataatcagatttactaattaataaaagatcagaaatcattatttgttgcatggttcacatgatttatttcatgattatgtttagtgtataaattctatt

SEQ ID NO: 234054 - DNA, 596 bp, Cannabis indica
ataatttatagtattttaaattatgtttatcacatgtaaaaaagaaactctaaggtgttataagaataaaaataaacaaaaactaggttgatatagtcatgttaataacataaattaagaaaagataaaataatatctatttttagacaacataaaaaaatgaagatttaaatattattttactttattataatattaatttattttagtaatgaataataaattagaatcttaacaattattaattttattataatattaatttattttaaatatttttttaagtaataaataatacatattgattcaatccaaacatgataaaataaaagaatggatttattattttttttacaatccaaaaattaaatgtcctaacaaaatctaaagaaattgaagacagataaaaaattaaagagtaagccatacatattaataagaaactatttttttttaattttatttcctatacatatttaaaaaggttccttctatatttatatgaatttgatatttataatcgcgtaaaaaagaaaagaaaaaaaaacctcttttaaatgaattagatgaaatatttttgtctttaaaattttaaa

SEQ ID NO: 234055 - DNA, 2201 bp, Cannabis indica
agaaaagtgaaaatattttttaaaatcatgttctataaaactgtttttacttttcaatttttaaattaagaatctaaattttaaaaacaaaaaaaatcacttttaaaatttttttaaacagtatttttcttaatcaatattttggactccgaccccagcctaaatcttaggacccggactctggcgccggcctcagtcctggactcggactacggccccggccccaaacccgaacctggacctgacttaaataaaatagaaaataaaaataaaattgaaagttatagaacacacttttgtattagtttttaaaattgtaaaacaaaagtagttatagaacacatttttattttttaaaaacaaaattttaaaaacacaaattttacttttgttttttgtttttaaaattaaaaaacaaaagtgttaccaaaacgcgcgccccccttattagatatatatgtttctttttattctttcacattacagtcatagtagtcatgcatgtagtcaacacgtttaggacaaggttcggtacgtggtatggtgcaaaacaatgagaagttaataaaaactcagatttatatatatatatatatatatatatatatatatatatcacatgaaggtatatatgttgtctaacagctttacttaccatttatgggccataccaattacaggtttgactttcattgcattaaagtgaatggtagttttgaatgaaatataaacaaactaaaaatattaggtcaaagtatggagaatatgcttaaaattaattattttagagaagcttggagatgatttgtattatatatgattggtaaatatattgtatgaattaattgtgttatacattggtagtaaaacaataataaaataatttcacaaaagttagctagatatgtgaaataatatttgttgttgacagttttttttttttttttgaacatatttgttgttgacatttatatgcaatgagttgtgtaagatttctaaaagattggaaatatttggatttgattttggataataattatttaactatatattatatatttaggaaattacaactaaaaaacgtttaatcaacaaatacttaaaaatgataaaattaataattcacacacaacaatcagaaattaaaacagagagatgaacatagtattaaaacgagaaacaattaaagcaataacacaataatatatactagttcaagtcttatatatcgatgtgatctataactctactttaattttagaacaccaccaaatcttctttattgattgagcaagaacatgatacaatacagtcgagatcgattctctgttggattctctcaaagtatttatctcttacacttttacccaagaatcttattcatctacaaaagatttttcatacaaaatccaaactcaatctctcaattttctctgtacctttcaatatttctttctcaagatcacctcttaaaactcgtctgatctcgttcttttctaaaaataataagtgttggtggtatttataggtccaaggtataaatcttaaagtcggtggctgcaagtgctaagttgttaagttagttacgacttaacaaacttaacaaactcctcgtaacaatatctccacgtcagcataagataaatacttctcaatgagatgtacgcttctcaaaagatggatcaaagaatacgctgaagggattttctgaataagaaaggcaataactgaagtcgactatctggaactcccttccatccggaacacctacccatccagaactcctttctagaggaatactagctatcctgaagactccttacgagtggacacaatagatatccgggaacgcccattcggatgacatcaatcattccacgagacttcttcttgatggttaagttagacttcaacttttcataaccaggacaacttttggagatcttttcatttggaggaactataccacaaattctacatagtttctttaaattaaaatattaacggtgatgaagaaagaatgcatccaccatggttggtattctagatatctcagtatactaacttatgagattgatcaatttcaaacaatacttgaacttatttaccgttaagaccttagtcccaacatcaacagggttatcttttgatctgaccttctctaattcaatcaatccctcctctatcttctctctaatcca

SEQ ID NO: 234056 - DNA, 875 bp, Cannabis indica
aattttttaaaattaacaatccttatttttatttcatttcaagtttctaattttttgaaattaattttttttatcattctaaaattttcaattagtaaaaattaataatttaaaatttacattttaaagttaccaacctatttaaattactaattttttttattattttaaaattaccaatatgttatagtttgaccattaattttaattgaaatttaattttttttttaaattaaagtctaaactaaaatattaccaatttactaagttaccaatttttttaattaaagtaaattaaaatgttaccaatttacccatttttttttaattaaagtctaaactaaaatattaccaatttaccaagttacaaatttttaattttttttaattaaactataagctaaaatgttattctaacaaaatttggcaacataacaacttaaaattgatcattctcaaatttttgatatctacaaaaaaaccacaaatacaataatatttgccaccaatccaaccgcagtatattgttcacaaaacctacttcactatggatgaatatacaagatattcaaattctactaataagcattttcaggtaaattcatagcttggtgtacttgcaaataaattgtaggacaactttattctatagtgtatgagcaagtatatcaaagctaaagatttgttgaatatagtattaaaactatttttttattaacatattataaaagtattctaaactttaaatggagtgaattttccaagcaacaagtaaagcgatatcgaaaatttgtttactaaaataaaattagaaaataaaaataataactataattctacactaatatacgcatatacatattgtaacgccctaa

SEQ ID NO: 234057 - DNA, 958 bp, Cannabis indica
ttttctgtttgtttctcagctgcatagtccacagctgccagtcctccacctgatccgaccaagcagcccctatccagtcgttgatacccttcaaaacctgctgagaaaagttgcaggagaataaaagatgagccaaactctcatcataacagccgcacactggacaaagtttgctgtcaatatgcagaatctgagaaagatgatctcgactgagcaaactatcattcactgtctgccagcaaataaattagtgctttggaatagcaaaccgattccaaacaaatctttggtgttcaaattgctcaccatgacaaagactcttgtagaattttttgacacaaaatttacatttacaagttgtatcctccacttcttgctgagaaaacatcgatctaatattgcataattttttccaaacattatatatattgttaattctatttttgacatctttattgtgacaaaaatattttataatttattgtttaaattcggttgaagtatttatattaatttccataatttgtgtatttgacttttatatttttgtatcaattaatttttgtttggaaggaaagttgtctaacttttctatttatggaaaataaggtataaagggtaagtttggtgactcatcccttttttatctatctgggtgcgttaatttgagtttcctattgtgtttgatcagattttttgaggagaaaaccaaagcaaaactttccttttataaaaaaaaagtcgtacgtactctcacgattctgtaggtacataaatggaaatttttgggctgtttgaagatctattttagggaattgtctagtgagttgtggtcttgttcagatcgtgtgtgagctgccaataagatgtatattgagtataaatacaccttatagccattaggtcatgtatctctttcatacactttaaattgtatacattgttgggttttatgccc

SEQ ID NO: 234058 - DNA, 598 bp, Cannabis indica
tcaattgaattgttcctatgcaagaaatctcagcatgcaatccattaggcatcaagacagtttttaatctggtattaacagtagtgtttttgaacaaatgaatatcataacacacatgatgtgttgcacctgtgtcaatgatccaataagagctaggagtagagatattcataccagaaaagtgtgaaacaacaggctgttcttcagaggcattttgagtgctgttctcggtggccttttgagcaagaatggccatcaacttctggcattgcacacttgacaaactagagatcaaatctctctccattgaaggctcctcggtcttcccttcatcagctccagaaaaattcactcctgctggttttccagcattccctttagcatcacgattagggaattttccatgatatttatgaccaggtggatatccgtttagcttgtagcatctttcaatcgaatggccattcattccacagtgagtacaattgtacttagatctaaacggctgaacagcaccagcaaactgtccattgtttcctgaagctcctttatctgaatcagtggtgttgctggaaccattagtcaaatttctctgtct

SEQ ID NO: 234059 - DNA, 2911 bp, Cannabis indica
aatttttgtttaataagatttcatatttaagcatgtttattcattggtaaaaacatgattcatttaaacctcaaaactatatatgtaattttattacatcactattcataaatttcttccataccagtagaaatttccaaaaatttattctgataacttaatctaaaatgtacagtttttactgtataattaagaaaaataaatcacactttattatcaccaatacttaaacatatacttaatacttaaacatatacatttcagtttatatatataaatgtctaacatgttcctctatccccatccctgcttattccctattaagaataggacggagaatcacctaatgggggcaaggatggagtaggtcccctaatagaaaaataaattttataataaaactttttatatacaaaaatactaaactacataaatattaaaatattatacattcaataaactaattattatctataatacaacttaaaattcataaaaaagatactaatatactaaaaaaatgtaaacataaattataaaatataaaatattacaaaaaaatataagataaaatattaaacgggtctccatcggggcgaggagtgtgatctccatccccgtcctgtttaactttcggggacaataagtaatttccattcccgttctatttcccatttagttgaggaatccatgtccaattaggagcggatcctcgcggggtccatccgcgtgggagaaatgtgcatcactaatttttaccgtaataattatataacttaataattacaaagttacgcaagtaaatatatttccatgtcactgcattctaaatttccaacaaaaataattaatttgttattattaagtcatcctccaccttcgaggaaaaaaccccaaaattcacaacctggcttgcattgcatccagtgtattatgaactaaaattttctagttttttactagtaggtagcgtaatataaaggggacacatatagatagaaaaaagaaatggagagttaaaatgggattgggaggtgcagaatctacacagagagatccccacacactgtccataagcacgttctttctctgatttttctcatttttatttccagccttttgcagtctttcccttcttcttctttttcattcatcattatttttatatttatttatttaatatgttttatatgtagatgctgcaacggtcgacagactgatttgcatttatattattgatttgcatagtgtgtataggatagtatatagtattcatgttgagctaatttgtctcttacgcttgctctcactgttatggtttctattacaggacaaaatatactagtaaactgtcctttttctccttccattgagaaaatttggactatatccatttaatatctacccaacaggggtaatcttctactggtctgccctctaatgtagttcaaaagctatcctcacaaaaagaaaaagaaaaaataaataaataagaagagataactctgaaaaatgaataataaaaatctacatacacggtttaataattttaaataccccaaatatgtatacattagaattctgaataccaccaacatttgtggataatgttacattcccccacattagaatttgaacaagtgtactatagtctttgcactaattccaatttcaccaatgatatggaatatttttgcaaaattcgtcatgggaatgatcacccccaaccatgggagaatttcatgcaaaattcaaacttcttcaaagggtgttttgggagaactttgcaagacattatgacattgataattactaggtaaggtaagtaaatataatctatttctatctttattgtttgaaacatattaaaatatgcatgatatttaagtaaggaggttatacgatagagataagaacgtagaattggagcatatattgctctcttgcacttttctattatttatttatttatttaaaacttttgggagaggtgattgaaactgaaaggcatgggcatttaaaatgaaacctgcaaaggacagtactactcgatagcaataatattatgcacacattgggaaagtagagaagtagaggagggttgtgactatctgtcataccaataaggcataaaaaaaaataaccatcaaaaatataatagaaagggtttttcatttttgtgaaaacgaaaaaaagtaaggcatattggtgtcccaagaaggtcggctataagacctggtcaaacccacatccttcaaaaaatctcaaaatctggacaccattaaacaaatattattttataccttttcttctttttctgtgaatacctcaatctcaaaagttaaaactcattaattaaacgttttcaaaaaaaaaactcattaattaaatattaacacagatccaaaaggaaagctctcggaaggagctacccgaccacttatttattttaatggaaacattatgattaataataaacctagagataagtccaaataaagttacattttctattgttctagttgattaaacttcaaaaataaagaataaaaactacagtttttatataagtatttcaagacctcatcttcgtagattgacggataatagtgaatagacaaaactggaatgaccactctgcaccaaattctgcagctaagatactccacaatggctgaccccttttctttaaaaaaatggaatattattttgggacttttctgaattgcaaaggccagaaagaatttcaaaatagaaaaaagaagaataaaaaaacataccaaacggcctcgaagagaagttacactgttgtagatgagttggaaaatagaagaatcacagattgctttgagtaattttgattaaaagaaattcatttccagtaaaataagtacattatattattaaccaa

SEQ ID NO: 234060 - DNA, 643 bp, Cannabis indica
ctataaattgtagtttaaagtaattttttattggttataaactgtcatttaaagtagtgtttcatgtaagttataataatccgacagaaatttttcttgatagttataaacagtcatttaaagtagtattttttgttagttaccgttcgacagaagtctttctcgacagttataaaccatcatttaaagtgacttttctcgataattatataccgttatttgaaataatttttcccgaaagttatgaactatcattaaaagtttcgtactattataacacacacatagccgacgattttaaacagacgaaaaatagtataaaagacagttttaaatgccgaaaaatactaattttgtagttgcagacccaactctagacataggcgggcaggcctatgcctatggcgcacctagtcgaggagcccaaaaatattttttccctttttaaaattatacattttttttttactaattttaaaaaatactatatttttttctaaacaaagatctaaaaatatatattttcttttcgtatgactatatttcaaagctgatcttctgcagtgaataatttttaataagtaagactcatattaatgaatataatcgattgcaatttctttaacacataagttgaggattg

SEQ ID NO: 234061 - DNA, 1120 bp, Cannabis indica
ttaatcacataatcttgattactttctactgtgctgacgacaaaataaataagaatatcaatgtgataagaatttggatgaatttatgaatcaaataaatatataaatgatcacgtgaactaaatgacatactaaataagtaatgaaaataaatctgtttctttattgataactgaatagaaaagattacattgaaatatagttttatttaaggcacaaaactcaacaaaaggtgttgtattcacttggaagacccttaaagatggttgctacatgatctcgatcactgtgaacttctccaactaaagcaaatagatcaactatttgtttcactttcaagagataattattgagcattagagaacctttctttaagttctgtaacttcgtgcgaaaatttttgagcagtgttgcaacttactattcttgtgagcaagctctctatcatggaagatagtaaccacgacaaaagtaactgatcttggacttcccattcaatgtgagctaggttgactctgttttctgttcgatcttcattggtcaagaactcagctggaggaggctctttgatatatttgagcaatcaatttcccttgatagcaaccaacgcctacgacttccacaaatgaaaattataatcgtttaaatggattgaaatgttgtgattgaagaagacaaggtcttggaaggtttgattggctcgtggtctgtttgtagcttgaagtccatgcacaactggatctgcagtgttgtttccaagggttgtcatgtttgccataaaaggagagaatgctctgataccatgttgaacctccttaccatgataaccaatcaagaagtaaaacagaggaaattaaacagataatgaaagagaaagagaaagagaaagaaagacatgaaaaatataaactgaaaaaaacagtaattgattcattacaacaggagcaagaatttatatattacgtacaacaaatcaataacagaatagtgaaactatgcaactaactagctgtcatcacaattaactaaagcctagagactaagagacttacctgtctcttccaaggtactctctttttgttgtttctttacatgtgttgtcctaactcttttttcactc

SEQ ID NO: 234062 - DNA, 815 bp, Cannabis indica
cctattgatcatgaatccccatctcattcttcttctcctactactgattccactcatcaaaacaggtctgaaccaattgacactactggttcatctcttcctgccagcagacctgttagaaacatcaccaagccatcttatttgaatgactatcactgttttttgtctctaataatttgtctgttgcttctcaggacagtaagccagtcactgcataccctctacaccaggtgcttgactactccaagctctctcctaaattcaaagctttggtgcttgctatttccaccatgcaagaacctgtttgctttcaacaagctaaaggaatcccagtttgggacaatgccatggactctgaaatagaagctttggagaagaatgagacatggattgtggttcctcttcccccagatcaacatgttattgtttgtaagtgggtttacaagataaaattgaatgctggtggttctattgagaggcataaagctaggcttgttgccaaaggatatagccaacaagaagggatagattactttgaaacctttgcacctgttgcaaagcttgtcacagtaaagctaatcttggccattgctgctattaaaggttggtttctacattaacttgatgtgaacaatgcttttctccatggagatttgcatgaggatgtctatatgactctacctccagggtatagtcataagggggagacaccattgccaccaaatgtagtgtgcaaacttaagaaatcactgtatggattgaaacaagcatcgaggcagtggtttgaaaaggtttctgctgcattgctagaagaa

SEQ ID NO: 234063 - DNA, 1629 bp, Cannabis indica
tttagggcataaaacacaacatatttataatatatattttttgacataaatttataatatcttaatataatattactatgttttatctaacatgtagataaggtaatggtgaagaattcaaagaacaaattggaaataagaaaaccagaactttttaagttaggcatactacctgaagtgtctcatattctgcaatcactgaaagtatgtacttactgtggagcaaaaaagtttcagtatgagagtgaaggattctgttgctgtgctggaaaaattattctaaaagtaaatgatgcgcctactgagttgtttgagctatttactctaacctctgttgaagcacaattgtttagaaaaaatgttcgcatctacaatagtaatttttctttcacttcgtttgttgttaaacatgataaggaactatgtacgatgaataaaggtttatatacatttagagtacaaggacaaatttatcattttattgatagaatagttccgccatcagatactcctcctacttacttgcaattgtatttttatgatactgaacatgaattagaaaatcgactgaattttacagacagcatgagcataatcactctcttacagtttaatccatatagtcaattttttagaagacttggcaatatctctgacttagaaaatcaaaagatacaaataaggtgtgatgcaggtcttgatcaaagggtatacaattctccttctgtatcacaagttgctacaatttgggtggatgatgatgtcagtgcagaaaataggacccgtgatattattgtcttctcatgatgaagtaagtcatagaattcattattattttggatgttatgatccactgcaatatccattattatttccctatggagaaacaggatgacatcaaggtattgagaaatttaatggaagaaaacacaaaaaaaaaattctcgaaatgaagatttgattagtgctcataccattggttcaacttcagagttaattattgcagagactaaaggtacattaatcagccaaactaaattttgatcctaataactatcataattattttaatatttgttttaaattaaatgcatttttttttcttattcagttctccaaaagaagccaaagaggtatttcatctcttgtcgagaatattattgttatgtgttgcaaatttggcatgcaacaaaatcagtattgttacatgctggtcgtttgttacaacaatatgtagtagatatgtacgtaaaactagaaacttctcgattagattattttcgaaagaatcaagaagacattcgagctgaattatacaaagggatcattggtagcattgaaataggtgaaacacgaggctttaaaattggtcgaagaattattttgccttcatcttttattggtggtccaagagatatgcgaaaacgatatattgatgccatgacattagttcaaaaatttggaaaaccagatttgtttctaacaatgacttgtaatcctaattggcaagagataaaagaagaattaagagatactgatcaagtacaaaacagaccagacttgatagcacaaatttttaaagcaaaattggatgaattgaaaaatgatttattcaagaaacaaatattt

SEQ ID NO: 234064 - DNA, 1795 bp, Cannabis indica
aggtgaatccaatgtgatcatcactattttatctgttaatgaagtttctctgagtattttttttttaaaaaaaaaaaaacacagtagggtaaaaattttatcaattaatatttatttatacatttttccaaaacatgtagggaccaaagtgcctttccattaaaataaagaaaaaaaatgtaagagcatgtagggaaagaaatccctctttgcagcagaattgactatatattatacattatttggttccagtcgtacgtgcgcgctttgaaattgcatcagtaatagactaagacacaatataaattgcattattgtacctaccaaacttgaagaaaaacaacatgtttcaatttcactatatgtaaatatcgttttagaagattaaaaaaattactgtagatacatatatattaatgacaagaaaacaattgacacctcctaattataagacggtgccgatttaaggttaattattatttattacatatcttgcattgtaaaatatcctatctcaaactttatattattaaaagttaaaaccaacagtgacatatatgacatataaatgccatggctgggagttaatttatataaatatatttatatatatatatataatatatgccatgaagattgaagagtcactgctcgtatggacccatcctttggaggggtgataatgtggactttaaagattgaaagctccttcacttggagttgtatataaatatatatatatatatatatatatatatttatatatttatagatttatagagtgacagagcattgaaagcaaggatatttctaagaggagaattctcatggatgggaataactgggagaaaacagatgaaaaggcaggcagcccacttgtttgtgataggacactttacctacctcattaatattaagaaagtgctaagagtatttctatagcgaattaaatttagcgtcacactatcactaaatacaaaatttgatgtacaaaaattatttctacttcaactaaaatactaaaaattataacaataaaagagtcatacatgtaatagacagatttgaattttatttttcagcgtgttaaattcttttaaatttttttgaaattttacagaatgtcttaaataactatatataatgtgcaatcagtgcactacttttaaagaagtacattgttttcgtattaaattttttaaaatttttcaaaattttatatgttgtcttaaataactatgatatacacgacaatgaaaaaaaaaatagactaaaaaagtctctcaaatagcgaaacagatagaggtacatcaacaccacttttaaaaaagtgtattataattccataaatacaattaataatatatataaacattaattaaatatacttataaaaaaaaagtgtatgtcgtgtgctacagtgcacgatatatatgtcgtggacatagtaaatttgtaacttttgtaacatttatttaatcaatcaaaaaatattatatcaaaatataaaattcccccactttgattgactaaatacacacttttatggcgcgtttactaaactgtaattgaaatcagaataatcaatgggagaaatgtatcggtttaaaatagaaaataatcggaatcaatattttattatgctgtttactaaactgtccggaaagaaaaccagaatcatattattttgtttacataactaggaaaggtaatcggaatgctttaatttaacaaaattgccattattagaatatgtaattatttttttgtttatagatttttaaagggcatattt

SEQ ID NO: 234065 - DNA, 737 bp, Cannabis indica
agaaagataatttgaggtttaaaccctatctttgtcggttgttcgagttgccccgtaactgaaactgagttgtgacccgtctagaaagatggtcgtggaccccaccattcaattgggattcctttgatgctctttttctatgtatcccggtctacccttttcttagggcctggccggcacataggctcccttggccagtcagggtatggtccgaccaaatcctccttgttggccattttcttattacttggtcatgcctgagtatttggaaccctttttgattgacttgatgtacaaggtggctttgcttatctattggcacgttgtattccatgtagcctcagttttgcctatgtggacatgccacgtcatgtgattgaaaattgggataatattttctccctaagtacctatgcggacgtctatacggataaagacttttcaaatcaagctttggcaaataaaaccttaaccggacaacaatggttggtcaaatatttgacctttcaaatgaccactttatgacaaaaaataactttcattaggggattttatttttcggctgctcattttcccacttatgaaatgttggtcttctgcatgacaattcttgtggacaagtaatcacccactaagttttgaggggaaaagtgctccagaacctatataaggttcattttctttatttttatttcactttaatatctctctctcctttgaattctcttcaagaaaaa

SEQ ID NO: 234066 - DNA, 771 bp, Cannabis indica
ttatgattttaaccacaggaaagcaaaaataactacaatacaaattaatacaaatctaaaagtttgactgcttttattttcaggaacaagaacacttgggctgctgtcatcaaagctttcattgtagcgctcatctatgtttgttaaatcagggtcttcatcaaatttcaacatagatgagtgttcattaactttcgacatagatgaaagttcagcaattttcgacgtcatagatgaaagttcatcttccaacttccctatttttctcagcaagcctggtatgactactgcagcacgctcacacatcggagggtcataccactcccaaaatttacacccaccaacttgctgtaagaaaaaaacatttaattaaaatctcatatttttagattgggtgtcattttctctatatataagcaccaacaaaaatctacatcatttcaaaatagttagagacatatatatatatatcctctaaacaggtataaatatatacaaaaatatcaccacataacaaacaaacttatatttttgtggtgataatttttatatatatcatcttcacaaaatgacacaaactgacaatagtaatttttttcttcccaaaacttataaatttgataagtatgaagcttcacgagagttcatcaagctatattaaatcgatacataaaactcaaacacatagatatgcaataactacattttttttcattcataaattacaaatagaagttgggtatccatataaagaaataataggagctcaca

SEQ ID NO: 234067 - DNA, 1149 bp, Cannabis indica
tttttgtgcaattatctaatattgaaattatggatatatattactaaaaagaattattatttgtaattattaaacttttgttaaataattatcaactttacctctccaaaatatgacaattattatattttactctctgaaataattttttcattgtcaaatttatttattttatgaaagaggcatgacttggcagtaacattcattaattggaggagaaaatatggtagttttcatataaaattgttaattatttaactgaagtctcgtattcaataatggtaatagtttaagaaaatatttaacgtcaataataatttgagggacataatttttttcaaccaataaattcaagggcaaaatacttaattattcttaattaatattataatctgtatttttcttagagcattaaaattgtatggtcattatggtgaattgggaatttggattattattatttattatttattatttaagtaaaactttgtcagataaagattaaaaatgtaacattgctacataaaattggagagattttttttccacccaataaaattcatggtctatcttataaagacatgcttagccaatatattcatacacttaatcaacaaaattatatataatatatatatataaaaaaatctagatagattagtatctcaaatatttaataaattttttaaaattatcatattagaaaaaataactcgaaagctttctcctctcttccatgacgaagaagaagagaattgttcaaaagccagtaactcagaagcttgatcatgatatgacacatgtacgaaggatgaattggagattacgggtaacacaaaaatttgcgtaggactcaatctaattgcagaagctgtgatagaggagaaaacgagtcaggttagggattatatgggtctcgatctgaactcagaaactcaactccagcaaaatctaaaactaggcaaaaaaaaaagtggaagattatgtctatgttagattaggccaagatcagtttcatgaatcggcaagaaatcactgggaatcatttgctaaacataacacaatttatcatgatcctatattgacatacacagaacctcttgttaagaacgacatgaggattgctcaagttgatctagaggaggttaa

SEQ ID NO: 234068 - DNA, 639 bp, Cannabis indica
ttaattattacaataatatttcgttttctaaggtaagattaattattttggcaatgcatattataataagttttgattctttgttgtcgtctgttagtattgggattatttcatcaagtcaattctataaattgaataaaagtttgactaaacatcttaaggtggtaggtgaaactttgacaaagtcatgatcatcatgaattaaagaattttaattttcttttacgactattgttattggtaattagtggtgttcaatattttttatagatggtgctttacgattgattagtgatatattgcataacaactattttttacaattacaacccgatacttaattatacaaatagcagtatgaaaccgaaaaaagtactagctagacactagtagtatcttttagcaattctcttcttttatttagggttatattttgaaagccataataaattaaatttgtgtataattgaaagtagttacacaatttaacttatttatctaactatataattagttagaggtaattgagagttctaattacactctttaatttattactaatatttttatacttaaaatattaaatacttaaaaatattacttttcggtataattactatttatttaaccaaacatata

SEQ ID NO: 234069 - DNA, 872 bp, Cannabis indica
catatcatcattgcttattctttaatgcagcccccgttttccctctaccgagactaccattaatgcttgctcagataacttttggttctccttccttccctatcccttcatgcattcaataactgtcttgttcttcagatggaggcgaatcattgccctatggctgggcagacgaggatctagacctccagcagctcgaatggcgcatgtatctcctcatcttccaggttatacttacttcaggtatatctttctcttatttttctatttaaagaccagcattttgttttctgatcatctttcatctgtactttttaccacttttgctctcttatcttccttgctattgtacctacccatggctcacttacctacttcccagtccactcatctaacccccgaagaagctcttgtccatgatttcgatcatgtttcccttcacccagaaccccagacccattcctattgcttggttgtaaaaatcttgtctcccaaaaccttgaaaatcgattggattcagaaggctatgaatgaagcctgggttgcccgatgcccctttacgttctctgaataccattctggccttttcctggtccagtttggttgtgagggtgatcgtcgaagggtcatggaaggccagccatggcactttgatcgatccctcatgatttttgccatccctgatggctttgacaccatccttccctcccagctgagatacatccctctctgggttcaggtccattttattccttttgggtccagatcctatggtctggctcaatttgttgctgatgctattggtgacctcattgaggtccatctcatttcgctctatgattctgtcactcccttcatgcgagttcgtgttc

SEQ ID NO: 234070 - DNA, 1835 bp, Cannabis indica
ttttataacaataaatgatatttttaaaaattactaaaaaatatgtaaatttattaaaagtttatttggacccttaataggagttttgctgtttaggtgttgtctgaggccatttttctccacaaaaaaaaatatatattgtaatttttgttgatttaggttgttattattattattattattattattattattatatatttaataaaaggaaaagaaaaaagaaaaatattataaatttcattgatggtaagttctacatcattggtattaggctttaggggtaagtgacatattaatattgttgttggtttggtgtaattaaataacataatttaaattacattcatttaaatataaatgtattgaatcttatcataatatatatacataaaaattatttccctcaaattaatatataaaaaaattgaaattgtggagagtgctaaatataattttggataattacgtaatattttgaaaaaaaaaataagaaactgagagggctggaatacaatcctcgactatcattactgtctcagaggcagtggatatagggtgttgagcgctttagaatattgtttagtatttacttagagcattattattactatgtgtagtgttttttaaataattaatgatattttattatagttattaaattaaaatatataaaatttgttatttaatcaaattagtagtagaatgagatgtttgcattgtacatttatacatgatggttcatgtggatgaagatgtcaattcaaaatattaattaaacaagagaagtagagagtatagaggacaattatcatcaatttacagtcataggtcttaatagttaattaattaaggatagcatgcactttagtatgagtaggagtaggaccacatcaataactcacttccttttttacaggtttcattaaaattgacacaatcttttatgtcattattctattttccttctttttctattaatttctacacatttggagtagggtgataattcgtgtttatgggttgtgttcgtatcgtatcgagacttaagtattataagtaaatgcgaaataattattatttgaataaaataaataagattcaagattaaattacaccaagaataacataacaccttgtaattattattaaggtaaatagtggaaccaaaaattttaaatttgtaagtgatataaaccaaatatttatttttaacggcataagtacccaatgtatgtaaaattataatttttctctaattttgtcagcattgttattgccttaaacatagcacatataaagcccaaattcgttacttctaaatattcttttaataaatcaaaacggaggacgaaattaaagaaaaattacagttttacaaacatttagtacttatgccgctaaaaataaatatcgagtttatgcggcttataaacataaaatattgagtacctatttactcttattattaaaactctcttttgagaatgagcttcctcataaactaaattaaaagtagttgcaaaaataaaccttagagattgaacttccaaattagttagttaccaaataacattttgctcaataaaattgctaatagaaaaaagaaacttatccattactataattagaccatagtaccaagtacataccaaaacttgtcactacaaaattgaggtcttctaaaacttttcctccaattgtgacaataaaccacctttacttacacctaatgaagaagaagaagaagaagaagaagggttacttcttcattgtgtcatatatctaaatatctaattaaaactataatattaaatgccaaaaaaaaaaaaaaa

SEQ ID NO: 234071 - DNA, 820 bp, Cannabis indica
ccattgtttaaaggtcttgaagactggtcgaatatgtacattttctgctaagacaggttgactcatgatatagtaagtgtttatgttatttgttattcccttacttgcttagacaattatagcgcataatgggaagaaatagcatactgaccatctatactaagactatgtgtatggtatacacatattgatattgatatctatttgagttttaagtgtttggaagatgtggattaaatgtgtgacaagttatatagtaagggtaattgaattgcttgattatcaagctgttaggacttggggaaaatggtaaggaaaagattcctttattaccgtgatatggaaacatgtaaattctggtatgcaggatatgattagacaacaaggggaagcaaatccgagatctgatagaacaacaggctcgtcttatgtctattcttgtactaccgacacttcctattgtgccactggatgtggagaaatatatgaactcaacttacgagcagatcagtaagaaaaaactaaatgaacccacaattatgggatagaacaaaatgttctagggcggccaggatagcagtcaacgtgagaataagagattatgaccttatcttgagtgttcaagatgcaaaaaggttccattttggctaatgtagagctagatcttattttcattgtggagtaatgggtaatctgataagagcctgcccgcaattgagaaaggttaatgttaatggagaagactgtacaggtcctgtccaagtgccggttatgagactcggatatcggcccttcgaccaactcaggttagaattttatg

SEQ ID NO: 234072 - DNA, 573 bp, Cannabis indica
ttcaatcatatcatgtctttatcgtaataagtggcatatcatagccactacatacgtaacatgagcctaacctggctctgataccaactgtaacactctgatattgtctgcttcactctgagttatatataagtgaccaattatgttatgagtatcaaaatagtattaaattgtaatagaaatattgtgcagatactataagttatttataatttattgctgaacaaattataaatatcccaaaactcatttatgacaagtaacatatatcagttggagaaacaaatcttctatctagttctattcaatttgactattaaatcgatgatgtggcattatacatatatagatggtagttgaaaatttatatacccttaagaaaaaaaaaagaataaaaacatgtttataatggtaaataaaaatcttcaaaataatgaataaaaagaaaataataagaatctaaaataagattgaataaatttaatttttcttgactttcaaaaaaataaatttcggtcaacacaattgttaacaacaccataattttgaactggccaaataagaaaaaaatgt

SEQ ID NO: 234073 - DNA, 929 bp, Cannabis indica
aaatataaaacaattataataaacaaatcaaatacacattaaaatcttaaaaaaaatcaaataaatatgaaatcacaaaactcactacttatctatcagataacacaaaaccgacaaagtcacacataataaaataaaatatgaactaatatttgtccaaatttaaaaaaaaatattataaaagacataatagttaatactcttcactcattatcttcatcaccgattgactctccatatatgatcaacaactttataaagaaccactactacaaaagtcacttttggttttggttctagtattagttaattacaaaatctaacacttaaaatcgacctaattttttagtgttagtttataaccaacaccaaagagtactcaatggtgttaattagaagatcgacactaaaggaaaaattgagactaaaggtaatgttaattcgtaaacttttcttggtgacatggacattaaagcttgacacatgaaaagaaactagatttccaagagttgagtagtccggagtcataacagtcgaccgaggaagggtccttagccctacgcctaggtttactctaagaactccggaatgaatgttcaaattctgataagttgtttctaactcactatccttcagtattttgtaccataaatacatggagcaaccaagtcaaggccccagaatctaaaaataaacaaaacaacacctcaaaagtcaatctgggcacctaagggtttcaccgagcgcccaagttaacaacattaactaggatttcatcttccaggactatcttagtgcaaatggatcaaacttttcattaggacatgaatgagacataccacgaacatatttcaggcattaaaattaaattcaaagaactttcatttttgagcaccccacccggtgcccaagcaccccaacgcccaggt

SEQ ID NO: 234074 - DNA, 1591 bp, Cannabis indica
catctcagttgtaaccaaaaggccattagcgaccttataaataccactcttgtccatgagagagggggtttgaaccttttaatttggagaggctattttctaaataaaaagtatttcacatctctgtctctctcttacatttttatataaagatcacttcaccatttttattagtgattactcaagatttctagccatgatatagttgacgagttcttaccttgaaaagttttgcaccatctgagggaaagataaagttcgagttgcatttttcttagaaagattaatcaatgttccaacatgccaaggcattctcgacatccataagattttggaatatatgtctcgacaataatcgatgggttgtcaccataagagacctcttagcttcggtcaccagagaaaactgagatggaaactaccaacatggcaacgattaaagactaggtgggaaacaaagtaggcagaacaaagtcatcgaaactacacccaagaaaataagaaaggtggaagccatacctgaaaatactccaacaaagagcatggggaaggacttgaaggctctgatgacaagaaatgccaccacattaaacattaagtggcaacgtcaacaagtgtggccttaagcaacgatgattttaacggtttttctagcgaaaaaaaacctagaacctcacaggagaagagctacatacatgctaaatatttagcgactgaagctacctccatggacaacaaaaaatgaccttgcaagctcgtttcactaattgtaaaagacccaagaatatggtgtaatacccaggtaaaacaagttcagcccaacaccccacaatttatatgcccaagtatggtaccgagagataataaagtcatttcccaacttgacagataagtgtccacatgcccataggtgacaacgtgatgacccttactcaaaaaatgctccttgcacaaggggagaaccaagtgaaactccccccacgggccaacggtaaggataacctcccaaaagtgtcttaattgtaaaatgagcaaagcaaaaacaatcaccaagagactctttctcaaacgcacaagaaaaacactgctcaagtaaatgaaatacctgaaaatgggggtagggtacgaaatgaactagattcaccaacaactagacctcccaccaaggtgacatctctggctccacgaacattatggctcccttagaataaaatctcacctgtggtgattcctattaaagatgataaaaggcaggcaccaaggctacaataaccactggagattagaaacctaagaatgagttccaatatctaagaaaactacacaaaaggagggaaatcaaccctaatgctctgtgacattgtcttatggatgaaatgccagttgttgaccctagaaattatcaagtgtaattccaaggtattggcacaaagagaagcaaatgattcacacttaggctcatatggaggcaagaggcaccatgtgagaagatgaactaccccatgagttgttaggttatattttgtattaattttagtatatttttaatttagttttacttgtgtttagagtaattttatgcttgttatct

SEQ ID NO: 234075 - DNA, 938 bp, Cannabis indica
ggtatcagtgtggtgtacatagagttgcactaagataccaacagatatatattaagcatatcagtagccattaaattaacatatcgagatattggtaaagtgtacatagagatgcactgagatatcaacatatatatgctatagattttgttgtacgaacgttccatactcagcatgcgtgggacgcaggataagattgtaattgagtactgtatgggcgcctagttataaattataatctagtttatgtttttcttattgagtatatcaactcacagatattgtttatatatctaggtaaagacaaagcaaatactaaatagtagtgagctcaagctaatgaagttgtacatatcgaggtggttagacctggagtgttcagattttcgagacaataggcttcattttgatagtcgctaggaaacaatttttgtaactatagtattttaaaaatggttgtaactttaaaacgggatctcagattatgtaaagtatttatatatttaaaattaaggtctaattataaaatttttaattattcacgttttcaataaaccttttattagcaaaggtaggggtgtgtagaaattcatccgatccaattacaaccgattgatccaatctcaattgatctaatagaattggatcgaatgtaaactttgaaaatctaattggatcgtatcggttgttggatgagatatccaatccaatggataaccaaactgaaccgatccaattatcatccaataatatttatatctttttaaaatacatttataattttatatatttaatattttattaaaaatatatattaaatgatttattacatatttaacacatgagactaaagaaaaaaaatagttataaaatattaattctcatattcctaaatgccaataaaattatcaatgggtattgaataagttttatttttg

SEQ ID NO: 234076 - DNA, 788 bp, Cannabis indica
tgattaacttgttgacagatccaatgatgtaattttaatcataatccaattgtcaatagatcttataaataattttttttttgatcaagaaggaatgaaatcttcattaaccacaagctctttacaaccaacaatacaaaaccagcagccaaacaaagctacttacaaatcctctctatatacattttctcataatcctttagtttcctagttttcatgtattgcaaactatacattacaactctttgcacatcattaactatagctctagcagtaaaagagtaagcattgtaaacacatctattcctattaatccaaatgttataaatcacagcagcaagaataacaacatttactctttgcttcccattcttggactgccgagccaaccaacacctccagcctttaaattccagcgccataccttgctgcctatccatttctgcaccagaatattcacttctctcgacagccagcaattgaaaaataagtgttgctgcgtttcctcaaccagcccacaaaccgcgcaatttgtggtttccaactcaacatgaaattgaccaagtttatctcgggtcaagagctaaatattaacaacctgccacaagatgaatcgatgttttgggatgtttaaagagctccaaacactgctgctatagtgaaaaggctgttggtttaagagactgttatacaaccagttagtcttgaatttcccactagctcctgcagcttgtatgttcctttccgagaacttatctctcaaatgacataactgttgggttttatgc

SEQ ID NO: 234077 - DNA, 910 bp, Cannabis indica
ccgcgatatctgttgcacatctcacagggacccccttagagaagaacactgttgatttttggtagttgactgcttgtccagaccaagagcaatagtcttcaaggcatttaacgaattctttagcttccttcaaagaagctcgcccaaatagaattaaatcatctgcaaacatcaagtgggtgacagccggcccttctctagataatttgaagccttccagacgaccctctgcctttctacccgcaatcagtcttgagagaacatcagctgcaatgataaagagagcaggggagagagggtcgccctgacgaagaccacaggaaggggacagagttccatggaccgagccattaataagcagccccatttgtttgaccataatgcatttctccacccaattaacaaaagttcgatgaaaacctaaccccttcaaagtagccaggataaagctccagtccatcttatcataggccttctccatatcaagtttgatcatcataaatcctttctttccttttttcttactcatagaatgaacgatttccctagctactgcagtgttttccgcaattagtcttccatgaacgaaagcggtttgctccggagatatgatggagggcagaacatgcttcaaccggagagccaaaactttggagatgcatttatacgctacattgcatagcgcaatcggtctgtagtcattgaccccagtgggacaatctttttttggaactaacacaatgttagtgttgtttataaactggggaagatccattgtcaaaaagaaatgtgtcaccatgtcaatgaaatcccgtttcaccacgttccaatgttgaaggtaaaatcccgtcggcatcccatctgggcctggagccttatcatgccccatcgatctaagacagtcttctat

SEQ ID NO: 234078 - DNA, 1584 bp, Cannabis indica
gtaaaatagccctaaaactagaaacaaatagtgaaaactaactgaaaatacgacccgaaacttagactaattttagcctaacaagtacgttctattgttttgaacgagtttattaattaaataatctcctgatttattcaaaataaataaataaataatcggtctactatgacccataccgaatcatacattcccttggttttagacaaacaaaccacgaaattcattgcaatgtcctcccacttccattcaggaatggataatggctgcaataaccctgccaacttcgaacaacaaaaaggaggtcggccttctcttctcttactttttttcttggaaaggaatgcttgctataaaggaggcggaattacagttccgttcaagtataatgcttttaaaaaaataatattatatttactataaaaaaattcaaacattttttattgacttaatttttagaatttttgtttttattagatattatttaatttaaaatactaattttcatttatcaaaaaatatattttataaacttatttaaaaatattttatattttatatagttctattttacactaaacacaacatagttttaatatatccaatccaatccaattcctgaggtatattcggtggcacccaaatgtggaattaggtcaagttcttttagggttttcaaagaaaaggaatcaatgttgatgaagtatttctttatgcatcaattgttgttcatacgcttagaactataagatacataataataataataataataataataataataataatttggataacattttgaactatattaatatgtagattatagagcttctgtctttactcaaattgattcgatgtcaattaatggatagtcacctctttcattagagtgaatcaagcttaattatgatgataaagtgggtgttgagaacatgtgcgttgtagtggttgctaggaactatcttggtaaggtgatttgggtgaccacttagcgtttgtgcttctttgatcctttttgtggtgagattacagcttgtttcttggtggtaaaaactacaactggccgtggcttcttgtttgtgattgtgagagcgattctagtgtcattaatattccataattcttataaacatattttataatgatcctgagatttaatttatgtttaatgaatgaacactatttcaaaaaaaaaaatcaatctaatcttaacttttagtccattcaatcgcataccacacatggctatagaatatgctttgtatatgccaataaaaattctacacacacagaatagctgttttatttataataagtaacaccaaaatgagtgaaaacaagatgttcttgaagaagagttgtttagtacacctattatatcgttttatatagtgtagtattatatttagttgtattatatgttttattttcatagaatattatggtttaatattgagttatatatgttcataaaaatatataagatgctcgtataaaataaaaatttaatatagtattatataaaaataaataatttgtggtataaatatttaaatttaatttttgattgtaaataaa

SEQ ID NO: 234079 - DNA, 843 bp, Cannabis indica
aaaaagtgttacaagttgaaaataaaaacttagaaggtgcggctagcttgtggagagctcagttggacggtcgctggttcctggtgtggagtggatggctggcgcggctggagatttgaatggtgtgctggtgcgagatgaacgtgagaggagcaatggctggcgtgcgagggtgcgtgagactgagagtagctgagtgagagagaagacaactatggactatggtccaactccatggaggtctgagctttttcttcaaaagagagagatgaatgggtttaggttatgttgtattaggtttagccttagtttgcacatatgtatatatatattttagtttgacttgggctggtcagcccagtttgggttgattgggttgaaaaactatcagcccgaatatcaacccatttggtgcgggttgggctttttttaacccatgtgatattcggcccataaaatctgaccatgcttcggcccatttcgggttgggttggccgggttggtcggcccatttccaacccatgctcagccctagttctcataacattgataacaatatcagaaaaagagaatagaagacaatgaatatcaaagattaaatctaaaaacttagataaatcccaagtttcataatttaaaaatgataaggctttaagtaaatgaaaatgcccattattactttaatcaattttttgtatgtgttttactagtgatgtataaccattgtctttatatgaattcgatgatatctagtttttttttttttattggtaagcggattaatttgatgaacaaaaattaatcaaagccactttattttagtttttaattttctgaaaaaaa

SEQ ID NO: 234080 - DNA, 554 bp, Cannabis indica
agacccgagtgatagtagcagtggtgaggaagatggagatgtcgcatggagagcagcaattgattcagtggccaccacaacctctacttacgtctcttccattattaatggctcttctgacatggctgccaagcaacgtcttacttcggccgatgatggcaatgactgccgaaaccaaaaactcaaacactaccaaatcaaggtcctttctaatctcttcctttttctgtttttcgctatgtgagttctataggaaatgattttatgaatatgtatatattgaattagggctggcttttatattcctttttatgcttaatgatagtcattgaagaaatttcaatggaatataatgagtgaataattaagcatttgaaaaagcgttgggctttaagcatcgaaaattcataatctaaggattttatatttgttttgattatcttattcagtcgatctgcaattttttaaactgtgagtgtcagtgccatgaagctgtccgcagttgtagcaattgctccatgtgaatgttttgaacaatttactcaggtggaatg

SEQ ID NO: 234081 - DNA, 1505 bp, Cannabis indica
actaattctaaagagaaaataacccgttaatatggaagattttagacctgtattattgtgtaatgtgttatataagatcatatctaaagtcttagctaataggcttaaagtgattcttccgtatgttattttggatacctaaagtgtgttttttttgggttgattcattttgaataatatcatggtctccttcaaaattatacataatttaaagcagagaaggcaaggtaagaaactaagaattggtcatatatggctttaaactttagtaaagcatatgattatatggagtagggatatcttcaaaattataattgttggattggttcaattatgcaatgtttaacctccatgtcctacactttggttcatgggggagggagatgaacactgcggtctaattttaccttatttattatatccacaaagattttttgtaaaaatttaattttatatttttacgttcaattttttataatattttataaaagtaatataaaaataattaaaaaactacactaaagtaataggaaagtaacatctaaacaataacaaaaaagcaacatataaataacgaaaaatcaacaacaaattaattaacgttttttttattaatttttgtagtatttagtaaaaataatatctaaaaaaaaaaacctagaaaacataaaaatattaaaggaaaaattatgaaaactaatcagtttttttaaagaaaaaaaaagttctaataagatctagcatacaaaacttcttttgtttgctgtttaattttggctttacctttagaaataaagaaaaaaagaaaagaaaagacaaaccacaaattcaaatactcgaacaaaagtaagaaaaagaaaaacaattggtttcttaatcaaaaaaataaataaataaataaagaaaaagaagtcaaaagttgattagtggctgtccacaaagcaattgacattcttaaattacaagcaaagagagtcacgttaaagtcaagtggcatttttcgtaattaactcattaaaacaatggcatttccatattataatacactttatatatatatatataacttataacccccaaaatcaaaacctgacctctttcatttcattcaatttcttcactccatttttactatggcaacccttcgcttcatcgccatttgtgcgatcttagccgttaatttagcactggtttcatcctcagccatagatttcactggcagccaccatctgagctggatttcatcgagatcggaatgcacaggcacaatcgcagagtgtctattagccggagacgatgatctggagatggagatggactcggagagcaaccggcgtattttagccactaggcgttatatcagctacggtgcgctcaggaggaacactgtcccttgttctcgccgtggagcttcctactacaactgccgacctggtgctcaggccaatccttacaagcgtggatgcagttccatttctcgctgccgaagataaatatatatatat

SEQ ID NO: 234082 - DNA, 1260 bp, Cannabis indica
caaggcgtgataagtaatctcttcatcaagcttgcaaagaagacaaagaccatcagataagagaccatgagtagccaaattaatcttcgtaagaatccaattagaggatgctttccaagcaaacaatctcacctctaaagggatattctgagtccgattttttttccaccaacccgagtacaccccgtagagggagaagcacgacccaagcccttattacaaagagccaaccagatactgctcttgacagaatatcatccaaactttttaaaattctaaatgagcttgtcatccttatcggataaaggcgatataatagataagatagcttctgttttattaggaaaaaagagtccatgaaccaaacccaaatcccagccccctaaagcctcgggtaacaaagaaactttgctaccttcaccaaaaaaaatgaggagccaacatgaaagagggagacgcagacccaaaaattagaataaatatcaatattatgcccattgccaaccctccaaactgctccagattcgaaaatattatacacaaaaaagtcttacttggatcgaactatatcaccaaaatttcggttcctaaaatacaaaccttttagaaactggacacccaaagaggtgggaatgttgtagatcctagccgcttgcttcacaagaagagcttgattaaacaaatcaaagtctctgaaacccacgccaccatcttctttatgtaggcacaatttgtccaaagtataccagtgcattttctatttcacatcactctcacaaaaaacgagcacacatcttataaacattcttgataaaacgtttagtgagtttaaacaagttcatggtataagtagggatggactgaatgatagccttgatcaaaacttctctacctgccatagaaaactttttggatttccagccattaatttttttctaaattctatctcggatagaattgaacaagctagctttgctatgacccgcaaaataggagagactcaggtaagtctcatgacaatctactccgacaactctcattaaggctaccaatctttctctctcaaggctcgcaacgttgggattgaagcacactgccaatttaataaagttaactagcactacaacaaatatagttattaccggcgggtttattgccggcggaactcacccgccggtattaataggggtattaccggcggaaatagccatccgccggtaataactatataattaatattatattaaataaataaaaaaa

SEQ ID NO: 234083 - DNA, 1335 bp, Cannabis indica
taaaatccaaaattttctatttttttattaaatgagaaatgttgacttatagagacatatcgcgcgtgactagataaatgtgtatctacttgcctggcgcgtcactaaaagtatggctttagtgacacgccaagtaaatctgtacacgctttccgagtccctccttgcgtgactctgtatgctaatataatttataaaatttaaataatatttatcttgcttatttatattaaatatatgatatgagatttttttataaaataaataatataaggtatcagatttgtttattaaataaataatataataaatatataaattatatatataagaaaataaaccctagagctaaccgtacatctctttttctcatagcccctcttgcacctcctatctctctctctaaaatctcaacattttttttgctcaacactcaaagactcagccttaagaagagatgatccgaactacattggccatatcggcgtttctcgatgtacatcatacacaattgggttatctttcgaaatagcataacatgcctgactccaaactaatatcgttcctaccatcataaaaattttaagaaatcaagaaaatatggcagtaactcacaatacgcaaggagatcaggcaaaatcttcttctgattagtcttcatattcttcattgaattgtatatgaagactttcctcctcaaaatcctgaagtgaacaaaaatccaatgttgttgtagactgacatgacagggactgacaacatcgcccacaccaatctaaggttgaaaacaaaagtgatattgtcccagaatataatcggtgaccatgttatcgtacctaataacacttggatcacgtttggctttaatataatcagcatacactcccttaagtgttgcatcaaaatatgtgcacgtggtcatcactctcttattaacattaacatcgaatagaatgttgttcctaagatagtagaatgccacgttcagatgttgcacaccttaaataaaaacaataaccaattaaaaattgaaaagtaagaaactaaataacaaaaaaagggatagaatgaaaaataaccagttacgtaccaaatcaaacaatatattcttcgccacaagtgtaacaccctaactaacttaggcatgttagcgtggtttttaacatattgggcagctcgttgctaatcaacgaggttatcgaacatcgtgattaattaaaatattcttatttaattaaaaacataaataacatacttataaaaattttgtgatcccgcttacaaaagtttaatatttacaacaaaattttgtcgcctagcgactatacagaaaaa

SEQ ID NO: 234084 - DNA, 1389 bp, Cannabis indica
gaccaggattgtaatctttcacaagagtggcttatgctgtcactgtccaagggttgccaagcccctggacagtccaaattagagaattcattgttctcggcgaccctgctcagcagagttcgccgcttctgtattctctccagaggttgaatcctttgacatggaaactgcccctgtaattgtgttatccccgtatcccgataccatcttgccattgttctggtttttcctgtcctccccattgtcctgtgtctttgtttgacgattccctttccttgttacaaacttccttcttttttcccttgttcctttctgctggttattactgccgccatcgtagcttattggaacctcaaaaagattgttttccagccccgtgttaccaaattcagcctccatggttcttgctttacatgtcctaccccccatgtaattcatgtatgtctcagtatgaacatcttctcccaatcttttgcgtattccatgattcccttgttccattgttgtcttctccttattcatctcattcatcatcataggagagggaataacattggtggttagattggtattattaagatttaacatattatttgtataattattgatattagaattcatattattggtacctccttgcgatttggtgattaagagtgagtccctttcctctgcaattctctgttctgccatttggggggatagattttgttgtttccttgtattctttcagattgggattgattggcctcagtgctggttttgatagcagtccttcccgtcgaatcaattttgagccaagaaccataactcggtctttctaccccatcttcttgaatcccagttgctcgaggtttagtgcattggcgcatctcgtggccaattcttccacaattgaagcacatgtatggaagtctttcatattggaattgaagccaaattcgccgtccttcatgaggaaataggtaacctgggaatattttggattgaatggagttctggattttaaatttgaagaatccattgatagcaattttattgacatccgcttcttgaacttcaagaatctcccctgccattccaacaaatcgagccatatttgatttagttatagctttgattgggaggttaagcacacggcctgtaatggtgtatgagtaaaggatcgtttcccaatcctctagtatacccttcatccgttccaaaatcaggaagcccgcatttaaaactagggctgtatatcggtcggtttgggcggtttatcctatatattttctaacccaatctaaagttcgggttgctaaaatttaagtgcaacccgcccaatgtaaaaacaaaaaattataaaccgaccaacggtttgggcggttggtcgggttaacccgccca

SEQ ID NO: 234085 - DNA, 1147 bp, Cannabis indica
ataaatgccatcattacaagtcttttgaacaaagtgactgagacctaatgaacaagggtagctttgaaagtcttgtgacaaggagttatgaccttaggcagtcggttagtttttaatttgtcttcttctttccttttttttttttgtatatttcccttttctcttacacatcttcctctgactttacttctcgcatgcatctctcttatcttttgtggctcaacagagaggtctccaaagtgtcgagatgcttaatgtcaaactttgcaagttcagggaacatcatgaggttttagctaagcaatggtctgatttgcagtcgaagatctctaaaattaagaaagaggccgaggagcaacaaaagagtctcaagacagacctcgaggctgcccagaaaaatatcaaggatcttgaagaggcgaacaagaaaggccaagctgaagctgatagaaagcttgaagaggccaaggcctatgccaaagctagggacaatacaatcgttagtcgatcttttatcaagcttggttcgccaaccctgggttggatctgagttttttgggagacaaggctagagagatgttagcattgtgcgaacaaactaagaaggaagaggcgggaaatgctgaggaagaggtcaaagaagaagaagaagaagaataaccaactaagtctctaaccatgtagacttagtcattttttttcaacgatttgtcctttggccgaggcaatggtttgccccttgtggtattttttttttgtaatatatttagacattactttgttggatggttaacattgctgatctatatatttatttttatgcctttatcttacttttttggagttatttatgttcttctattgcgtttaaattcacaatcaaacatttttcttcctcgatttagcttaagatatttttaggttacatgcgttccatcgtcattatcttgaattagacgagtagttaataatctaccacgttttttgtgagcagtttgcaatctgctatgttatttatgagaaagtttataatctgctatatttagagcaaacttcaaatattttgaatagttcttttaagaactattttgaatattttttgaattgcttatatgaatagttaatcctctattcatatttttagctt

SEQ ID NO: 234086 - DNA, 1685 bp, Cannabis indica
tgtactctgcccttgcccttgggtaattgtgcgatcaaatctatcccccatatggcaaaaggccaaagactttgcatttgtattagctcgttgggaggtgcaagaaggatctttgaaaatctctggcatttatcatatttcttcacgtaggccttgaatcttccatcattgtcagccagaaatatccttgccttagtcttttcttcgacagactttgtcctactgcgtggttagtacaaaatccatcatgcacctcgaatagagtcgtgcagcctcttcttgtgttacacatctaagtaatggcatggagaaacctcttctatacatcccaccttcgactatgatataccgtgcagcttttctcatcatcttgcgagcatcgttcttgtcatttggaagttctccggtgttgaggtaagctggtatgggtgtcatcaagtttggtgttgtgtcgatcattttgatttcttctgcacaagtgatgacttgttcttctatgaatttgatcgggactaggttggccttatctattactgtgctactcataagtcgtgatagggcatcagcagttacattttcttctcttgaatctgactgagggtataacccttaaattgtgtgagcaagtcttgtatcttgctcagataggccatcattttctctcctcgggccacgtactctcctgaaacatgattcactactaagtgtgaatcactacagacctcaatgtattcggcatgtacttcccgagcatgtttaagtccagctatgagggcttcatactctgcttcattgttacaggccttgaacccaaatttgattgctccatgcaggttttgccccaggtgtgtcgagggaaattcctgcaccagaaagttggtctgtagctgatccgtccatatgcaatttctaggtaagtctgtctaaattcttttctagtagggactcttgtaccggcttcgggttgtcccttctgttgctttcttctttgcctgtgcactcaattataaattctgccaaggcctgtccttaaactgtggtacggggttaaaagattatttcgtaatgacccaactctataacccatttatgtaatcgcccagaggcatcagacttttgtaatacttggtgcaatggttggttggtgtatacccgaacaaggtgagctttaaaatagagccttaacttccttgttgttgagattaggtagtaagtaagcttttctattaaaggatatcaacttttcgcttcaacgagtcttttgttgatataatagactggatgttggatgttgttttcctcttttattatcatggcgcttacagcatattcagtgacagccaagtatatttctaattcttcttcgtccaggtgttttgaaagtacatgaggtttgggaagttgtctttttaattcttagaaagtgttctctcattcctctttccattcaaactttttgttaccttgaaggatgttaaagaaaggaacatacttgtctgttgattttgaaacgaatatgttaagtgcggctatccaaccattcaagctttggacttcctttgtctttgtcggtgatttcatattcaggagggcttgtattttctcggcattatcctctattcctcgagcattgacaataaaaccaagaaactggtggggtttgtgccctaaataaaacccattac

SEQ ID NO: 234087 - DNA, 752 bp, Cannabis indica
aagatctaactatcatctcatagtctacatggtcatcttcgttttcaaatttttattttattattttgctctcaattgttaatacggtgatgacaacgacattcaatatagtagtgattacaagtgaaatattgtgatgacattggttttgagtgtatatagtagcaactataagtaaaatacggtaaggataataattttgaaattataatgagttttctataaatttatctataatttttttagatcttatttaatatatattagataaaaaaaatatcaaaatttgatatttaatataattttataaattaattattgctaaaaataaatacaatagcatgcgaaacacgatttaaattctagttaaaaaatataaaattagagttatcttaccgtcaatatctcatatgttttaataaagatccttatagatttggaaaagatgactttcttttaaatgaaaagactatggttttaccgtacttatactaattaaaaagcttaattagaatttttgcctcctaaattttaacatgtacttgcccgttaaaaattccccctaaattattgagaatgttagatttaagaacttttgtctaatttcattccattttactatttcagtgattattttcaataatctcaatagttcaaaaagtaattttaacgattttaaaagttcaggaggcatgattttgtatatgtaaaagttcgagggtaaaaatgctaattaacaattaaaaaaaaaa

SEQ ID NO: 234088 - DNA, 1085 bp, Cannabis indica
gttgatctttgaaattcatactctgtattctgctgtttatttcctcccgaatcgcttctcgaagtcaactgaagttcactttttatatagccattgagggactaaaaagataggaaaatgtacatgttgaaaatcctattaagctttgaattaggaagccaccaagcccgcattaagaaataatttttacttcagcataggggcgggccgcgacgccgtccttgttaggtcgcggcccgtgtgcgaacttcacacttagaaccctgtgtttcaagatgcaagccgtgacatgcccatttctgggtcgcaacccgtgttctccatgccctcattttcaacgtgtgtaatcttttcatctaggcaggatactaattttccacaatgatattttatgcgatcttttatcttgtttttcatctttttctgttgatatttttctagttttcttctattttaaatcttcaaaaataaaatataacaagcgtagaattggtccaaacacaagtaaaattgaattaaaaatatactaaacttaatctaaaattaatactaaaaataaccaaacagatacttatggtaatgttccaagtgggagctttaacctcaccacctttgtattgctattttacacagaatttaacatcttgttttccatctcacaaacatgaatagtttagaagatctcatatgcagtccatttggccccgccaagtgtgttaataaaagaaaaactcctgtggaagtcacttctgagtcaaaaccaaaagtttcaaagaaaaccaagaagactgccaataggaagtctgcctaggtcggcatatccattggacctgagaaagtcgcaccaacaacttctatcgtaccagcaactgagagaattggtggacaacctttagggtctctccattaggttaaactctcttggtctcaaccagagatggctctgttggagccttcatgccccctgccaacatatgcaggtgttaagggttcccaagcatgctcaatgtatgctacagaaagttggtgccattttagaaatttccaacatgaagattgggattttatcaacaaaggtgattacc

SEQ ID NO: 234089 - DNA, 608 bp, Cannabis indica
tcgcaaagttctcgagaaattggggataaatgatatccatgttcctggacaaagaaacacgtggcataagaagagaagtacaacttcaaacaatcataaaatgagtatcctcagtgagaccaaatcacatagaggctacgcgaatccaggagtagattaaggccaaaggatacatggaggtttacctaacctcagcatgccatcctaaacacagaaggcttacccttactccaggatccagagtttcccaggatcaaagtttgcacaaagatatacctagaaggttacttgaagggcctatcatagacactgactgcccaaaagagatgtgaacgtctaccttgaaaataaacccagatgctaacaatgattatgcttttttttgacacatgattagatcttgtcccttgtgacaagccatggtagtgtgtacaccccctacacctttttgccagacagttatcccatgcatttactttttaaggttaaaccttttggcgacacgcatcctatatgatggtggtcctctattgtccagttgcttcaatgcacgagcacaatatcttctaggggacccattagttggctctttgcatgtattttacctc

SEQ ID NO: 234090 - DNA, 668 bp, Cannabis indica
tctttagcttgaccaactaaaatctcctctcgaatcttcaccaattctggatcaattaactgagcaattttaattctatctaacagatccgattgcaatgtcaaattattaagttttcctacaacaaactcaatacctgatcggaccatatcatttgctaggtgaggtgagatcttgatcatactagtcacttgccggggacccttcctactaagggcatctgccaccacattagccttcccagaatggtaaaggatttcaaagtcgtaatccttaaccgaatccaaccaacgtctctgcctcatgttcaaatctttcggggtaaacaaatatttgaggctcttgtggtctgtataaatctctcacacttctctttatagagataatgccaccaaattttcaaagcaaaaaccactatggccagttttagatcgtgagttgggtatctctgttcatattcctttaactgacgggaggcataagcaatgacccgatcagcctgcccatacctagtgcggaaagcagtctttggaatgtccttgaataccctattcattaaatccagaaaagtggtcaaagaatcggttagtccaaaagacataaccaggaattcataatgcccatacctagtgcggaaagtagtctttagaatgtcctcctctcgaatt

SEQ ID NO: 234091 - DNA, 1397 bp, Cannabis indica
ttgtaaatagttttgggatcccacctgttgtaaagtttaaattattacaagttttatttccattccgtttaataaaaaagtttcaattctgcgcatttttaattagtaatcccgtttaggggattagggtttcgtaagtatcttggtagcgtgcctaagtatttagagtgttacaataatattatctgtaattaatcttccaaggataaaagctctttgatgtttggagataacctcagacaacaatcctttcattttgttagcaaggaccttagtaataactttggcaatgacattgcaaagagaaatggggtgcaactcactcatttgatcacggttcttcttttttggaattagcacaatattcttattattcatccctaccggcatttgctcagttgcaaaaaaatgtttaactgtatggatcacatcaatgccaaccatggaccaatatttctgaaaaaaaaattggattcaccccgtcaggccctggtgatttatccggattcatttgaaagactgcatctttaacttcttgatctaatataggccgtagtaaagccacattatgctcatctcagacagcaggcacaacacagtccaacacctcatcccaactagaaggttcggcagtaaagagttccttgtagtactcaaccatgacattctccagtccactatcccattgtctcaaattaccctccgagtctttcaaactagtaatgtgattatttcattttctcgcagaacctttagagtgaaagaacttactgttttgatctcccacttgaatccataactgtttaaatctttgtctaccaaaaaccctccctttgattaagaacagaaaagagcttccttttagcctcataaaataatctcttaccgtcctcatctcgtcgcttcttatattgctttaacaaccgattgcattgtttaatgcgagaagagaagttgccaaacacatcctttccccaatgctgaagagcagtaccacattcctatatttttcgaacaatattttgccccgctatcgaagaccaattacgtctaaccacatcttcacaatcttgatgactagttcagaaattttcaaacttgaaagacctcgcttgagcaatagtctcgtgaaagagaacatccagtagaaggggactatgatccgacggagaaatctcaagattgaataatttagaggaagagaaattatttaactaagaattactcacatagctctgtccaaccgggcttctatctaatgagcagtgtctcaactcttctcccacgtaaaaggatggccacacagatccaaatcaatcaacccacattgctgaaccacctcctgaaagccgtcaataagccacgatgggtaatgcaacccaccgagcttctcaccc

SEQ ID NO: 234092 - DNA, 861 bp, Cannabis indica
aaaaaataatagagtttcatttcaattatcattgtagctttctatttgaaaacttctccgacaagcaaaatcatttttcatccaaaaaaagtaatttcatccatcgttctcaacttccttcctccatcatttgacattgttttttccaaatttttcttcttttttctcctctataaatggccattactcggtcttcatctttcccattaccattgctgaaaaaactttcaaaaataagtgttaaatttcatgccaacaaacctaaaagcaaacgacccattgttgaagatggtgattcagactttgctccgcctaccaaaaaagtaattgtcgccctgttaagaagaaattgaaggttaatgttaccgcactacaagaaaagttacttttgccggcgcataagctcgtcggtaaaagtacgtgtaactcaccggcaaacttttgccggcgccatttgtcgccggcaaaagctgtcgacaatggctagtcggcgaatgaccttttgtcgacaacataaagacttgtgccggaaaaagtatttacactggcgcatttgtttgccggtataacgtactcgccggcaataagttcgttggctgatgcatttctgacgacgttttgccggcgatgtaatgcgccggcaaaaggtttggcacgaatcagggcatttggcgtctgatttttgccagcgagtttagtcgccggcaaaacgttaataaaaaaaattaaattaaattaaaaaattatttatgccggcgacaaatgcgctggaaaaagtgttttttaatttttttttattttaattaaataatacttttgccgacgcatgttaagcgcgggcaaaagtatttttttaaattt

SEQ ID NO: 234093 - DNA, 2138 bp, Cannabis indica
aagaaagatcatctcgacactcgaaactataattgtcagaattaaagtaaaatcaatatcaacctcgggaagttgtatgacgagctccggcttgccatcaaagttaactcagtgaggcatccccatgagataaggctcacctcatatctttaatgtgtgctcatctctgctcaataaaagcgagacattcatagctgtgtgaattctaaataaaaacctcatttaattagcgtgatttgtagctcaaatcccatgattttgggaataattgttgtaaagattacagtcaactttgtaattaactgctcactatattattataaatagttgcaagcaagacgaggagggggatgaaaaaaaaactcatataggaggaatcctaaaaaaattagaaatctgaataagattgactcgtggactatgcagaattttaactacaaaatcacgtaaaaaacctcgtgttcatacttaatttttctatgtgaaatcattactgtgaggctcaaattcggttaacaaaaagtctacgttaacagttattgtttacttttcttgctgagtcttgtgactcataggtggtttgtggtacaagtaaagggcaaggggaaaatagggcaaccatgagacgatggtcttctttagaaaataaacatatcgatttattcaacttgtgtggtcgagttttcaggaattatttttctctacactaatgtgtattttgacttacttttgtatatagccctttttgtaaacctttcgtaacaagagatctgcgaaacaaatttttagcgatgccatcatgtataattttactttggtgaagtttttactattatcatggatttgattaattagttcatgtactattattaaactatgttccaaaagcacacacacatgtggcgttcttaggagttagggtgttacaatcataattgatcctccagcttaatactcaccaagaatttgattaacaactagttatgaatcattatagatttcaactggctttgctttgattgctagtgctcatcgtagtcttgctatgagtgcctcatacttttctttgttttttatttaagtgaacttacactgcaatgcacactgggttcgaaatccttccagagttcctaagatgagtcctgcaccggagccatgctcattgaggatccatccacatacagtttccaagaaggcccaaggtcctcctgagttgcagtctcaggcgtgtggacctagttttcacacattatggggtcgtcttcttcgagaccaatgcatttatcaatgaagtctgctaatgtatgtcctttaattgttgcgcgaggctggtaggtgatatcaaactgacctagttcttccgcccacttgagtagacatcctgatgattttaacttcatttgaacttgtctaagtggttggtcagttaacactttgatcaaatgagcttggaagtatggccttagttttcttgagctaagaccatgtagtaacctaacttctcaatggagagatacctagactcatctctaatgaggcacttgctgatgtagtataccaggtgttgtatcccttcttcctcatgcaccagagcagcattggttgcatgctcggtgatagccaaataaacgaacaattctttaccatcggttagtttgtataagatgggaggcctatctaggtgatatttaagagcttggaaggcttgctcgtattcattagtccattaaaacttcttgttgcttccttttagcaaattaaagaagggaacacacttgttagtgcacttagagacaaatttgctctatgcagcaattcatccagttaagcttcgcacgtctttgattcgtgatagtgacctcatgtcttgcaaggccttgatcttttttagattcgcttcagtccttcttgacttgataatgaatctaagaaactttcctgattggacactgaaggcacattttagagggttaagcttcattcgatattcccttaggatgttaaagaattcctctaagtagggctgtacatatattttcgtaaaccgcctaaatcgaataacccgactaaaccaaaccgaaaaaactgccaaaaaaaaaactgaaaaacccaacgaaaaaaaaccgcccaatctgtat

SEQ ID NO: 234094 - DNA, 795 bp, Cannabis indica
ttagttatttttgtaattattttgtattttaagtatatttttgaaaaaaatcccatttaaaatgaaatgggctgaatatcaaaaggaaaaaaaaaggaaaattacatgctatagcctttttaacacagtacatctcatttttacctcctttttaaaattatttaatttataccctctttttcaagtattataccaattatgcccctgtttaaaacctattaacacaatacttttcccatcccaatattgataaaggataatacctagcaattctggttcataattaaaggaaataaaattactattttaccattttaattatatatattttgttcttagtgttgactgagattttcgataacttaactaataattataaaataaagaaaaatagagcttaaaatgaaatgagatgaaattttttacgtgattcagacattaatgaatcctaatccatgaatcaatattatttggagttgttgtatcagcacaacaatagtggttctctcacaatcgttctcgcgtcttggcttaagaacaaaattagggatccttttacaaggtgttgctttattcataagaaaaggcacccttgggccttgattagcaaggggccacttaattaaaaagcttagtgaaacaagatttttccttctaatgagactattataataataaataaagtatttccattgggcccaattggggagaggaccaactagggtggtaagtaaatgggcaattttcaaaaatatgggaaaaattattaaggttatgataaatatagcataaaaa

SEQ ID NO: 234095 - DNA, 821 bp, Cannabis indica
aagaaaaacctcattgatctttgttggctcatctactcggttcccttgcggatccacaatggaaagaattctgttttggttgattctagctttgaggcttgcatgggaaatggccgtattatcatccccatctctaacccaagtagtctttgctttatgctgaaggaattgctgagttcttgtgtgcttgagaaaaaatgcttcatgctgctgattcctttgttgaagttcctgctttagagggtccaaagataactggttttggcaattatccaaaacagatactgctttgatgactgtcgattgcaaatcattatacccctcttgatttatcttcttaaaggccggcttcaatgctttaagcttagccaccacctggtacattttcgtacctgataccttctgctgccaaatatgctgcaatcggctagagtattcagggtgagatatccacattttgaaatagctaaagggctttctcccattgacagcaagatggtgaaaaatcactagagctgaagaatgatcaaaggcaccttcgtttaggaaaatggcttcagctcccggatatgtttccatccatttacaattggccattaccctatcaagtttagagtagatgcggtcatcctcctgttggttattacaccaagtaaagaatttaccactgcttttgatatcttccagttgacactgtgaaacacaatctttaaaagaatgagaagtgagagtcttcacccgacttccaatcctttcttcttgctccaaaacatcattgaaatcacccatcactacccaagggtcttgagtagaaatagctt

SEQ ID NO: 234096 - DNA, 1389 bp, Cannabis indica
tttgtacatttttcatccttttaatcggttgagtactcctggttggcatatttgcctatttattgtttgatatcctggccaaacactcagctcgtgtgttgtcttatgtagatgaaccctggtgagttttggggaggtgaacaccgaattaaccaggatttgctccaacttctatacgaggatcaacctcgtgttcgtgctactccgtcctatgtaagtgacgaactttctaactcaagctttgaagattgggaggtgagtagtgatcgttctcctattccagaacccgtgtgaaccaccactattactccgagcagatcgcaagagaaggatatggtcgcttcatttgggaattgaagaaaggttgaaggcattatcttccgtccaactggacatacattgtccgaccaggtgttgctgatacccatcttgttcgtcgtccaaattctggtaactttggcatcccaattgctgtccctgccgtcactgttgcacgacatacacatcattatccgtccaggaggaggaggatggcccgcacaaaacagacgatgcgaaaagtcaatgcatctaatcctcatgtggctcagctcgccatatttccaagtgccgagcaggatctgcccgccatggaggaggaagatcatgagggggacattgaggtcaaaaagatagaggagcagaacgacgtctgtcctgccagcccttctgaggctgacgaggaaggagtggctgaacctccaaattttagagggtataacgaggtcggggagccagtgtctacgaagggtgatgtcttggtcgcgggagaggactatgtcaccgaggagcatactgaagcagttgcccacaagaggcaaagtgccttaggtgccagatgggtgagccctccgtccaaaataagtgaggcacgcatgagggccttggataaggctgggtacctgggcaaacttgaatgttacgtctcctcttcgaaacaccaggcaagtaacccacaaaaagggttttgtgcatagtcgggtgctcacactaagcaaggggtgatagtgcctttgcacccgtacttcaagagggtggtagattatttttgcctttgtctgacccagttcactcccaagggcattaagtacttgtctgccctgttcgtcctctatgccattcaaggatggggtgtgccgtccccgcacgaggtcaactggttttttaacctgaagtctacccctaagcaaagcaggtaggggtacttctatttctctcagccagacttcaagtggctgacgggtaccgtggactaggatgttagcaagattgaggttttttttatgagtattacttcttggaaggcatggataccacctatactcgattttaacaaatctcgatatatta

SEQ ID NO: 234097 - DNA, 987 bp, Cannabis indica
aaaatagtgctactattgtaagagggaaggtcatttcagagatgagtgtagagccctcaaaacaaagcttagcaaggaaaagaagaagggttatggagatgcatgatgtgtatttgatggatatgagtctgctgatgccctggttgcatcaagtcaagccactggtgatgagtgtattctggattcaggctgttcttttcatatgactcctaacaaatatttcttttgcagctttcaggaacaagacagtggcttagtcttgttaggagataacaaggcggcaagattgcaggaattggttctgtactgatcaaaatgctcaatggatcagaaagaaccattagagatgtgaggtatgtccctgacctcaaaagaaatttgttatctattggtgcactaacacataaaggttgcagcatcaagattgatagttcacttagagctctgaaagactctacagtagtgataaaaggaaatctcagaaatgggatttactacctagttggtagaatagttattggtagggctgcaacaacagtcaaaaataaaggaatggatcagaaaaagctttggcatatgaggttttgacatgtgtggaaagtttgataacctgtatggtatgtacaagaccagatcttgcctacagtctaagcatggtgaggttcattttaaattctagaaatgaacattagtctgctgtcaaatggattctaaggtatttaaagggtaaaatgaatacgggacttgtttacaacagtaacaacaaaagaactattgaagttgagggatttatagactttgattatgctggaagcattgatactagaagatctataacatggtatgctttcacagtcctaggtggatgtgtgagttggaaatccaatcttcaaaatgtggtagcactatcctcaacaaaagctgagtatatggctgccacagaagcaatcaaagaggtaatttggctaaggggtttcacatcagaat

SEQ ID NO: 234098 - DNA, 710 bp, Cannabis indica
acatgaattggttaagtgtgttgacagtgaatgtaatgcatgtctggtcgagagagaatcagatagaggagtcttccaatgagttatcaacagtgagaggggtagtcaagttttcatgtagtttaatatttttatatatttaaatttttattgaaattttattttctattaggggattcctcgccccgtctccgttcctattaggggattttcctccttattcctgatggagaataagcgagaatggggattaaaatccttaacggggatggggacggggggagcactctccgccaatccccaccccgtagtcatttctagacagaacctaacagaaggattacatttctgtatatgtaaaaattcaaggggaattcttaacaagtcggatatgttaagggccaaaatcaatattttcaaaagtttaggaagtaaaattgctaattattctacatttaattgctgtatttttttttttttttgggaagggggtaggcttaactaatgataggatatttattgtatttttatatgtacatataaaatgttgattaattgcaatttgcactaccggccatttgaaatagtcatgtgaattaattattgaaatatttacataaattcaaattttgaaaacaattacaaaaatatgttaagataatttttcttttatttttacgttttgaagttttttatttataaaaatatat

SEQ ID NO: 234099 - DNA, 953 bp, Cannabis indica
agtttgtagaaccaagagctcagatatcaaacccatcaatggcgagaataggttgtactcacttaatgccatccctgctttctccactgaagcaccacacaagtcattgtcagctaatgtttggattagtcggcgttggtggaactgttgggttcggtagagctaaagcacggcccttttcttcatctaggatatgcatgagcctcaaagccggcatcgttggcctacctaatgttggaaaatccactctctttaatgccgttgtaagtagtgttttattgttcagcttgctttgctttgtatgttgataacccagaaatggttttctctgttcttgttttggttatttgctataattttcaattgggtgtcttatttggctgtagtttcattctgggtttttttactctttgctatatatgtggagataaatggtttatatagcttgttccctcaattgggtacatttcaattcttgcatattcagcttttgaatgagaattttaatttaaagatatcttaatgtagtgtgtcagcacatatttctgggttatgtactcattttgtgaactttaaactacgtttgattgggaggaatgaaaatataagaatagaaatgagaatgagaattggaatagaaatgaaaaatttgatcttgcattagaatggtttttcttctattttaaaattaaatagttattcaccaaaatagtgaaaaaatcattctattagaattacatttcaatactttaaaatgtaaccggacataagagtggaaagagaattgattcattttcattctatttcattacctccaaccaaacgcaatagtgtgtaagttgttaaggtgggttcaaagttatgtaagattttttgacaaactgaaagtgataatatgaaatggttttatctgtgcaggtggagaatggaaaggctcaagctgccaattttcc

SEQ ID NO: 234100 - DNA, 916 bp, Cannabis indica
cccgggacctgacagatacaacagctcttttttttttcaggataactgggaacacattggggatgaggtgtgcgatgctatacaatccttcttacacacggggaagctactcaaggaaatcaatccacatcacttacacttatcctcaaaattaaatgcctgaataatgtaagtgactttcgacccattacgtgttgtaatgtgatttataaagtggctacaaaactcatatgtactcgattgaagaatacattacatgacttagtagcctagaatcaagggggatttataaaatgctggtttattgctcataccattatgatttattaggatcttgttatatattatgacaggaaattagcaaagtcaaattatatgatcaaactagatcttcaaaaggcgtatgataccatagaatggggattcatagaagaaatgctacatgcttttaacatcccactaaaatttatccagctagtcatgatttgcatacaaactcctagattctcgatcatgttcaatggttctatgcattctttgaggctaaaagaggattgagacaaggtgattccatgtcacctctaatctttgtacttgagatggaatatcttatcaggatcttgcagaagattggccttaaacaagactttggtttccatgacagatgtgaagctctaagactaaaccacttaagctttgtagatgatgttctattattctgcaaaggcgatttcaagagaatctattatatgttacaaagcctcaaactcttctcacacacttcagggcttcaaccaaataaaaaaaacaagtctgctgtgtatttcagcaggatggaagaaggggagtgtcaaagaatcatagatatttttggcttttgcaggagtgagatgccattcaagtatcttggaattcc

SEQ ID NO: 234101 - DNA, 770 bp, Cannabis indica
tttatttttacttttagtagtataaatgtttatttaaagtaatattaacctaaaatagaaaaaatccctttttaaaattgattgtttatttattattgttatattttgtcttttcaaaatcagtatttgtaacatgtttaatattgttgaatactttgtaaatttgaaatttgaatcgtgttttcctatagataaaatatagcaatttaatgagaaatttcatttcatattttcccccggaaagaatccccactcataatttccaatatattaaccacgtacaaattaaggatgggcaactattattattatttttttctttagaaaagtaaaaatattttgaaacaacatatttcataaagttgttttcatttttaattgttcaaaagaagaataaaaaaataaaacaaattgtcataatttattttaataattttttttatcgttaaaatatgagactttgtatttataatttgagtaatttgcggtataaatacctaagttttataccgaataagagataaatatctaagtcgtatttttggcgataaagtcactagtgtggaacttccgtaggtaattgacaggtcgacatctacgtgtcactcgtgaattggtccatgtcattaatttttttaatttattatttaaatgttgaaaaattataaaaaattaatagaaaactaaatataattaattttattttttaacatttatttcttttccaattctttttatttgaattaaaaataaactcaaattgagaaatt

SEQ ID NO: 234102 - DNA, 1180 bp, Cannabis indica
aaagagaagtgatgtggcatcttatgtgaattttctttgtttttctttttttttttctcattttttcacattttttaatattttttatgcttttgttaatgtgagagttatgttaaaaaagtcccacatgaggttaggtcatgttagagagagatgtctttatgaattggagaaacagggcattttcaaaggcaaacttggaaagaaattggggttctgtgaagattgtatgtatcgtaagtgcagcagagtgaaattcactctaggattacacacaaacaagggtaagttggattatgtgcactttgatctctggggtgcttcaaggactaagaccattaattggggtgctaattttttatgagtattattgatgactacaccagaagggtttgggtatttctactcaagagaaaaaatgaagccttcaaaacttttgttaactagaagaaattgatagaaaattaaactggtaggaggattaagaagctaagaacagacaatggactagaattttgctcagatcagttcacaaagttttgccaagacggtggcatagcaagacacaagacagtgatcaacaccacaataaaatggaatagcagaaagaatgaatagaaccttgcttgaaagggtgagatgtatgctgagaggtgctggcctagacaagaaattttagggagaagcttgcaagcggaaagctatctcataaatagatgtccatcaacagctttcaaatttaaaactccttatgagttttggacaggggaagtaccaaggtatgatcatttgaaagtttttggctgcacagcttttgttcacattagacaagataaattggagcctagagccatcaaatgcttgttcttaggatatcctgatggtgtcaaggggtataaactgtggtgcttagaagatggatacaagaaatgtatcatcagcagtgatgtggtgtttaaaaagcatgaaatggcaatgaaagctaccaatactgatactgatcatggaaaacaaagtgttgaaattcaaacaggaaaggaggatgtagaaattgcagatcaggtggatacacctgcagcacatagtgagcatagttcagatgaagaacaatgataagaaaaaataccttcagggctgtaggattatcaacttgtcaaagacagagttaggagagatgtga

SEQ ID NO: 234103 - DNA, 3352 bp, Cannabis indica
agtagttgacaatatgtaattaacaagacaacatgataattacctgacatgtcctaaatatgtaaagaaaacggtgcctgctgatcaacagtatttcccgtgcatagcatgctttaaacagttcccattttgaagctgcgtatcttgattttgataaagctgatggatgacttttagatttgtcatatggcgtagaaagatgagactgcagagaccttccaattctggattctttgaaggctctagcaatttctgaaacgggaataaatacgtatggcttggagggatctgcccagtactgagcttgatcccttttggatgtcacctgaaaatacatatatagataatattcataacaaaaaatagttaggtgatcaacaaaagacaacacaaaagatgaaccttttaagaaatacctcttgtagaaaatctgctacaccctttcttggtggtagtcggaaacccaatgactcaaaaaactctaaaacatcttccctaggaccttggtacacaatatatccttctgataataccacaagatcgtcaaacaaatcaaatgtctcaggagcaggctgaagaagagctagtagtacagttgcttccatgtgatgaacaaagttcccaatacattttacaattcgaaatgtagtagagctatctaacccggtagagatttcatccataaataaggttttccttggccctacaatcatttctcctgcattcaagtaaaccaaaatattcaagagaccaatacgcaaaacaaaatgaaagctcatgtgttcaagattccacagtgagcaatgttataatacagtataatactaaatgacttttatcatcattgttttcctcttaattgcatatccaaattactagaagtgaaattttatggggagaaaagagggagagaaagacctgtagtgactctttttctctgtccacctgatatccctctcagcatgtcactaccaacaagcgtatcagcacatatgtctaggccaagcactttcattacataatctgttgacacactgtgcttttttccaccaacagatgctgcctgctcagaaaagttaatttaaattgaagactattagaaaaggaataataatgtaagcacttaatgttaaagattccaaaaaagaaatcctagttttataagtacgagattcagatttcaattaataaccttcataaatgcatctatctcaggacttggacgaatgttcctctccttttctaaccgagccaaatcctccatgtacgctaaaagattgaaggaagtgaaagaagaaaaaatggagcaagtgtaattaattctcaattattaacaatcatgaaaatgcagaaccagagtacttttgaggcatataagatacgagtaaattgcagaaactgcatattcataaaattattgcattaatgttaaataggaaaggtaaacaatgggagaacaaacctccaaatccttcacttgcaccttgacacctagctgcgaagtccaaagtctctctgacagtcaattctgctatatggttttctgtttggccaatgtaggcagaagtcctttggacacagaattcattaagttcatgtccattgtaagtgattttcccagatttctgatatccaaaatcaattattaaatggactatttgaaagaaaacaaaaagtgtagcattcttatttacaagtctaatattaaattatgtatcgttttttttttttttttgaaatgattgaattatgtatcttcatgatttagtgctctgtttgccacaacttttatgaatttcagatctataaaatttaaggcttacacctattctcaaagaggaaaaaggcctagacctttcacaacattgttgacaaaaaattaacctaacccaatcattgaaagcctcaataattaagcaaaatttccaatgccgctttgttaaacatacaatattgtttcaatcaaaacaacctaaaaaaaacaaagtagaagaaaaattgactacgctagaggattaggggtacatctaaaccatgtggtgcctgtgaacaataagtaaacaagtatactaacctttaagttgctgtcaagtttccctgccagagctaaaagtagagttgatttgcccgagcctggaggccctaagagcagagtcatcctgcaaaagaaacatgatcctcataatgtcaacgtgaacccgtgctgattgtatagttattagttaaaagaaaacaaaacacgtgaaactaataaatttttaagaaaaataaccgattcattacttcttaattgctttttatattgtactttaatgtcttcgccattgtcagtaagtattaattgctacaaacatgcatgctttatcagtttagttactactaaatttgtgttagtcctagttccatgcacacaaacaagtattaagaatagagattaatgtgaaagttctgtgtaccttcctggcttcacaaccccactgatgtcgtttagaatagttaaagagtgtcgttttggttgacatattctcaaacaagtcaagatactctttattgaaaaggaaaaaaagaagttcatatcaatattagataacaacaaattggaacaatcaggcactaagtaaaagaaaaggaaattatatgttaaaatatactactctacctcaacagcattacgagagaaattgattagggtaggcaaagctcttgaaccagtttgaaccttcgccacaacgttcaaattctcgaaccgaacttcgacgtttggcaccttaattccgactctgttttgttatagacgagcgaccaaattaacttatgcattaattatattaaaataaaaggaattgaataaacagagtataattttggatacaataatgaagtcttcaaatttcttattattatacctatcaaggcgttctttaatggcggaaagaagcttattattatcttgatcgtttgtagccaaggctttcttgacgagattttcacgtccttgacgatcaagtttagttacatcgattgtctcagcgcctgctttaccggaaggcgactttctgagcaaagcaaggttagaacgtttctgagaaggtaacctgacgatggctgcccatagaagctgctcttcatcttgagccaccgattcggcattcgaaggccttccaaaagattcgttaccagcctcaatgtcgaactcaaagtactcgctcccgttggaagccgccattgatgctatgctgttaaacagctagctctgtctctcttggcttttctgtttttccttctctaaatctcgactgaaagcctgaaagagagagaacttgttacaaattcgtgtgatataaaaaaaaaa

SEQ ID NO: 234104 - DNA, 1178 bp, Cannabis indica
tgaaatgggtttatttagggcaaaaaacccaatacagtatacccccttgtcggtcctgaagctagtacattcctgatccgcgacatgcattttaatctgattatacctggagtaggcatccatgaaggataccggcttaaatcttgaggtggcgtccaccatttgatcaatttgaggtaacaggaagcagtcttttgggtaggctttgttaagatcagtgaagtctatccaaacacgacacgtcccatttggtttaggctccaacaccatattggctagcgactcttggtagtacacatcccaaattaggccgttggttagcagcttatccacctctttctctaaggcagctgcccttactggatcgaggggacgtcagtttttgctatattggaggcatttctgggtttgacattcagaacatgggtgatcacgatggggggcttattctgggtcatatcccccctggcaccatgcgaagacatccgtggctgcccttaacgtttctatgatctcgccttttttccttcggctctagattttttcctaggcagatgattttagtggagtcgaggtcgcacacactcactttctcgacgtcctccataggctctatagttgctttggatcccacacggggatcaaactcgtcttattctgtcataattggctcttcgttcctgtgtaccaccaacactaacaagtgtactgcgacattgtaacattgtctcgcctctccttggtttcccctcaccgttcccactccagcttctcgggtagggaacttgaggcataagtgtcgaatggaggtgatcgctccaaaatcgaccaaggccggtttgccaaggatggcattgtaggcggtgggacaatctaccacgacaaaggtgaagtatttgaaagtgctctgcggtgtgtcagggcatagggtgataggaagcctcactttccacattgggataagtgtcgtcccattgaatcctatgagctgcgacccgctaggcaacaagtccctatccgtgagccctatggctgtgaaggcctctttgaataatagatttatagagctcccattatctaccagtattctcgtcatgactttgttggcgatgggagtttctataataagagggtcgtgataggggaagcacactggtttcgtgtcttcttccgtgaaa

SEQ ID NO: 234105 - DNA, 1021 bp, Cannabis indica
gacgttttagtaattggttatcgttgtaataaactgaaaaattgatggtggtaactaataactacaacttcacaatacaaaaatgaaagctagcaacccctagcattaaccagttaaaaaaaaaaaaaaaactcaaattaacgtacaaaaatagaaaaagttatattttggttggcattaactttatgttcatatttttgtaatctctttttctatatgtatatataaagggtagtctccagtactacactctgtaaaatattatttagagttttttagtttattttattattattaaaacagaatacaaacaattacacataacaaaaaaaaaaaaagaaaaaaaacaaaacagtatctcatgcaataaaatatttaaattttataatttttaggagtgtaatttttttaaaatttacatatagtcttaaccgtacacactaataaaaaaaaattaaattaaaaaactctcctaaataccaaaaaaataataggaattatttgaaaacaatcgttttgtgggtatcttgtagattctcctttataaagtggtatttttctaaagtaaatatcaactgtgataattttaacaggcatccatagtgagggtcagagacgtcgaccctgatcacctcgaatcaagatcacctcctatacgctcaaatttccttaaattatgattttctgttatttttttatttaagcgtttatatattagaagaatcatgcataatttggactcgaaccaggaactctaacacacacacacgctcttataaccactaaaggtagcctcaggtggttctctctaggagttagtatgtgagtttttgtgcatatatgcatatctatattccctaatttaatcttatttcttaataattttttaaaaaggtttataaatcaaccatcgaggtccagatagatccagatcatgaatcacacagtaattagatctatatgaaaaaatttccatgaaaatatttttagttaaacattataatagtaatggtcataaatt

SEQ ID NO: 234106 - DNA, 1204 bp, Cannabis indica
tagcagaattactttctgctgctgcaaacgttttcagtttttatattttcacatatacaactgacatttgcaaaaaacacggttttttaattattattagggctggccctaaaaaaatgggtcgaagagagttttagtaaattaagaaaaaaaaatgaaccttttagatttttttttgtatgtatgtaattttaaataaaattaaattaatatttagtaatgtaaatacattccaaactaataaatcatcacctaaacttaaaatttttaatatattacttaaatattatacgtcttgatattgttccggtagacgagagtcaaggttatttttttttatgagcttctacaattatttcatatttataaatttaattctatgtagccactttagggatctaatagaaaagaaaatttacaaaatacttatctttcgagatcttactatgttaaaggtttagtggataactatccataagggagataaagtctagcgtctcgaggtcccattgaaaaaatgaccatgtatgaccagtaatggaaattgaatatccttaaactaaagctcattattttaaaggattgtatattcatttgatatcgattttaatctatttaatttaatattcatatattatttaattaaaattactaatttagataactctaaatataaattttaatttaatatttataaaattatatatatacttaagtagatctgaaaataaataaaacttattttccattcttagtattaatttctataaatattataaaaattacttaagttgaattggtccaaaattaatttaaattaattttcaactcaaatctaattatatataaatatatataactaaatttaaaatccaatatatttagtaaaatacatttttcaaatcctattaaataaaataagacaaatcttgaaaaacttattctaatttatcttgatctaaaattaataaactaattttcaacatcaatataattttcttatttaattaaattgcttaaaaaatatctaatatttaagtatcttgaattaaataaccttaaatattaattttctaattaatttgttgcccctgattttgcccaatatacgtggaccaaccaaacaaggacacgtagatcaagcaatgtacaaaccaaaaataattgctaagtctttatgccgtaaggtggcttccaggacgta

SEQ ID NO: 234107 - DNA, 1536 bp, Cannabis indica
tggctgttattaaccctgaaatcccattatccatttaattaccgtcgttctttcttctttgggctctgtcagcagttttaattccccttccaggtgttgggctacgtttaggctccctcttccaggactccctagccctcagataaagcctttcttctccaggtattttgctttttttgtctatttaaggtttcttcttcaggttatttctgcacaacccttttattccctgcattcctttctcttttatattgctgtctttacctaccaaccactagcaatgaaccttacctctcaaccccaacaacctccctctgcctatactgatgaagaaactcttgttcatgaatttgacaacatctccgtccaccaagattctactccccaatcctactgtctggttgccaaaatcctctcccccaaaattattaagtctgactgggttgccaaagccatgaaggaagcttggatggttcgctgccccttctctttttctgaatatcattcaggaatgttcctcattcgttttggctgtgaaggtgaccgccgacgagtcatggaaggccagccatggcactttgaccacaaccttatcctcttagccatcccagacgcttttgatactattgttccctcccaagttagctatgtcccactttgggtccaaattcacctaatcccctttggcaagcgctcccatgaccttgctaaatttctttctcttcaacttggcgatctcattgaggttcatgcagcctctctgtatgataccattactccctttatgcgtatccgcgtccttgatgatgtcacaaaacccctacgccgtggtatgaacatcaaatttcgctctttgccttcggttaaatggctgaaatttatgtacgagggactccaaaactactgctactattgtggaatgctggatcacaccttcaatagatgtgaaaaacttctgaaatactgtgatgtctccccggttcccccatccctcccttacagggacattttaagagcacctgccaaaactacttataaaaaaagtatttttgatctctccaactctgtcccttttgaagaatcatcctcacgccactctgtttccaaccaaagcctgcaagatgccattaaccaattcctcatccccagtatggtcaacacgtctctgtccctggatgttttatctgatggtagtcgatccactcctttcccacctcactactctgtcatggccaccactaactttatggctgggattcctagcctctcctgtcctctatctaccacccctcttatgactacctctgttatcactagcattgacaagggtaaatcggttatggtctcggaatgtcctcgaatcatcctctcccctcctcccttaactctgtctggtgctaaacgttcgttccaaagacagaatgttcagtttggcaactctgttagggaaatgctgaagcgtgccagagctgccactgaggatgaagatgttgctgtggtcccttccctggatacctctgatgatcaggcgggtgt

SEQ ID NO: 234108 - DNA, 826 bp, Cannabis indica
aaaaaagttgtagagcttcattccaatttccaaagagctaaagctaacaaaatttgtttctctatagctaataattgaatactatacaagagcttgtcaaaggtggcagccatttcgttcacttcatgatatagcattagcagcccatattagaacttttgaaatatcatgagttgactaatacacaaacacagaaaattatcattaaattacatagcacaatccatcaaacaatggggtactatgtgtaataatggtttagtgggggctccttattaatggtttctagatcttttaaatccaacttcttctattcccaaacctcatgggcactaatttatatgtcaaagttgacaaatttgactatatatgcaattttatatttttatttgtaaatagtaagtacataggaagcccccacaaaagactcccaaacgcaaactaaattggagaaaagatagcatatacatgatcaacgagaatctgaccaaaaaaaaactatatccaataatagaataatatatcgtatcttttagtcatacagcttaggaatatatgtactattattagaaaaacaaaaaacttaagaatataattgaaaagttcattaattatttacatatatatatatactagtaaaagttaacgtgcgaggcacgtatactaatttaatgtctaggtatttctgttatattaaaggtaatacacttaaaaactgtttaatctctatcttgttcgaacctaccttatgtgttccataggattgtgtgttagatatgagcttagagaaatagtattacgttagaaatgggtgaccgtgacgtaa

SEQ ID NO: 234109 - DNA, 627 bp, Cannabis indica
aataaaaatattacaaatttaagcacatattaaaattaaaattagacacattagacatcatattcttgttaatcaagagtacacaaactttatattacacagtagaacattataaaattaaaacattgtcaatagtacataataatagtattacaaacttaaacatacacttaaaattaaaatcaaacacaccgaacacattaaacggaaaagtaataacatagatatgaacctttagagataaaatatgatacaataattcaataaagtagaagactatttcctgatcgagatagttataatatgaactataaacttgtgaatcatttttagctctttcactttgatcttgagatcgttggccttcatcttcaacgccatgtcccgaatattgagatgctcgatattgttctccctcatattatgattcctgatattgagattcctaatatggatatccctgatattaagatttctcatattgagatccttctctttgttctccaacgtcttcaaatgtttgtgctttcattgtaaattcatattttttttttgctttgaatgtactgatgaaactctgaatcaaatatagaatttaaattcatgaataaaatattttagtcaacc

SEQ ID NO: 234110 - DNA, 1442 bp, Cannabis indica
aaatataaataggattccttggccaccaatttacacgtttggccaaaaattgggcaataccattataggatctaatacaatgtacaaaattaacattttcgagcctattacaaagactaaaaatatcatctaaagctaataaaaaaataataatagaaacattgtttttaagtttaagcacaatattcaaccagtcaaactcaataataattgtaccatatccaaagaagatgaattgaatcaacgcattgcgaatagcgaaaactttagccacttcagaaacaaaataaccatccaaatgtcaacttgtcgaagctatatcaattcccaaatgatcacgaatcaccatacccaagccactacaattgcccaaagaactaatagtggcatccgtattgactttgagaaagccaagtaggggaggtttccatttcagcactgcttgaagaggggttgtccgaggtcttgactcgccaacagggacgtccaccaactgacaggtggagggaaccgtcaccgaaacctatttgtggtgaaatgttccaaggtaatcgcggggccaatgtacaatgagcacatgagacaattcaacgttgttatggaccattttattacgtttgaaccaaatcctccaaagaaataccataaccaaatcaatcacatcctttgaaaggatatacaaacctgtgaatgaaatcgagaaaatccacagagtgaatgagcgaatcccccaacacaaaatcacataatttcctacaatgtgacaacgaaaaacaccccaaagagcatgatgagtagtttcttcttccaacccacacaaagaacataacccattagttaacagaccatgacgagttagattaattttagttggaagccaatcatgagacgtttgccaagcaaaaagtctaacatttggaggaagattaagagaccaaatctttgtccaccaaccagacaaaccaccaaacggcgaagcacgaggagcggccatattgcgaagcgaagccaataaccactctttaagtttaatgttaaatcatatatatatattatatattatttaaatagtgtaattcgatcggtctggtagctttgaattcgatttaccattatttttcttggattgtcttttataatatatttttagtttttttacaaattattgaaattaaatttccactcttgctttatttaacattttgaattgtttgataattgggagaaaatatagaaaatgaattttctttatttaggtcatgcttgtgagcatggaaatttcgtaggttgtgaattttgattcattgaataaggaattttggataatgtgattgttcattgagcccaaaaaagatgttaaaaatagaaaataaaatggtatttttaaaaataaattttatttggacccaaaaatatttcactcggacctgacccattaaaat

SEQ ID NO: 234111 - DNA, 1176 bp, Cannabis indica
agagagagagggagacggacgtgaggtggtacggtggtggttcgacgtatgagatggagatgagagggacactgacgggaggtggtggtggtccgatagagagacaagaagaaagggagatcgagagagggaggaagacggcgagagaggagggtgatggtgcggaggcatgggtggggttttggagagttaagatttttgttttagggtgtggaaaatggagaagaaataagtgagaagaaataggtgggcatgtgggaaatagaaaagaagtaggtgggtacatgggaaatgtggcgagaagtaggtaacgattttttattaggcacttatacccaacaatttaaagctgtcgcctatagtataggtgacggtttataagggcaaaactgtcgggtataaggacccaataaattcacgaattccaattaaaaatgtcacctattcctgtaattactgttataaactgtcaagaatacgaatttttctcgacgattttaaacagttactgaattttttttagcgatggtcccctaaaaatagcatttttaggaccgtcgcagattttgacttttgtaatagtgtcagcatataagtgttaaaccttaagttccatttcctaggtgcctacttgatgccataaagagacttcttgagtagacatacctcattttgattcccattgtcaaagctctcaggctgttgcgtatagatttcctcttctaattcaccatgtaagaaagctgttcttacattcatttgttcaatttctaggtccgtgcttgctgcctttgccatcatggctctgattgaagcttgcttgaccactgaaaagaaaatctcattgtaatcgatgccttctttttgagtgaaccccttgacaactaaccttgccttgaatttgttaggttcattccctgaaccttctatatgcttgaaaagccatttacatcctaccagcttgagaactcttatttcttcacaacaatccaggttctattcttcctaagagaccgcatctcttcttgaatggcctgcagccatgctgcagcatctttacttcacatgtgaaagctaatgtgttctgaactatcaacctcttctacaatcataagtgcatatgcaatgaatttagcataaccaaaacgatcaagggcttttctctatcttctctct

SEQ ID NO: 234112 - DNA, 774 bp, Cannabis indica
attttattttatatgtgtgtaaattagattatttaaatttttttatattttatataatttaatttcttaatattaaaaagtataatataaattatatgcattcgagagtgcactagtttgttttttttttttatttatattttttagtttttaatccacatggaccacatcataaaacactattataaggttagtgactggtttataaataaataaattttaagcaaaaaaaaaagaaatggtcatatttggacagttcatttaatattagaaaagtcaaaagtctttgtttgtgtattctaaaatataatattcatgttccgtaaggctgttggctcataaaatacacgaggatttgattttaaatgaaatatttgaatgttcaccacaccacatgttattgttcttctttattattattttaagggtaaatatcattttagattttacaaaagataccaattgaattctgtgttttgttaaaatgacaaaatggatcctgtattttctaaaatagtacaaataggaccctgaattgattttttgtcaaaataaagtttaattataatccgatctaaaagtgctatgacaaaactgtttacattttttgtatctgttcgtattaagcattgtcttcaagttggttgtattaaaaaaaaagttgtcaaaaattaagctcagggtcctatttttactattttagaaaatacaaggtccattttgtcatttagcaaaacacaaggtccaatctgtaactttttgcaaaagacaagg

SEQ ID NO: 234113 - DNA, 747 bp, Cannabis indica
aagcagccagagtggcgtactcgtgtataagagccattagtccgtgggtgtaagggctcaatggaggcttgaagcagggacgttacagccagtcttcaagatctttaaacattagttcctctgataccatgttgtaatgtcctatcccatagggacgccacgtatgtgattttataaattaattcataattataaaataacaggttaagaaaagtgtggcttaattaaaatttttggattgaataaaaaacttggatttatattcaaaatagtgctaaattcaggaaatcctatttatgaactcttacaacatgtatcaaaatcgatattacaaaaaggggttacattttcaaaacatgatcaaaaggtgaatcctgaccacgggaagctgagacatagcggttgatatgtacatcgctgggagacctctgactcatgattgttgcacttttcccttccctttatctgcaccacgaagcacccgcgagtcacaaagactcaacaagaaaagcaagtagaatacaaatattgcataacacgagaaatcataaaagtggataaccaacaatttcattatccaatataaacgtttattcgaaatgtaagaaaatattccataaataattattcgtctcataagacaaactaactttatgctttataaatcatccttcctgcttattaccaacgagctccatatgtcactagtgttgcctgatgaagcaatcaatgttgggttttatgccc

SEQ ID NO: 234114 - DNA, 581 bp, Cannabis indica
accataatgcacgaggcaaacaacaagtatatcttctcgacagacaaaataaccattggagataaggataaaaaacagttaccaataattaattcatttatttcacatgttgtaaatataaaacgtggaaataatccacgcttcattaactattaattagataaggccaaatggaataactgtcaaatgagaaattctataaatagggataaaacctatagtataaggggccaaaaaaaaaatctaggaatcaccctacaagaaattcatcttttaatgcttgtatttattgaattctctacttagtaacacaaaacacccaaaaataataaaaatgcgtggactatgtaaatttaactacaaaattatgtatatattttgcgtcaaccttattattataatttattaatactttaaccctttaattaaaaagttattataatacttcataaaaagattgttaacgaaattctgagttaacaatagtatatagtatatagttagtcaaacaaaaaaatttaagatatatttttaccaagagaaatgataaatgacaaccatggtgcctagcacccttataa

SEQ ID NO: 234115 - DNA, 1189 bp, Cannabis indica
aaattataaaatattagtaaaatgatcaaatgctaagcaaagtagaaagcatggttagagcaacaataattaaaatgactatttattttaatgttttagctattttagctaaaatttagataaaaataaagtaaccttaaagatactctaatagtcacacaattttccttttataaggaactttcaatatatattaatctgattaaaaaaaaataaacatgtgtaataaatatacaaacttcatcaaatatcactcaaaaatatatcaattaaagttacaagggcaatagactccctgtaggcacaatcagctagtgaaacggaagctctaactaagtggtgagcaacacgattcacaaatcgttttgcccattttactaacagattttgcctataacattttactttcacagtttcaagctacccaaccaaaaccatatttattttgctcttaaaaaatagcagtatcaacattgatcttaatcatatttccaatcagttttatccaatgctcatccccttcatttgatttcaaatgaaattgagaaggaacaaaagtcttgtcttgagtacacatccattgattaagattaccttttgctaaagccataacaagttgagaaagactagaaattacctttcttaaaatgatcattttctgcctaccaaatagaccagtagagcataactgcaagctttaactcttccttatttcacctggtagcagcctcttggaactagttgccaaaagatcgttccacctcagaattaacagaaaaaccagccatttccagcagcccaatgcaaaaagacaagaaataaggtagtgaaagggaacataatggacataccaaagtgacatataacatgcttcaaatttagttgtaacaatattggtaaacaaccagataaggctctccatgccatatttaaaaccttcgatggtactgatctaatccaccacaatctcttccaaaaaatgattattgacatccaacatcaactcttgcaataaactatatgcacttctaagtagttacctaaagactcttgagaccaatgccatttatcacaagtatcagtagagaataagaaattatttaaaatcaaagtaaataaacaataattttatttttataaaaattgattttttggacataatatataaatgatatattttttttgtttc

SEQ ID NO: 234116 - DNA, 888 bp, Cannabis indica
aaaaataaaaaaacatttgtcaatttttatttttaattttggctagaagagaaaaagtatagagaaataggggtgcgagaggatgttagtaaagagaaagttaagtttcttaccaaaaaaaaaagagaaagttaagtgaatattgataagagaaagtacaaaattgacagacctttgaattgctttggtaagaagctcaagctcatcaatagtaccatatgcatcataagtatcatcagtagattgaggtcaatgcaataactttggtcaaaagctttcttgctcgagagtatttgggttcataatatacaactatggctccatgttgagtctagtctctatgacttttagttttttactacagtaacccattttattactccctatgtgcaattcgtctttctttccctgtggttttgagtgatctttctttttctcaaatggaggaaatgcatgcgaaggaagtgtctgttgactgcattgatgtagctagtactaaactcttggaaagagatagcaacatggaaatggagatgctcgaactgtttgaagacataacccttgaggatgtggtgattaacaaagcttgtgttggaaaggttatgggaaacaaagagatgcctgcatcagtggtgaaaaagattctcatgggggtctggcgtaacatcggctcatggagaatgaaaaaatgtggcgaaggactgatgggcttctttttcgcttctgaggaagactgccagttcgttatggagaaacggccttggttggtgaatggtgtcttacttaatctgaaaccgtggcccctggagggagaagtaagaattgctgaattcgaagttgctcatttttaggtccagtttcatgagcttccaacccgctgcctctcga

SEQ ID NO: 234117 - DNA, 1070 bp, Cannabis indica
tcattacagaaaagattgtcgggtggagccaaagttccaaacctgggccgcaaaattacatagtctactaacatgttcaaaactacaatcgataaaagagggagagattctgttacaaaaaaagacatagttctcatgctcccaacagaaatctttcccattgagggcattgatcactaccctcgaatcactctcaacaataatgaaatgaaaacctagagtcctagctgcctctaaggctaaacagcacgccgccgcttccccacaaagagcatcgttctttattttaatttttgcctagttatatatacagcattcaaataaatagcccaaaagataattctgaaatagactaaaaaatgcatgggtctttttgtcatttcctctagagctttagcgtctttgtcaagaagtttagtcagcattggatttgattaaatttaaagcttttgtttttgtgccaaaacactcaacacgaccagatattatccaaccaaccccgccatggcaggggcagcaccggcgccgatgattcttctccttctgacggcggcgttcttcattcaagctcaaacaaagctccaatcaagtggtgaatcgttcacctctgtcgaaatttcccaaaagggacttaattttgtaaaggacttgctcgttaccaaggcgatttcttccattataccactcgaacttgctccgattaagaagtccatgaaaataccatttttgggtggcgttcaaatggtgttatcgaacatcacaatacatggaattgatgttggatcatcatcgtatgtcaagcccggcgatacgggaatcgccattgttgcttccgggataacttgtagtttgaccatgaattggcgctatagttacagtacttggctttttcccatctatgtttcagatgaaggaagtgcctcaattcaggtatggttttgtactttaatgattgtctagttataattcgttcttttatatcataattatacatatatttagagagagacaatttattggataaattggtctctcttaccttttttctaatgaagataatttgataaata

SEQ ID NO: 234118 - DNA, 1195 bp, Cannabis indica
tactttcaagctcatcttgtttgggtgtacactgaccaaccattacaccaagtattaccagaacctgatgcatgttttgggcagtggaattaggccagtacaaaatcatgtttcaaccctaaacactgattaaagggcaggccttagcagattttgtagttgagtgtacaggcaaagaagggagcacttcaaaaaaacaactcggagcttgtagaagaacattagtcgagcagcagcaaagacaaaccaacctggaagctacatgtagatgggttggccacaggtcaactgtctagtgcaaggattgcccttttcacacctggggggcaacatctacatggggtagtcaaatttgggtagagcatccaaaaatgaagcagaatatgaagcccttattcccggcctaaaacttgctcgggaattgcatgctaaacagattgagatctgtagtgactcatagttagtggtaaatcatgtatctggggagtaggaaggtcagggagaaaagatgatagcttatctaagaaaatacatgacctgctcgcataattcaaaagttattccctcaagcaaattccaagagaagaaaatacaactactgatgcactagcccaacttgcaaggagcaatataaatgataaggctaatttaatccccatccaattccttgaaaaacctagtatcagtggcgcagacgagattgaaatgattgacacatctccgaactggatgacgccaatagcagcctatctcaacactggggaactctcaagtaacaggaatgaagctcagaaaatgaggagaaaggttgtacagtacatcattgtagatggagtcatgtatagaagaggattctccatgccattactcaggtgtgttacgtaagaacaagatgcacgacttttgtcaaaggtacacgatggattctgtggaaatcacggaggtgggcaaagcttatccaagaaaattctaaagcaaggttatttatggctaaccacgattgaagattcaaaggcctacgttaagaaatgtgataaaggccagagattgtcaaagatacctcgcgcaccgcccaactaacaaactcagatgcaaagtccttggcctctttccatttggggaattgacctaattggacaattacataaaggcaaaggtggagtacagtacgcagtggttgaagttgattatttca

SEQ ID NO: 234119 - DNA, 1886 bp, Cannabis indica
atttaaaatggtatttttataaagtaaggcaaaatatcggggcgttacaggggaggacattttccacgaaccatgtgcagatctgggggtacaggaagaaattgttccatgccctgagaagagaagtggttcgaaacttggctgctgggcagaggaggtggagagagctgattttcaagctagtgcggtggatctttggagtaaattcaaatctgactaggtatttactccttcaactaaacttgtgtttactgaacccatcaaagtcggggatcaattagttgctaaaattgacattgaggaagtagaggttgaagcctcctattggaagaatgctattgtttgcatagtgttgggggcaaacccaccgtttaaggtgtttgaggggttcataaacagggtctgggggaaacttggaattgagaaggtggctaggatgaactcggggttcactctggtgaaattcagggatgaagcaactcgagacttaatcctagaaatcggtgtgatacattttgacaaaaaaccagtggttctccgaccttggataactgatatggatgctactagaatgatacaatctgtcccagtttggattcagctgaatggattggggcttcaatactggggcaagaacaaccttagtgcacttgtgagtacgattggtaagccgataatggttgacaaagtcactatggaaagatctatggttaaatttgctagggttcttctggacatggttatttctgatgaacctacaaagaccatatcgtttgtaaatgaaaggaaacagttagtggaaccattggtggagtatgaatggcttccaacgaaatgtgctgcttgtgacttactagggcatacaatggtgaactgcaacaaagataaaaaggtggcttggaagaagaaggttacaacagctcccaacaaggaaccggctaaacctactggtgaggatagacaacctgatgtgagtgacaaagcagggactgatatggcagtagaagaaccacttgcttctgagcaggtgcaaaaagggaaaaaccaggggtcattgaaggtggttggtgctgaagtaaatgaatggattactccaaagaaaaaggggctagaaggttgctacagtagctgagacaagagtaacaggaaaaccaaaaatggctatgcagtcttacaagagactaatgatgagacttttggctctcctatttccattactttttgatggaagtttgtaatatgctaggtttggaatgtgaggggtatgaataagagagaaaagcaaaaagcgagaggaaaggaagagtttgtgggcaaagctatgtagtattggtcacccgaacttaccttgggttattttaggtgactttaatgctatgttcacttacgaagatagaaatgggggaagacaaatccaagccaggacattgaagatgctcaaaattagctctccatgggtcaagttgaggaattcaggtgtactggatcctttttcacttggacaaataagcatgaggttgggaaccttattttctctaagcttgatcgggtgtttgttaacaaattgtgcctggatattttcaccaaagcggatgcttctttcaaatgggataatatttcggatcatagcttttgcataatctgaaacgagtaatgtgggtttcaaacccttcagattttgcaactattgggctgattatcttaattacaagcaaagggtgttaaatgcttgggaaagtcctatggctaggagtggtttggatggtatcatgtagaagctttctcgggttagacatgccctaattcagttcagtaagagtgaagtgggtaacatcacattgaaatacagagaagccaaggaattatacagcagaattcaagaggaa

SEQ ID NO: 234120 - DNA, 1772 bp, Cannabis indica
tcgcatccatggcgatgacccagagcgcggctggggcttgtagcccggtggttttaaagacgggcctcaccgtcatcgctctctgcattgccggctatattctcggtccccctctttactggcatttcatggagggtttggctgctgtcagtcaatcttcttcttcttctactacttgccctccttgtgtctgcgattgctcttctcaacctctcctttccatccccatcggtaatttctcaatgttaatttttgtgatattagatccggcttagatctatttcagtttctcttacatttcatcatagatcgtgatccacgctactgatatacgtactttttttatggtgaggattttagtttatttgctttggtcatggttcagtaattgaggcaatttgtttccaacgaaaacctcaagttaacagctgcttagttattactatattttgcaagatacaccttttctctgtgctgatttattaataatggatcgtgagatatagttttttttggggggatgaactgattctttactgttgtttggtttctttgtatgcaggactgagcaacacctcctttacaggttagtctccgattatagactacctatatataaattacctttaatcttacttttttctgtttacataatacatattagattaaggttagctcttgatatcctacttttacttttactttgagagttatgaataatcaactatgaattactcacttttaaggcagtagctttaactgttttttcttttaaagggtttctgattctattttggaacattagatggtgcattttgttattcattgacaaattcttgagtgataataattcagagaacaagagatgaaattcaattatttctgtctgtagttttttacaagaaataagaagaacagatgacaaatgtctctcgtgataaaatgggctgataagcagctgactagcaccaagttgctgttttaggcgaattgagaatgctcaaacttctatcatctagctagaccaaaaaccatctatgctattaagaacaagattcttgagaacaacaaaaaaataggaaaaaaaatccacagatgaaggatctttcaaagtttaagtgtgaaggttaaggagatgcatccttatatagcatttagaggaagggttttcaatttctcattcacttaaaaggttgaaaaaaaaaaatgagttcagaaattatcaaggataatgatactgaaaaccatgaaagaatgggtccacacaaaccagagttttcaagatctaggttcaaaagtaaaacacatgcctattgtgtaaaccatgatttttcgcaaggaaaaatgataagttaggttcttaatatttatatgcattggaatagtcaaatgagacaatgtgagctactcttaattaggaatcatccatgtgagaaagaagtatggttgctccaaaggggatatacttgggcttaattatttttaaattgtcttagggagatgttcatcgctaaggtaaacatagttatacaaactgatttgtataagaaagacttgtgtgtggaacatgtcattgactcaacgtttattagctagtaaagtacacatatttacatgagagaaggttcaaaggataacacccatttatcataagcaggctttagaccattgccttctgtcgctatatctctgctgtttcattgttttcattttcattcactggggaatttgttagaaatataaagcatgggtgaatgaaaaattgacaatca

SEQ ID NO: 234121 - DNA, 836 bp, Cannabis indica
aaatatattctataaaaattattaaagtactccacttttttaatcactatattttagaaaagcattgaaccaaaattatgttacaattataactaacaaaaatgtattttatttagagaaaataaattgggaaaaaactaacatttgcttttaattaatttttaaataattaaaataatcattaataaaaatttagaataactatcctaacaaaaaacttctcctatttttccttttatttttcaatttttcattttcatcgctaattaaaaatctgaataaaaaaattatttattttgagtaattctttctcattaaaaccaaactaaaataactgatatatataaatgaatacctttatagttagataacttggaaaaggtataataaataaattttaagaattgagtttataagtattgtgaaactttctaaactaaatattatttttaaagtttgacggatttggaaattgaaaacatcattttatataattgattaactaaaatatattaaggtgataaaaattgtgagactttataactaattctttttgttggaggttgatggacatgtagccatggaagaagaaacaatgttttttcaagtcaagaatagtaaaaattatcttatgagtacgtactactattgagatttatgatacaattattaataaattctattgggtaaatactattttagaccttctgttttacaaaagttaccaattggactctgtgttttgttaaatgacaaaatagaccctgtattttctaaaatagtacaaatataggaccctaaactgattttttgtcaaaataaagtttaattataat

SEQ ID NO: 234122 - DNA, 1547 bp, Cannabis indica
atcaccatacatgtgtggtttccaaccacacccaagtacttggaacgtgattaaacagccatatacaatccgtcgacaaaacactatttcacagaaactatcatattctacagtttcaatacaatttattcaaccagtctcactaagtagtcaaaccatataaacagtactaagtataaagtataactatttttctatacctcaaattctctataattaactcttacggtatcttttacgccctatcaacaattagcgaacccttagaccaccgataaactcaatatatttataattcttactataaagcaaatttagcttagaatttgacttataaaatgtttgaattagaaatcctactgctcacaaagtttttagataatcgaaagaccttttaaacggtatagagatcattaaaatcagagttataacgtaggagttatggatattttattaaaacagttttttaaaatcctggatcatgccgatttttgaatacattcccaaaataataattttaaaaatagttacaccccaatccagacaacacttccttcataaaaaatgtagctcatttcttaagctttaaaacaagataaagatcttttaaaatgaatcaaaattgagagagatattgagtttttactaaggatactttttctgaaacaaaacttaaaacgagatatcctaaccaagtaaagataccaattttttacaagtaagaaccccaaattagggaaaggtttcctcaaagaaaatatggattatcgaattatctttctaacagtgtcagaattgttggaaaagaatagatatcgagagagatatcacacttttattgaggcaatattggaaggaaatctaaaaaaactgtaactcgacaactagcatgaaaacatgaatttttgacactgaaattatcaaaattagggaaaaggctcttcacgaaaaatgtagatcattaaattatctttgaaaaggtacttagatcactaaaaattaacatacgaggaaagagatacgattgttttacgaaacactatttctctgaaaaaaaaaaaaaaaaaattatacttgacaaaaattacacaaggaaaagtttaatacaatagaaatcgaatactgtgaaaaaggcttccaatcaacaaacttgagtccctcaaaacctcaattgctgcattacttttaaccttttattttattgaaatttttcttaggtatcaagaaataagaaaaagcaactatgatagttgagagcaaggatatgaggcttcagaggagggtctagagagtagaggataatagattggtacgtgatctcaaaatatgaactaatatttagttaatgtatcagaaaagttaattagatattaacaaaaatcaaatttgaaaaaaaaaaataatcctatcttttcactatttggaccactccaccaatgcatctgtgcattttaattaattactaataataaatcctattagtgaacaaaccaatacaaacactataattacctataccattagcactagggatgcacacggggcgg

SEQ ID NO: 234123 - DNA, 2091 bp, Cannabis indica
acctcaaggattttgggcgaaaattaggctagcacatctgatgaaattcctaaatgcaaaattcgagaagtaaagcaatctataactcctagacctacctacggtggtgtttgtacagacgggaaaaccctaatttcatccctagacagagcatgcatatataaattaaagcgacaagttcataaagtacaatacacaaataaaaaggacatatctgatgaagacaaggggaggtttaaggtgactgttgttgggtttagcttaggaagatgaccacacctctcttgaagacgagaaacagaggcagatcagcaagtcaatttcctttccaaagtccagacttgtgatttcctccacagtagccatcctgatcactagagatggaagatggggatattctcgagccctaattcttagcaatgggtgaaggcagtaatctattgtatcttccaagatgattcaccttgaatgcgattcgaagctttaaggatggtagggagtcggtgcgatttgagagtttaaaaatttgaaagagaaagtaaaagtggtaactgaaggttaccaagggtatttataccccaagacaatgatccatgtgagggagtggatggccacgatcttttcggaacgaagtgcaatcctcatccaacggttatggagaccaaagatctattagtatctccgcatttaaagcctttcaaaatcaaggtgtgaagtaatgatgagaatttcctttttcgatttttgtgccagtcagtgaacaactgccgaaatataatcattcctggaagatgactcttcgataactgtgccttaatttatgctcgactgccacacgtggacacaccatcatcacacgaaagttagcttccatggtcaaagtaacttgggaagagttattattttcttcctctaatatccacatgtcaagattaagagatcagagcaagctccatcatgagtagcatcttaaaagcttggggggtaaatgttatccgcgtttccagaatgggacacatggattccatattagcattccagacccatcagtgggaccctcaataatagaaaaagtgagccaagcccatccagatgtgtccttctgagagttatcttggttccgtgctcaggatacctttcgccttcaacaaatcgagcccaaaagacagtttcagagtcatgagcctggaaggggaagatgcatcattcatggaagactctttcggtttcccaatttgtttccctctataaataaggaaacaacagctgtcaaattgggaaataatatcatatcgcaattaaagaggaaacttcccataacaagcgcaatgcagttatttcagaatattctcccattatgatcggatacagttttgacctgatcaactcaagatcgattctcttactcaacaaattgtatccttcatgggctggacttcctgagtgagcccatggacattatttagttgtaaactccctaatagagggaaaaggagaaacactaatgtaattctccaatcactataaatacccaactaatctcatggattaggggttgaattctcttacgtacttttgctcaggcgaatatacgaatatacgaatatacgaatatacactatgtgtatgtgtacttgagagattattataagttatacattactgaataaaagtgactcgtggactaaggtttgttaacgcccaaccacgtaaaaacctgtgtgtcccttataatactttctctgtccattattacttcagttcttattatcttattttgttttcgaaaaatcttgggaaatacttaaaaatttataatttaccaaacatgttcatattgaattactcgatccaagacatgttattatgaggttctcatcataagaaaatttcattaaagcttggactagggaatctctcgtcattaaggcttattttttcactcaatttcagatcagtgaataaactgaaaactgcgacgatacaatagaaaaaaacccttcgttcatcacagattcaaaaattgtagaaggtgaaggctcttgaagagagacgatttgagaacagtttccagagattggaacccctttt

SEQ ID NO: 234124 - DNA, 990 bp, Cannabis indica
aataggcacgggttctgagtcaacaggaggagcatgatgtagagtatcgggtaagggttgagaactggtactgggaatttgagtggtgttttcctgttgtggctgagtgtttgtgggatcaatgggtgggaattgtgtggcttcaggtgatggtaaagtagatgtggctggtgcaggggacatagcaggagttacatgagttatttcagtgtttgtaggtggtgcgggagtagcatggttgagaattgatgtggatgatggttgctcattgacaccagtaccagtgaacacaggagtaacacgatttgtattagtctcagtttgctggtaattaccagtagaaaaaattgcagtaggtaaatgagatgaggattgagaatttacctgctgatgtgcttgatgaatctttgttgcagggaaggaattttcatcaaagacaacatgtctgctgatgaataatttgcctgagggattttcacaaagataacctttgtgcactgaagaatacccgagaaagatacactcttgagatctaaattccattttgtggttattatatgaccttaaatgaggataacatgaacagccaaaaggctttagaatggtgtagtcaggagtgtggccaaagagatactcagagggtgatttgttttgtaacactggtgttggcaatcgattaataagataggcagctgtatgaaaggcatgccaccaataggtgaaatctaacccagattgagctaaaagtgttaatcccatctcagtaacatgtctatgtttacgttcagccttcccattttgttcactggttttaggacaagggtgagtgaaagctattccttggtcacttagaaatttggaaaaaggtctgtactctcccccctagtcagcttggactcgtttaattggcaagttaaactgtttttccaccatatttttgaactttaaaaacacttcaagggattgggacttaagggtgagaggatatat

SEQ ID NO: 234125 - DNA, 950 bp, Cannabis indica
taaaaaagtatattcaaaatttaatttttgtaaaaactaaattttacggaaacaagtttgagtttatatttttctccagaaatctagatttgtttaagtaaacataatattttcttagtttaatttctaaattttttaaaacaataattttaagttttcattgaatttcaattttttttttctatttttaagatatgagtttgtaaatataaataagtttgattttttcttcacatcttagtttgtttaaattatttattggatttttaataattttggtttgattttttaaaatatgtgtttataaataaaataaagtttaaaaatatttatttttggaataatttgggttttttatgtaaacttaatatttatgggcattttagatccaaaacttacacttttatcttagtatggaaaaataaacaaaaaaagaaagtgaaaaaacatttttttcaaaaatacggattgaacaaaacagtcccattcttcctctttctccttcgtttccaaacgcaccaaaacttccccatctcctccatttttgttctcaaccaaagcacgattttaggtctgaaaaaatcgtacaagttgtgtaaagataagggcataattgtaaaaaaatcgtacaagattttttttatcttagtatggaaaaataaacaaaaaaagaaaatgaaaacttttatttttcaaacatatggactgaacaaaacagtcttcttcttcctctttctcctttgtttccagccgcacaaaaacttccccatctcctccatttttgttctcaactaaggcacgatttcaagtctgaaaaaatcatacaagctgtgtaatgaaaagggtgcaattgtaaagcaaaaatcgtacaagattgatgatgagctcttcttcttctttgtgaagtttccacgtttgaggtcaggtctaaggtaattaatccaacgaag

SEQ ID NO: 234126 - DNA, 1468 bp, Cannabis indica
aaaatatattaataaaatgaaaattaaaaaaagcgataaaacaaaaaatctcatctgcatgggattatttatcccaccctggatgggataaataatcccagacaaatgagtttagctggattagttatctagacttctgatatgcccaaacactggattggacaaattagcgtgtctaatccaatccagttctgcctaccaaacgagcccttaaagtttagttttttatttttatttcaatttctgtaactaaaagtatgattatgcgaataatttatttaattaaagtaatatttgtgctattatattcagttagtaaaatataattgggtatctataagtcataacaaaataatatttattatttacttatagaaaaaatttaaaggaacaacatataagttttgcaaaatttaaagaaaacattatgtaacaaaaattaaagaaagtgtgcgatcattaaaaagaagaaaaaattattaaaataagtcttaatatatggaatattattagaaaaacgaaaagagtatagtgaaacttcttcctaatctttcattggtttagctgcttgaatggtgaattgattgtactttggactcattgttcattttggatacatacaactgaattctccattttttggccgataatttctcgtagttttttggaaaaaaaacctatgtttgtgtaaaaaaaaattattaataagatttaaaaaacttttatttattaaaatttataaatttatatatttatctttttataattacctaatatgactttaattgaactgtagtatgtgagaatgtgttttctgtaacatcttcgaacatctagcaactcggtaccattgtcgagttgtacatatatgcttgcactaataatttataagaatatgtcacggctggtatgaatgtcaattaagtttaaatatcaatttaattataatgtgtttaccgtggtttaggaagacatctttttctgcaatttggattctcacaatctgtttctttattgtcgttataaaacataaatttcttattacatgaatcacatgccatgtaataaaaatcttgatgaacttaatacattaaaaaatttaatattatatgaattataaaaaatcaatgatatttaattattttttttatttgttatatttaattaattcatcaaaaaagtcttcctatattaaacttttttttttgaaagaaaacatgtatccattgcagtaagcatcaacgtttagggtacagattacctaagaaactttgatctttccaacaagcttcctaatctaagcctaatgcatactttgcaaggcatgggcatcttcattatcccatcttgtaatgtgcatgaaagtagcattaggaaggaaagacagcaagctttttatcttctttgcaaaactattcaagagaatgttatcaaaaaagtcttcatatattaaacttgaaactgatta

SEQ ID NO: 234127 - DNA, 864 bp, Cannabis indica
ttggatacaaactgttcatttcggtccttcattatcgaactcctcttctccttctgaagattcttctttcttattcttttccccatctgcattggtgatgctcttcttcttccttttcctttgctttttcttctgacgttttaaacgtctttttgttgttcgttcttcagcagctttcaaacgtttctatttgttttgtatcggtcggaggactgctgaactcgacttcattaacaggtactggttcgttccttgtggctttatctatttcatttatttttcccttttcaatttttttattttaaatttctaatctgcttgtttctatggtttctcaatgattttatactgtaattttatcaatttgtgtttataatcgtgtccaatggttctttaggaacaaacaaactaatgactaatcaactatatatatttcatggtaaaagaagaagaaaaaaaacatttggattatatcttttatctcctttcatgggtcctttggctaccctgaaaccaataaatgagggcaaagtaccttcatcttttgttatggtacactcaacctgaaatgaagaaaataaaaatactctcttggatttttcaaaatcaaagagtttaattgatttgaattctgcctcttcttttcttcgttggtaatctacatccatccgagcaagcctgtcttgctctttccgtctcatttgtcgataccaaatttgagcagaaacttttggtttaggaaagcaatataactcttagagctaattgcctaacggctacatatcaatttgaagattgatgcatagcacacccagcaattatagcgctttttttttccatgaataagcaaccttgaatggcagc

SEQ ID NO: 234128 - DNA, 862 bp, Cannabis indica
taaaccaaaaattctgttatatagtcacactttatatagtatagatatagcaccaaaaataattcataaatcatgtgggattatttttaaaataaacatcatattatatcaaaatttgtgcgtattattttgttcttaaaatgtgaaaactcaaaatttaataaaaataaaagaaaaaacatgtagaataccacttaacactctttatattttcattttaataaaaaaatccttcaaaaagaacaaaaaaataaattaattaaaatactaattttttttttataaatttaaaatttttttcagttcaaaataaataaattattgacacaaaaagatatctaaaaaccttttaatataaaaacttaatttatagaatttatctatcaaataaactcattctataaaaacactaataaaaaagaccacctcttccgaggatgatgatgtggaaaattgaaaaggatagaaaatgaaaaagatcatagtgaaaactgaaaaggaaaggggtatggactatgggagtaacaaggaggtgactcgtaagcataggtggagcccacgcttcacgtggagtatgacacatagtggccacgtaggacacgacaagaggctgccctaaagaatctcctctcatcctctccccaccaatcatcgtccatctcccacgtgggatttggaccccacagaacccctccaatcaaacctattatactgtattatatcatcatatatataatatatgaatatatcatcacctgcccttccccaattccatttcgatgaattatatatatatatgtgcaacacttgatatatgaactcatccacgatatgatatttccacctattttgattataatat

SEQ ID NO: 234129 - DNA, 1504 bp, Cannabis indica
gagaagagagttacattcgcatgtgcaaatcgttccattgaaagctgtaatgggatatggattctaggggatgagaaattcatatttaaaaattagatttggttagcttgtgtttcaggttatacgattaaattttaaaaaatacatcttaataaaaaaatattatttttaaatagaaaacttaaagaaaatatatttgaaatattttaaaaatgttaaaaaaaaagtgactcccatgaatttttcataaacccaagaattcagttatatagccacactttatatagaatatatatatatataaatattaaagaaaaaattaaaaaaataatcaattttcccccacagtttgtgaagaaatcgaaaataagccagaaagggatcgatttttgtaaagaatattaagtctaagattgaacaatcaaatctccccttattgtgattcaaactccactcgaccactcccttgcgatctcctatcattctctacgattatacattcccaaaatcctctttttccaaaaaggaccatgattagggcttcaagactgccagcgatggcaatgaccatatcccatcaccaactgcattaacaaatagagaagcatccaaccacatcaataaatagaggagaaaaattacactcccgatcagatcaacagggagaacaagttattttccatgttattgatataatgatgagtcaatcaaaattatctttctagatataattcaaaagttgtatatctatgaatgcatgacacagagcagagtagaatatacatagagttattataatgcatattaggcatcatatgatgcattgatgatcatattaggttgttggttgatgacgagtaaaagaatgtgtattttttgatctaattgttgtcaaattttgatttatagtccaccattgaagaacgactgccattgcacaaatcttaatcctagcgaacgatccaacaacaacgaaaaatttgagagtcctggtctctcttcttccccttctcatctcagccctatcggaccattgaagaacgaataccattgcatcaatcctggtcctagcgggtgatccaacaataatgggaattttgggagtctaggtctctcttcttcctcttcttctcctcttagccttatcggacactccaagaatttttttagtaaatttagttatggtgtgtgtgacatttactatgagttctttaaaaatcaaattactttcttcttttgtgtttgtatttgttagttttattgttaatttctatttgtttaatcattattatgtaatatttgcttaaacaataattaaaacaataatgatattttaaattctagaatgatcataaatatcaaaggtagttaaagaagtttaatcttttcaagctaagctatatcacttccttttgactaatagtaattaatttcttgtttgttgtatattgttctgcagaaatctaagcctaagcatcaaaaaataaaataaaacaaaatgaaa

SEQ ID NO: 234130 - DNA, 1019 bp, Cannabis indica
caatttcttaatgaaaaaccaagataccagttactttcttgtaatcaaaaatagtttcttaatgaaaaaacagttataaataccaaaactcatataagatttgtgtattatgaaactggtttctatatctccaattgcagcggaatctgtttgatcctttagggttttaatggtggaaatctcatatctagagtctgtttgagccatcgaccgccgatgtgtgggtctctgaacgctgaatgtgtcgctggtgaatagaggtcagtagacagactcttgaggggtgaggcatgtagggtacttgaatggaggagaaaaaataactttgacattttttttttttgaaataatttatctaaacatcaaatatgcctttaaaaattgagtttgcacatatatggcctagaaaataccataaaataattaaaaaaaaattaaaatatgccataaaaagttgctaaacctaaaagtgcatatttttgcaacaaagttttcagaaaaccatattgagtgtaattttctcatgaatttatagattaaaattgttggattaatatgagctcatttgtatatgtaatgaccgcttaattttggtatgagaattagcaaataattaggtttaattcaaaattagatttttaattatgatttatgaatttatggagatatatttgaattcttggtgtgctatttatgtaatatgagaaatttcatgattttcatattttatgcccggtaacagtgaaacgcgacgtttggctggtagagtcacttttcttatggtttagtattttagaaatagcggggcaatttagatagacacttagaatgtcggggttatagttttggaccattttactcctaagtcactttgccatttaaataccttagtgagggtattttagtctttttggatggcttagctaggtggcactctctcttttgggcagctggccattgttttatttattgaattaagtaaataaaaataaccttagttagtggataatttcaaagaa

SEQ ID NO: 234131 - DNA, 1182 bp, Cannabis indica
taaacaactgctaatttccaaattaactaagcgggctttacagctgaaatcttcagattatgtaacccaagattcatggttctctttaggtatttcatgaccctctcaatagcatggaaatgctatatactaagtctattggtaaacctacacaattatcccacgatataagcaatgtcgggtctagtacaatcagtagcatatcggaggctattggttatgctagcataatctgagtatcttaccctatctccaacgttcataaataatcttacacttcaggcatatggggtacaagaaagcttacaattaaagtaattatatttgtttagaatcttctcaatatagtgagattgatctacataaattcccttatcatacctagtatctttattctaaggattacactcgcttcttcgaggtctttcatatcaaagttagaacacaatattgattttacaatgttcgtggcatgaatgttagagccaaaaatgagcaagtcatccacgtatagacatatgattgtgcatatgtcgttctcaaatttgtaatagatgaacttgtgactttcattcacttaaaagccatttgaaacgactaaagttttcaatttttcttgccacttcttagatgcctattttagaccatacaaaaatttatccaacttgaagaccatatgctcctggccagggatcacgaacccttcgggttgatccatgtagatttcctcttctaattcaccattgaagaatgcaatcttaacatccatttggtgcacaactaagttgtgtatggaaactagtgaaattaaaactctaatggatgttattctagtaactagtgataatccttaaagtcgtgcgagtacttcgtagagctggtaagacaagagagactcctagtgtactgttccagcctatagaagccaaccttatccttatggtccctcataggctgagacttaatattgtacaaatataagatctcctctagcattggcacaggattttcatgttgaccacaaaaaatgtactgccctggcagcaagcagtacgcttggggaataaactgaaaaggtgctataacggccatggtgaaaaagttttcaaagtagcacctcataggcaagtgtgcacccatctcgatgtgggcctagctccaaatgtcgaagcccccttttgc

SEQ ID NO: 234132 - DNA, 3586 bp, Cannabis indica
ttacaatagttgtaatatcttgattttctttcattgttataaaatctctaacattgtcgacaggggtagactcacataaaagcgaggagggttgactgccctctgaaaataaatatcgaaaaaaaaatgtatatgtattttagttagttacagaatatatttatagttaaaagtgatatttataagcatcatactagtttttgaataatagttaagctatcttacacacataaatataatagacgtcgtgagcagagccagtcttaaaatttagtgggtcatagaataaaatgagaataattacataaaacacaaatttttataaaaaatttacattttttatgttcaaggtttttttttcctttcatttttacagtattttataaacatacaagaaaataacattaaaaaaataaaaataataatatcaaaacaacataaaaataatatacaaataacaaaataacaattaaaatacatcaaatttatgtaaataaaatctaagaaatcgtaaaaatgttaaaaattactacacataatatatttttgtagtttttttgtttgcttatgtgttttttttttaaaaaaaaaatttaaattatcccaaaaactaatttgttgggcccgttactttagaaaaaaaaaaaaaagtaaaaaaaaaaatgtattttaaaaaaaggataatttttttagccccttggctaggtaggccgtaagcacaagcctagcctatttatgttcaagctccgacgtaatcatgagttcaaatcccatcaagaacatgtttatttttcaatatttaaagtttactttttgaacatttaccaataagatttgtatcaagtaccttgatcattgaagccaagatttttattgttactttttttttttttttaatttaatactataaaaaaatacaagtttgcattaatttttaaaatgtatatcatatagaaaaagaaagtacgctcctctcaacttaaatcttgggtcagttcctagacccacgattcctccaccgtgcatgtattgaattatttcgagccaaatctatacatttacttgtctgtttagttgattttgtgcccaaaaaaaaaagaattttcatttttctagatttttttgctttctggtgttttgaatgatatatcaaaattatcaaaaaaatgtaatctaaggttaatcagaaaaatcatatcgaaaatcatcaaaaaaaatacaatctttgatggtttttgatatatttttgatatgatttatcttattgtatttttcgatgatttttgataaaagaaaaaatgcagagtcaattatttttacataaaattaacaaaatagacaagtaaatgtatagatttggttcaaaataactcaatatatatgtacgatggaggggaatcgttggtcgataggggtagggatggggatgaattttgcatgagtagtcgacaaggatgggttcgtgtgagttgacagaaatgggttcgtggttgaggatggtggatgagggtggtttcaatggtggggagctcaaagtttgggtttggctgcgagaggttaaccgaaagactaaaagaggaagaaagagtaaaagagttagagagatagagaaccttgtgaaatgccaaaagtaaaattggaataaagataaagattaccataaatttctaatctttattataggggaattattttgttattacaactatttttaagtatagaaactcaaattttctttataaatatttgggtattaaaattttctatataaatatctacatattttagtaaaaaaaattgacaataaaactacttatcattgcgccttaagttcgtgactgataagtttaacatggcaacaatgtgattaatgcgcctagatcaattttttttttaatttattaaatatcaccataacatttattgttattagcagcggaataccctggcgctaaaatctgtcgttaataattattaataacggcgggcattagcaacattctcttctctatttcgaataaaagagcattataactcatcaaatgtaagtgctctaacaagaaatagagaggggatccccattttctaaaatacaaaaatggagagacttgaaaaacaatttgccttagtgattgagctccaagaacaagaaaaatatctatttatcgtttcgaccagttcattgattgaatgaaatgatattggctagggtcacatctctaaaattcgcaaagtaaaaagtaaaagattttttttttttaaaaaaaaaaaaaaatttagttgatcccatataatttgaactgtattttaatatctagtaatccatttgatcttgcaaatattatatttagttttttatttagtgatgtgaaaatattttaaattataataatgcagacaattattactttactaagagagtttcccaaaaggtagggggccgcgggaaacaataattatcttaaaaacgatgggacaaagttatcaaaatagatgatgccaccaaaaaaataaaggtaattaaaataactaatattatttatttatttatttttttaaaaaaaaagcaagctgagaagaacagtgcaaacactcacaagtgaactggtttttgttattatcatatgacccatgtaatcaatactgatactattattattgtgatgatgaagatatatgggtccaagacattttgtatattaattaatattgttcataatttaaactggtccgacctgaagttcatggtggagttcttctgttcagtctatttcatatatgaaataaaagaacacaaattaaattcagtagatagataagggtataaaaaataaatgcacaatattttcatttgtaacaacaattaaaatgattttatttaaaaaaataataataattatcatacacatacatatcggttcaatcattaataacgaattaacgacagttaacggactaggtagtgacagaacttatgagtattattcttaaaaaaaatattaaaaaaattaattaaatgtgttgcaataaataaaatttaattaggttgatatccttgatatctggcacaactatacatattatatttatatctataatatgatatgtatgaaactattaaaatcacaagaggtgaagtagttttgattgagtttggtttgtggtgtactagtcatcattcatcacttactgatttttgtttctattgttcattttattttactattatacactttttcccttttctcttattaaatacaccaaaaacaattatatgaaatggagacaaatctatacatgtaatgtcctttgattctcattatgtcctttatattaattttaataacaagttggagagaagcacactactaaagatctagaaaagcagggtattgggaagaagacaatataataagccatgtttttctggtcaaatttgttttattggtctaatatagtgatttcaaacgagaatcaaatctaattgggagtagtcaacagtatttattaatctaattcagcatttatttatcttgatctaattatagaaatgttaaaagggcattactggtgcctagtatttttc

SEQ ID NO: 234133 - DNA, 1073 bp, Cannabis indica
tactaaattatgtcccctgaattttcatccatgtaagacttttcaactaaaattataaaaaaattccttaaatctaacaatctcaattgttcatggggcatttttagagaccttaaaaattcaaagggcatgatttggtacatataaaaattcagggacaaaaattctaattagccttaaaaaattgtaaaaaaaaaaagatatttttgattttttttagttcatagaaaaattataattatgatttttttacacaacattatttattatttattgtaatttacaacattatgtaacttttcaataaatctaaaactatttatagcactgaaattaaagttcaaacaacttcttatatatatattaaaaaaaagcaaaaaactcacacctgtttgaactactaatattttatttcaacatcttaaataattggtatatatctatatataaaaactaaatttttaatttctctgatgaaaagatgttaactgtatatcatagaaatctcttaagtatactttaatgtaaggggtatgtgttaatatacatatatattaattgactagcaattttaaggatttcttacttgcatttggagcatattgacattgatatttgaagtaaattaatatagttagcctcaataggtatggctgtattacctaattaatggagcatatataacctccaactaacatttctaagagcaaactatcaattagaggaccatttcatgcctttattttgaggattatgacttatgactgtctgcaacaagggccatatctcccctctctctctctatatatattatttgtaaaactacggtcacacttactatgatttcaaatccttataatcacagtctaattgcggtgaggaatgaggattaataaatattcatagtcgccatcacaaatgtgaaaagtttataataattaaattatagaactgtgaaatcatttttaaaatctaattgctaaaattaaaagagaatatttcatatatatacaaaaacaacaaaaataatataaaaatacggttgtataaaattttacatatttttacaattt

SEQ ID NO: 234134 - DNA, 946 bp, Cannabis indica
accaaattccaaaacatcacaaatctaatcttaataatcaacatccttaattgttcaaatcgactcctcgaataaagtcccataaaattacatcaaaaagcaattgaaaacctacaatctcataagctacaacatcgtcatactcatattttacaatccccaatttttagggattctggtaaaggctcagtgatgaaatctacaataggcaataacgaaagatcaacagtgaagtccaaaaatggaatgagaaaacaaacaaccaaaattctagagatgtttacgattctaaattgattttagggagagaactaagctcggaagagtgatgtgctctaagacccatttggacgcaacaatggaagaaattgcagaaaatgaaaataaagccaacctgattttgaagaggcagaaggccaaggtcggaggagagcggagacggtggattgattatggtactgcttctgttgtgaggcttttaccaattcaaggaagacataaaaggacacctaaaataaattatacaaatatatttccttccaggactttttctgtcgccggatgaataatttttcagggataaaaagttagcaaaaaatacatttacattacttatatttatttttaatcattaaatcactattaaataattataattaatttataacaattataaaaaattaaaatctaataataattataaaattaaaaacaatttcttttattacactcggcaagtataaacttttttttttaacaatgaactttcatggaaaataatcagagtttagtacatcatagagaaatagaagaaaatcattcatccaaactaattcgccatccatcctgagtgcacgaactgctaactcatgtgcagccgtattggccgaacgacgaacatgaattagaaaatgcctcaagaaaattagatagtaaactagcaata

SEQ ID NO: 234135 - DNA, 2342 bp, Cannabis indica
gtaatgtccatacctggttctaaaggctgtttttggtatatcgccattcttgactctcagttgatggtattcggaccgaagatcgattttcgaaaatactttagtcccctgaagttggtcgaatagatcgtcaattctcggcaaaggatatttgttctttactataaccttattcaactcccgataatcaatgcacatcctcatggacccgtctttcttcttgacaaaaaaaactagtgcgccccaaggagaactcggtctgatgaaccccaacttaagcaattcctccaattgagttttgagctctttgagttctgtcggtgccatcctgtatggtgctcgagatactggtgttgtttcaggcattagatcgattacaaattctatatctctgtgtggaggtaaccctagcaattctgctggaaagacatcgagaaactcagccacaactctcgtctcttccggtttctttcctatttctttggcttcattgactatattcactagatatcccaaacatccgtgttgcaacatttccctagctttcatcgctgaaatgaatggagttctaggtttcttgcgtaagccttcgaattcaaacgaatcttcgccttctggtgcaaaaaccactttcttgcgtttgcagtcaatagatgctccgtatttggaaagaaaatccatccccagaattacatcaaaatcaaataattctaatacaattaggtctacaaacaattccctaccatctattcttaaaggcactacttcaacccaatatttagatattacaatttccccggaaggtaacatagtttcaaaccccacattaaataattctctaggtgcatcaacaacatttatagttttactagaaataaaagaatgtgatgcccagaatcaaataaaactttacatgaggtattggccatagggatctgacctgttacgacggaagggcttgagtcagcttcagcttgggtgagggcaaagactctggctggaacatacttgtcattctccttctgttcctccttatgtctaaattgagccaatgttggacagttgtacttcatgtgaccttctttcccacatttgtagcaagctccagctctacactcaccagaatgacgctttgtgcacttagggcaaggtgggatggttttgccaccatttccaccataacgattgtcattgttgggcttgggtcgtttatcatttctggcttggctaggctgctcatgtcccctcttcctgttgtcattagaggtcgctgccccagtccttttggcatcccttctagcggcattatccttccatattctctcttcgctcctctcagccataagagccatttctactacttcagcataggtgaaagcacctctagaaacaatctctacatctcgagctatcattggctttagacctctcacaaatcggtctgctcgtatcttatcagtaggtacgagatccttggcaaacttcgccaatcgatcaaacttctgtgcgtaatctgtcaccgagagattaccttgagtcaacttggtaaattcatctatttttgctgctagcactgccaagttatagtatttatcattaaacacttgtttgaatccatcccactccatagtgttgacgtcccgtgattgttccaccacctcccacgaaattcgagcatcttttctaagcataaaagatgcacacaccactcgttcattgccttgaacccccatcatgttcaagatcctctccatcccgctgatccactcctctgcctcaaccgaatcggtgctgccttcgaaaactggtggatgttgctttcggaacctttcaaacaagggctccatatgattctccgcaattggtagccttacaatggcaggtggctacctatcaataggtgcttctggccttgcaggtggcccagtatgctgcctaaattgattgatctctgcattttgcctttgaatgatctcttccattctcgcaaaacgttcctcccatccttgtggtggttaaggctatgctgcatttactgcagctcttcccctacctcgaccatgacctactctgattgatcttcgaggaggcattctgaacttcctgaaccatacacataaataacttataatgaaaaggagttattgcggtaagagatcaatacaagagaactctaaatacgtaaatgtgcattagcaacaagcaaaattataagtaaactttatccgcttatagtacggttggtcgagctcgtccatggcgatgaacttcacatgttagggcttaccacagattctttaggaccgttttgctctgataccatattataacgccccgatttc

SEQ ID NO: 234136 - DNA, 964 bp, Cannabis indica
atttagagatctaaggaggaagacttagttgatagtattgcactatcaaatttgtggtaattagtatggattgatcaggtacgcatatacttaattattatatattgttattgtcttctatattatatacacatagatattgagtttattgttaatttatctaacattcatagcccaaggttttgttaaatgtacagaatctataggaagtgagattgtctgtacatggttgtggtgcaatctgtgatagtgtttggttcttgttaaatgtagtcccaacaacttttctactttattcttgaaaatatatcaataaaacctaacatcatctttttatctcaattttttacattacatcatacacttctttattattattattattattattaatattatttttacattatttaaatatatatcttatttataaaaataaatataataattatttatcgagatttttaaaaatcgaattaataaaaaattaagctaaaaaagatgattttgaaataaataaggaagatttttatgtggttggggcattaacgagatttagtccacgagttaatattattaaatttggctatagagtattttaaaagtgtgtttttgccaaatttttgtagaatttttagccaaagtttataatccttattgtaaaggggtaaaaccttatttatgggctggaatcgagtttttgggtaaatctagacccattagggtttgtatgaggaaataagctcatcgttggggtaaaatacattataatattaattttgggccgggtaggtgaggcccaatatgcgatgtaaccattgttcgtacgaaatattaggggtgttcaacaaaatttacaaattgtccaacccgaataaacagcccaaaccgaatcgaatagattgacaaaaaatataacctgaaataatacaataaaaattcaaacttcccaatgaatatattg

SEQ ID NO: 234137 - DNA, 1670 bp, Cannabis indica
tcctcttggacatgctccacctcctgtggacggacacgtagcaataatttctggtggaccccatctcgttgaaagtactcaaaatgcacaaaagagatatttgagggagttaaaagaaggggaagtgtgcacgctagtgtaatctatcgctcaacaccctagaatgatgaatttgccaatcacctttaccaaggatgaggcaaaaaaagttcacatccccaataatgatcctttagtgattgatgcgtagatcgccaacaaacgagttttcaggtttcttgtggacaatggaagctcagttaacatcctattcaaattttcattccaggcaatcaggctaatagaagcggacttaaccccttgcccattcaattgcaaggcttcaacggtgatgccctaatgccaatgggtaaagttcagttgtctatcactctcaaaggggagaatattgcaagtgcttttaagcactcaacctttgatgtggtagactacccaactacgtataatgcaatactagggcgaccgaccctagtggatttcagggcgataaccatcatcagggatttgcgcatgaagttcccatgtgacaatggatgcactagcatgatcaaagtcgattagaaaagcgcaagaaattgttacaatgtctcgatgcagaatatgttcattgtctgggaagagatgcttatttccctcagagcaaaataattgatggatactaaaattggccgggaagattttcaagataaattggatcctagggttgggacagataggagtctagaattaatggaggaggcagagcagataagcattagttatgaagatcccacaagaactattagagttggcagaaacctacccctgtccataagagaggacatcataaacacggtcaaaaagaatcaagatatgttggcatggagccattccaacatgacagggatttatggcaacaccatctgccacgctttgaacatccgagaagatgcaacccccatcttcaagaaaaagaggcctttagacccagttagggctaaaacagtaaagacagaagtggacaggttgactaaaatgatttcctgcgagaagaattttacccagtatggctcgcaaaccctgttctgggttcgaaacccaatggctcattgagaatgtgcatcaactttattgacttgaacaaggccttcccaatagattattttccgctgccaccgatagatcaaatggtagatgccacgtctgggtacaagtttctcagcttcatggatgcatactttgggtataatcaaattaaaatgcacatcacggatgtagatcaactagcttccaaaccgataaaggtgtttactgctacaaggtgatgccattcacgcttaaaaatgctggagctatgtatcggtagatggtaaattaagagaaattagtgagaattccataagaaattttgacatagaattgccgtgttgggtaccaatttgaataaatggaactattatatgaacatataacagtaaagttaggaataatagaaacaaacagagaatttgtcaaaatattacccttcgtctattagagttagtcccacattgtgtggaaataaattataagataaataggttactccttccattatcaattagttttgacatggagtcctatgtacgtta

SEQ ID NO: 234138 - DNA, 1001 bp, Cannabis indica
agctccttcacctcaactgtcaaattggccgtcgattgcaagtctgcctgatgtagctcctccattaacttcagcctggaagtcagctcctctaaagcctctttggcttctctcagctcacgcttgtccttggctacagcctcgccctgaaccttcagctcctcccggtgcctctcctccacttgtgcgtccttctattgggctcctctcggaacgccttccactcggccgccaggtctctcaaaatcttaatggccccgtccatgccccggaattcggacatgacgtacccgtgatctatcagggtctttgagaggcaaccggtctctgcagcgatctggaaaagaaaacaagttaagtatgagatgaaatgccataggataaagcacaagaaaaaagagagaaatgaaaactcaatgcagtcatggcagcgctgatgtcctgaacttgataaatcgtgttcgtagaggggcagattgcgtatcttttggctgggagttgggtcagatgggaaacaaattggcttgtcagtttggaggaaaaaggagcaagagcagggccaacgaagcgattgaaccagtccgtcagggggtccatgttcaggtcccaggcatttttgaaggtctcctcacgtaaagaatattgttgagcctccctcaagaccttctttaaggcttccacctcagcattccccctgctgtactcatccatggcataattatgtttggcaatgcggagttgctgcctctcctcatcggcaggaaccacagtaaaaatgataccggggggtacgacatactcctctgcttcaggaggaatccttaaatctgagctgacggccggggtttcctttctactgggcttcttagaagactcaacctcaaccattttaccattgcgcttatagtcgaggggagccacaatatcgccttcctcctcctccccatcctcgtcgatcaagacgattgtgcgtaagggggcactggaagatgacttcccca

SEQ ID NO: 234139 - DNA, 851 bp, Cannabis indica
ttcttatatacaactgacatttgcaaaaacacggtttttcagaaagtttgttcttttgaagagaaaccattgtgttccctcttcttgggtagcatgtagaaaccatcagtcgatttccttttcctcggaccatgctcagcctcatagcacctaatctcttcaatgtcaagtatggggttgaacagagtaggttcacggtgatattcatttatcaattcttcttgcccccagcaattgatcaaaggctaattcccaacactcttttgatggccattcaataaggtgggcctgggatccaagaaggctttgatgaccagggctcaatttatttgatttaattctcacacctgggcctctcaaactagggctagatgtctcgtgggtcttcacccccttttacccatgtggagtggaattgtctacataagccatctgtattccaacggctatattagttggctcatctatttttgttccatttctagtgtcgtccaccaagagctcgttgtctttagtcacaaaagggaaatttgagatagcaagcttgctcccagccttcgcatgcatgggcttcgtagcactactgcttggtacatcttctttctgctgcctagttcccatcatcttcaaagtaggaaactctgaaattaccttttcaactatcagatttgcagtgttctcaaatggagcaacttcaccaatccctggcaaatggtgcgctggataccggttcaacaccacctcgctagtttcctccggtttccaccaccgtctcaacttttcgtctctttcctgggtattatgtctgaagttctctcaaatttgcggcttcaatctacaagtttattctc

SEQ ID NO: 234140 - DNA, 1162 bp, Cannabis indica
actgaagtcacaaaattataacaaactcttaactaacaactttctctacctatagacacttaatactcccctaaagatggagcataactattatgagtctcatcttgtctttgaggtattaaaattgagttagaaaaagatcctaagtaaagatgtcaatcacttattctcgtatagctacatgaatggttttaatcaacctagcttgaatcttttttattacaatatgataatcaatgtatgattgatcctgtaatgaccgcttagctttattttgagaattagtagataattaagacttattatcaaaaataaactttaagttattatttttgcaactatgatgatatatgtgaattttaagtgtattaattatcattctgctaaaactttacgacacattcaagagaaaaaactacttttgctctaaaattacttagcaagaaaaatggtaaaagtagtttatgaggatttttcaccatatttataagcaaagcagtgaaaggaatgtaatcaattaaaatctcaaacgcctcgatttttctccaaaagtaaatattgggaaattaaaagcaattaagtacctggagaagagtaaccgtcaaaagcatgcgagtgaatggcgcgtctcaaggtacaatttaatcagtgcattaattagccgaaaactgaagggactcctggtcagagtcacatcggatcacgaacagacgcatccagcacgtgtcacccatctagatgcaaggtcggctcgagtgaagtctacgcgtgacttcggaagtcccgtgcggacttggggggcaaatgttatcccatttttcgcactatgacgtggcagcacatgctggtgacacgtggacctaattccctacatctggcttaagagatgttccgaacagagcacagcatacacctgcacggataatgtctacctagccgagcagtggacaatctgagcaacgcattaacacctagcaattccagaacttgcatcgtgaagcacaaaagcaatccctataagtcttggatcgtatcacagagatatagcaaactgtccaaattccacaatctgtgtattctaaatatgtaatagatgttcttaccaattgtagacattgtaagcaaaagagaaacttaccctcaaacatttagccctataaat

SEQ ID NO: 234141 - DNA, 930 bp, Cannabis indica
tttgttgtttattgtgatgcatctagacagggtctggggtgtgttctgatgcaagctgacagagtcatagcctatgcttcccatcaattgaaggaatatgagaagcgttattcgacacatgacttataacttactgttgttgtgtttgccctaaagatatggcaacattatctctacaaagagaagtatgagatttatacagaccatacttctttactcggaaagatttaaatatgagatagagacggtggttagagctattgaaagattatgattgtgagattttatatcatctagggaaagccaatgtagtggttgacgttttgagcagaaaaggttatgggtaagtttttagtaccataatgatatcacctaagttggcttcagacatggttaaagttagacttgagtttgtggttggaaaactacataatctgacacttcagtcatatttgttggaaagaattgaaagacataatttgaagactcagagctagttaagattcaagaagaggtattggcgagtcagcctaaggacttctcaatctcgaataatggaatgttactttacaaggctcaggtttgtgttcctagtactggtgaactcagtaaaggaatacttgatgaggctcatattacaccttattcactgcacacgggtaccaccaaaatgtacaaggacttgaaaccctgctattggttgtgtgaaatgaagaaagacatagtagaatacatgtcgaggtgcttaacttgtcaacagatcaagacagaacatcaaaaacggatagggttattgcaaccattaacgcttcctgagtggaaatgggaagatgttacaatagactttgttgttggcttacctaggaccacgggaatatatgattccaaatatgggtcatagtggattgtttcacaaagtcaacacacttt

SEQ ID NO: 234142 - DNA, 1347 bp, Cannabis indica
tatgtatcactttatattaaattagataaaaatattacctagtgagtcgccgagtttgaagaagtgggaagaagaccagtttgagtagtaataaggggaaggagggatggtccagagggaatctccgacccagtattggagtcccgatggcggtgggagtggtggcggtggtggagttaagcaacaacccaacgatggaactatcatgatgatcatcaccatgactgttatcaaaacgacgtggttttgatgatgatgcactgccatgtgttcaaagtttgaagtgatctgaattattggctttttttgagagatcgatggaggcttaatttctgtttttgttatgttaaagaagaaattccatgcaatggaagatgatattatatagttggtcaaataatgtactacggttttacgacattaaggaacaaaattaatgcagatatatgttacttagatattttggtcaatgtatgtttacgttgtttattagttttaaggatccgtaaccattacatttaattttccggtaagagtaattgcatccttttgcaaatttgaattatcattttttttagaaaatttatcaaaagttaataaaatgtgacaaaataacctaaataaatacgattgttgtatctttataatactaacatcatcgatcatccctaatgcaagaggtaaatttattctaaatttaacaacagcaaatgagtttatattatatttagtccactatttataattatgtatacaaaataaatacaaaaaatttaaaaacttttacatgaaaatacaaaataacattttatttacaaaaatacttcataaagcgtggacagcatttttacttttaatctgcttttaattaccaaagtacatcttactctatcacttacacacactatcactcacacacgctatatatgcatgtcacctcacttacataggttttttcttttttcctttttcttttttttttaatcatttttatttttattttgagtttttaagttagtgttctgtttctctatccatttctttttcagtttttcatttcaaaaaatcacattcttccccacgattaacttacgatcaaaacccattcagctatatccatctctaacttcttcatctaactgccaccattttcattcagcttttttcatatcttttattccgtgtatataatagctattaactgttcttctgcttctccatctctattgccaaaaaaagcttcaaaatggatcataaatcaattgctaacaatgctaaagggaaacatcgagtcattgacgatgatgattccgatttcgctccccccgtggctaaaggtggtcgtcg

SEQ ID NO: 234143 - DNA, 951 bp, Cannabis indica
aaggtggaacttaattgcaaattttgaaaaccttagaggcagaactgtacttggagctaaacatgaaagttttagatgttgttcttagcttttgataacatcttgaatcgtgcaatttagagtaatatcgagagagttatagccaaaatactatcagtcatcgtaggaagaaatttctgaaaaataaaaataaaaagatagcgaaaaaaaaaagatagcttttcaagtagagttgcaatttttttattctgttttttaaaaatgagttatcttttcttttagtgagatatttcctaatactatggatagaattctaaatatatggggattcatctatctttaaagcactataaatagaatcctaattctaaggggattcatctatctttttaagcactataaataggacctcttaggctacgaatttatgaattctaaagtgacaaattagagagagaaagtcagagagagagcaaggaagaaacagagatcgatttcgaagtgttcttcattctagttattttcttctccttctactcttcttaaatattataattttcattcttcagagtagttttcttttagttaagggttattttaaaacccgaaacacgaattcttaatttcattattgaatgttaatatctaatttccaccatatcaaattgcttctatttttttatgtcaatgctatgattattattttaatcatggttagatggccactaaattagtttttattttaacttaccgtcatcttaggattactattaacctaatagtttaggattctaagtgtttgtggtaaattataatttttatttgtgatgaagaatagaacctaggttaaatggattatatgttcattgatttgttgcctagattagtctatctccataaaactcaatattttatctaaattaaatatattgcatgctttgtggatttact

SEQ ID NO: 234144 - DNA, 1165 bp, Cannabis indica
cctgctttgggttatctgcaggaatactgggcctccgttggatgtgccattatgcaatgtagcaacactgaggtaaatatcattcttgtccacattcttggccatctttttttatttacaccctttttaaactgttgactttttgctcagtgttacaacttattacgtgtgttgtgttattgttattttcacttgttaatgaatctttatcattcatgacactgttgatgcttttgtctatgcagaggacctgcattgtgcttatttattgtttttactgttcgtttcttaccaagctctgcttctattgatcaggttggtgctgggactatgaatcctttgactttcttaagagttcttggtccagaaccgtggaatgttgcgtaagtgtgcgtaagtttataataactagtgcattgataatacagttactaagctgtttagtgataaacctaaaatgaagtgatatgcaaccactgtttctaaatttatgtgctaacacttcctgattgttctaagcaaaacagagttccaagtcatgtgctgataacgaaaaaaatagaatgataactattgttgttgttattattatttatttggaaatttcccttgttcttctgtgtaatatgacatgagcagagcaaagtttaaagctgttgtttcttacaaaaagaccatacatttataaacatattggaaccaatacactcaaatcttaataaacatgtttctcttatgaaaaattattacatgtgcagtttagtgtcaaataatgcatgtactcaaattatttctattgtggagatgcatgtactcaaatatgattgccttgcatatgtacagaaatatcaaaaaaaaaaaactttcgggcgctgtaaattatttcaaaagaatgtatcttagcattttggttaatatgtccttcttgggttgtttttgtaatcttctgactattaaaacaaaagttgacttgtataagcacctcctataaatgacatgaaggtgtttctttcaagtcttggttattttgttgctttgctctaaaatcttcaaacataatttcttgagctaattttagtttgtatttgtcaactttctatggttatggggtttttgttcttgtttcacttttttccattttgatttttgaacttactatggtatt

SEQ ID NO: 234145 - DNA, 1130 bp, Cannabis indica
aatttatacattaaacctataatcaagaaataaatcaagtgaaccattcaacataaaatgatttttgatcttttattaattagtaaatctaattacattaaaatggttttatttggggcacattaaaatggttttatttggggcacaaaacccaacaatgctttaaagattctccttgttgttgtttgattttgataagctcttccacctgtgatggtatcaacatcgaggatgtgaaatgtgtgtagaattcacaggagaattcaatccaagaattgaaccttcctagagccagcttgaggtaccattgctgagctatttatgaaagggtttctgagaagattagatagtacaaattagatcatgttgcatcacaaagtacttaatttgtgctgtggctcttctcgtctggtatacatcttccataccagcatcttaaacatgggtaagggtaagacattgatatatggcaaggacgctgatcctctttacctatctagttcaaggtctgaaggtcttgcaccagctaggcccttgatcatgtcccttatttggtttaactattcttgcatagaaggatccgttgctgcagggacttggctgattagcccttcttgaatgggctgcaaacctgaatgggccaaggtctggtctgccactcctagaaaggtatactggccttggcaagccatccaaatgctggctagggtctgaccgcccattctcccctatttgggtggtgcagcttttgtgttgacaacgcgtaaatcataccaattgctggagttgggtggatctagatatttgaagtgactagactcacttctcacgtttttatctcaagtgtttccacccatttcagaacttataaagttatagattaaccttatgtttactcgctcttggaggccccaagacgagagttcaccctgttggccagccaagggtttaccactaagaggctagcctaccagaggctgaccaattgggggtgttgttgagcttgagattctttgatggcccctagagcgcttgttgctgggatttcactattctcaccaccagatctttgtggcaagtctagtcctccttcctcaatctgtagaatagtcacccatggagaggctctc

SEQ ID NO: 234146 - DNA, 721 bp, Cannabis indica
tttttttttctttagtttcctgaaagtacgagatggttttttggggttaaaacagaaagaatttattcgattttttgggttgtttttgggtgttaacagaaagaacttttttcttatttgagaagaagattattttgtggatgattaatgtagaagcaatgtaggagttatagttgctccttttagttgaaatttatagtggcataatcattatagataggtgaaactatatctatggaagctttttcatttgattgcttggagatttatatcagtcataatatcgatttagatcgattcggcttcataaattttcttaagtttgttgtcaagagatggtttttttggggggtgttaacagaaagaacttattagattttctatgttttcagaactttgcattgtgaatgatgttcagtgggtcaaggagtgccaattctaacggtgtattcaagtggaagtggcgagatcaaggcactactacaaactgtacttttggtgtcggttttaaactgacaattttacttttagtgtctgttcatagaaccgacacctattctacgtgacaaaaagtcaaatttttggtgtcgattctaaatcgacactattgagttttggtgtcgttttaaaaccgacacttaatgtatacatatatgttttttcttttagtgttcaatttaaaaccgacacttcaagggactaaaaaattaaaaaaaaatac

SEQ ID NO: 234147 - DNA, 801 bp, Cannabis indica
ctcattaatgccccaaccatgtaaaaatctcatgcgttaaacttcctacagctttcttatatattattaaatcggttgccgaaaacatcggtcaacactaaggataacaactttgaaatataaaagatatgattgtccaaatcagcattaaccatcgacgaattaagcgagatgccattgtccaaatcaacatttaccatcattaaggataagaattataaacagttatgtagttatcagttgttatccaacacgtgaattaaatgaaacatgatcaattccccacgtttcatgaagcgcatataatttgaatttaaatataaataactatcaacctatattcctatcaaaaaaggagaaaacccccaaaaaaaaaaaagggaggaagatcttttaagagaacaatagaaatacaatcaattatatattgcattgaagactcagaaaatatctagaataagttagactcgtggagtgtgcagatttaattacaaaaccacgtaaaaatatctagtgttcttattatatttttatttatttcttattattactgtgataaatttattacaaaaagggcttattattggttaaccaaaatttgcgttaacagtttggtgctatcattgagagccgacgtgataaaacttagaaaaatccctccttacaaacaaaatcttttcatggctgatcataatcaaaacgatggaagtcaccctgaggaaaccacacatcgtcttgggaaagaacaaatgggttctcaaagaccctatacttcttgaacaacacgttcaagaagatact

SEQ ID NO: 234148 - DNA, 1259 bp, Cannabis indica
atatcaacttgaatagcatagaatagcatagaataagtaaggatcttctaattgtttcccgtgaagatactcaagaatacaacttgtatcccctaacttcatttgaattgtttgtttggttcataaataattcttacaatcaacgtgagtaattctaagactttcatgtcctccagctctctttgtcattagttcccaactttctttaggagaaattcctgatttgtcagttaagtctatttctgtagctagagcgggtgttaatcttctctgtcatctgtgtaagtgactttttgtaggagtcgatgtcacatgagagtgctcaggaataaactcaacaacatgatatttaccagtttgacgacaatcaactttcattcttgctacatccaaatcttgtcgtagcacgatgacatctcacaataacatctcgcttatcattttcacgatacccttcacaagtgcagccaaaagttctatttatcatcatgccatacttatctttataccctttactttttctgatgccaaaaccagctttataagcataaacattgtagaaattataagcctcgtcttccgtttcaaactccatgccaatttttggaattgatttctcacatattatagaatgaatcagttctatgattttcttgttatcatctaccaatttatctccattggtttcttcttcttctttttcaaattctaatttgcgacgagattgaaattatgtatccgtaattttattatgtcatccataattttaaatctaatgttctttatcaccaaataaatatataatttaaataaatatttttttaacaaattacaatcttcaatactgaatataaattgaaaattaaataaatttattaaatatacattttatagtaattttttcataactatttattattttagttataaaatatttttttaaaggaattaaaaagttttgctgagctttaagagcaattcaaagcttatttatttttcttttaattgagaaaacctactaattagttgtactataacctatactatccactcacaacctataaaccacaaagagatatttttttttttaaaataataataataataataataataataaagtcacaaaaacaaataatgaaaaggaattgtaaaactcaaatcaaaagaaaaaatttaatggtagagctaatctatttaaaaaaaaaattattatcgtaatatagttaagataactaacaaaataataatagatatat

SEQ ID NO: 234149 - DNA, 2246 bp, Cannabis indica
aggatgctagaagagatctctttggacactaaatttagaatccaggagatcacgatgttgttgtttctggtccaggcattatatagagtataatcggaaggagaaggtttttgaatggatccatcaagaaatcccaatttattcttaacagagatagagagctgcatagctctactccaagaaacataattgtcttgaccagtaagaagttgagagacaagaatgttacctggattatctccgtgatgaatatagtatgggtttgttggatcttcaaggggattctttgagttgatgaactgtaattcttgattctcatttccaattgaagctgaaggacttcttgcagttctgggtgtttgatcttcaccctccatttgagtttcagcttggttttcgctcgacataattgaggaacagaagaacagagaaagaaacgcagcagaatagggtatcggagaagcaggtgaaacgcgataccgttgccggagaaggagattaggatcgatcagggaaaggaaagctttcccgctctgataccataatgcggaataaaagaaaatgtttgattgtatcgatctatgttaattaattacagaatgacaggaggtatatatatatacaagagaacagatgaaacacacaaccgcctaaactaacattaaccaacttaacaacctaactaactactgacacaaataaccgaattgagataaacctgacttaacactaaatagaatcagtcaaggtaatacaatcagagataagtagtagaaagacataattggaaacttaatagtactaagtatttttctttatgtaattacacttaattttgttttttttattatttaataatagaaaatgtttatacatgttgttgtatggtatgtgtatgatcatagatatatagtctacaacttttattaatatattaattaaatggattttttcaattttacacttcaaaatagtttttgtatttttacgaaattcttcatagaagctcctattgcaactagcgctgcaacttaaattgcaacaaaaaatcgtatagaaactattattgcaactagcgctgtaaccactttaaaaatccaaaccgtaaatttgaaaaaaaaattaaaaaaatagtatatcaaataattttccttaattaaaagcttaaggtaggtaaggtttgaagtgtccacccaacatcatatcaatgtggtataagcaattctcaaattttcatattatctattaaattaaaattagatattaaaatatatgaataccaatatatcaccttttatagtattaatttggctttaaggcgacttagcattttgcttatgaataataagaagggatgtaaagatatgtatgtacaatgtacttgttaattataatatcattgaaagaaaatgatgacaacaagtacatgtaaacaatattcacgcttccgtgttagaaattagacgaaaaggatggttatatacaaatttatattgataattttatataatttaactataaatacatatatacttttggcttttggggtttctagattggactttccatgcaaattcaaccaataagtattcgagaaagatagaaagttatggttttatggcaagactccattgttggcattaagggttgttccaacatatatatagttctttcttttacaaggggtcctcccattcacatggtctcctttacaagtcctattctaagacaaagacaactagacaccaatgccacgccaatcttcttatctcttaattcatccatatatctctatattattaaaaattaatctttctctataaacttaattcacacttatctctatcacccaaaaaaaagcaatatctatcacccaaaaagtaatatagaaaattatatatagatcctttctcttgatagttccactttagtttatctctccttaattatattctctcatcttttattattttgtgctttttcttcttccaaaatctataacgtttaataaactcattcacaaacaagcacatcatgtatatatgatggccaatatatataaatgaaaaaagtttcgatggttaagttaaatatgtaattatatttttaatcatttaattattattgaatagttgtgattaaattagaaattaaataaaaaataaattgtaacatatagtaacctaatatgttatttccttaaaaaattttaattaagtttaagttattttaaaattaaattaatt

SEQ ID NO: 234150 - DNA, 1852 bp, Cannabis indica
gtctcaaacttggacacactgtccaaagctgtttctataggtttgacaaaaattttccaggtccttcacacaatagcccgaatgctactcctaattctgcaacaccacaagctaatctactcacttcttcaaatgactgggacatggtttggtatccagactcaggagccaccactcactgcacaccagatcccacaaatcttgcacaaagttcagactacaatggacaagagcaactgtttgtaggtgatggatcaggtttgtccattaaacacataggtcaatcctttttatcatcaaaattgtctcctgaacctcttgtgctcaataacttgttgcatgtccctgctataactaaaaacttgttaagtgtatccaaatttgctagagataacaaagtgttctttgagtttcatcctgatacttgttgtgtaaaggatcagggtaccaagcaaattctgttgcaagggacacacaggaatggcctatatacttttgaggatctcaacattatccctacactgcctattcgacctggaaacaccacaactcaggacaccttctctcactctgttcatacaacttctgtagaacctttagaatcttgtacttcctgtaatcacagtagtaaattttctgcctttgacatttggcacaataggttgggacatccctccaagtccattgtgcattctgtactcaaatcatgtaatctttcaattgataataaagattctcgagttgtctgtcctgcttgttgtctaggcaagatccacaaattgccatttcctaaatttagcacaacagtatatgatgctccccttcaacttgtcgtttctgacttgtggggaccctcccatactgtttctaacagtggctacaggtattatatccacttcatggatgtttattccagatttgtgtggatttatatgctcaaggataagtctgagacacttaaagtgtttcaaatgtttaaggctgaggcagaattacagttaggcacacaaattaaaatggttcagacagactggggtggggagtttagaacttttcctaagtttttacaacaatatgggatcctccacagacacccttgcccaaccacacatgaacaaaatgggttagctgagagaaagcataggcacatagttgaaaatggtttaacattgcttgcccaagcttctatgcctttaaaattttgggatgaggcatttaggacagctgtgtttattcacaatcgactccctacacctgttcttcacaacaaaactcctttagagacactgtttcacaaagagccagattatacattgttcaaaacctttggatgtcagtgttttccaaacattagaccctataacaaacacaaaatgcagtttaggtctgaaccatgtacattcctaggctatagtctcaatcataaaggctataagtgtcttgcatctagtggtaggatgtatatctcaagagatgtcatctttgatgaacatcaatttcccttttccaaaaccagtcacccaacagaacctattaatcctcatgattggcatatttctgttaaaattccaacacctaccagctgttctacttggcctgatgcttcacacaatgtcagtgagtctgtctctcactctatcccatcttccagtgcctcactcaactcaccaactccacttcctatcagtccatctgcctcctcttctcagccttctacacctcttataccacctggttttgaacatctaattccctctgcaatacctcgatcctcagctgtgtcatcctttcctataacaagtgtctctgaccctgctatctcctcctcttccacaacaccacaccatgagtc

SEQ ID NO: 234151 - DNA, 1992 bp, Cannabis indica
taaactaattttttaaaaaaataataaaaatgtaatgatctggattaattaaaaattaccacatgtcaatttatttaacacttaaccgtcaaatacttacaaaagggatttaaatttaagtatttatgtcgtaaactactattttttataaaaattattaaattaaaataatgtaatacttaattttaaatttctttaaaatatgttttacttagaaagaaaaatgtaaataagaatgacagatctagaagtatgaaaatatatacatagaaatagtaatatgaataagataggtatgaaattacaaaatttaatataaaaccatcattttactctataataaaatgataatttttttaaagaactaaaataatcattacactaaaatagtaattatatacaattaatttgaatgacatgcattttaatatttattaaaatgtgactaaataaaaaaattaaaaattaatttattttctatttcatcacaacctaaagtagtgttcgaacaaatttaaattagcttatttttataaaaataaagtaaaggctcatgagctatgctgaaagaaatatgtaggataatatctttttagatctcgtgttttacaaaagttatcgattgaattttttgttttgttaaataataaattttactttatattttttaaaaaataatacaaaatagtaccttgagttgattttttgtcaaaataaaacttactcataacccaatttagatatattatgaaaatattgagaatattcttgcatattttttgtgttagaaattgtctccaagttaattatgttaaaatatatatacagtgtaaaaaaaatttgaatttagggtacattttgtgccattttaaaaaatacaaaatttaatttatcatttaataaaatagaaagtttattgtgaaacttttgaaaataatattaacctcaatatactatatgtacatttaaatgtagttatggttccaaaagtttagagagaaagggggaagtagttggattgtttaagggattagagttgtactaatacatgtgggagaagaatggctttgtgagattatattataatttagtaatttataatatgtacttattataatattaataatataaagttataaatataataattataataaacttaatttaatgagagaagaaaaagggttattgtagtctggcaaaaattttgcttggcattggccaactgtgtccgcacaaatcaacaagaaaataataaaaaatgattataataaataatgcactaaatgacgtgttagtttagttgagttgagagtagtaaaaccaatgaaaagagtaagggtcttaaatttttggggagtggttaggccaaaagagatgataattgaatataattaaagctccacttgcatataattacaagcagtaagaatataattgaaggtgaaagtgtaacacaaaaaaaatcataaataaaaaaaattaaaataaataaaaataaaaaatgtattctctttttattaagaaaagcctcatcatcatttccatgtattggtatgctccttcaatcattaactagaattgcagccatgtgatgtgcatgaagggagttgaaactttggaacataacaaccttatcctactataaaaatttattttaaatttttaatccaaactttatctaaagcttagttttggtaaaaaaagattcatacctaaaaaaaattgtctaaaaatttaagtagggtatgtattttatttttttgataatatattaaaatgaatattgttattaagaattggttttgattagtattattataaagtgatattttgtaaataattaataatttcacaatagttattaaattttataggaattatcctatatactgtttttttatttacggttttggatttctaaaatggttagcagcgctagttgcaatagtagtttctatgcagaattctgtaaaaaatgcaaaaaaaaaa

SEQ ID NO: 234152 - DNA, 1559 bp, Cannabis indica
aaccccgtgtctgataaatctaggaaactttattcacatagtcatgtttactttccaatgtgttgacaacacaataaacaggatcaagtatgtgaaaagggtttcagatgaatttatacattatgtaaatataatcatgaaataaatcatgtgaaccatgcaacattaaatgttatttctgatctatattaataagtaaatctgattatattgaaatgagttttatttagggcataaaacccaacagaagttgtacaccaaagtcctaccaggccaatgtctggctgaccatgcatctgcaagatacaggttagttgaccttgtactgtccaaaagctggccagcctatgttggccataggattggccgggggtgggcggtcagccttcttgaggtggctggtctgtcatccgtcatcccatttaagtgtcaggacttctcgttagttgaagtgttgagtagatgacttagccttcttgtcagtgagttgtactgccacgtggtgctgatgtcaaccatgtagacatgccacatcaggtgggcataaattgggataatattttcccccgaagtccctgtgcggatgtctgtgaggataggtactttctagcttagttgggactaatagccttaactgagtaaatattgctgcattttttagtctttaaaataactgctcttgactatctaatctcatttgttgtagtaagttaactgcattgtacttctacatactttttagttgaacactgcgtgacaagtgaagaagtggtcacatagaagctatataagccttatggagggaaactcctttcacttttcaattttcattctctcactagaaaaagtaattttgaaaagttcctccttctctttagaggttgaagcccacattgctccatctctcaagatttttgcgccatttcgaagatccaagcttcccattctcttgtcaaaggtttctcatagtgggtaagctttctattcttgctatttactttatttagttgactttgtcatgattacgtgaatcttttcttcgctttgaatattttttgattctcgtgttagattgtaatttttgatattttgatctgcatggtagtcttaggatgtataatgtgtgctatctagacaaaaaatatctggttttgacttcacaaagaacacgaagaacgtgttcgagttcttgaaaaacacatgtttggatctttcatataccctagttaggaatggaggtcttgtcaagacctggctggccatggatgttcaccatgggatctgaccggccatagggggtaccctaagagatggctggcctatgcttggaaataagattcctggccagtcctaggctgggtcatgggacctgaccagccctctaaggcttataaaccctggccagccaaggccatggttccaagagggcgaccagtctttcgtcctcttttaacctcaactagagtcttatgatagccttttaggcatatacaactataatcttatgcgtggttcccttgggaaatctttataagacttggtagtgagtccattatagt

SEQ ID NO: 234153 - DNA, 1144 bp, Cannabis indica
tttacaaaagttattaattagactttttgttttgttaaatgataaaatagactttatattttctaaaattgtacaaataagacactgaattgattttttgtcaaaataaaacctaataataatatgatttagagatgttttgacaaaactggttatattttctgtatctgttcatgttaaaaaatgtctttaagttagttaatattcgcgtttaaaaatatatgtcggaatattttaacattatctctataaattttgttgtggctctaaaatacttataacattatctctataaatttttaaataatttataatgttaaaaatatatttaaaatttttttaatattcgtggaaaactaaaatatcagaaattttgtttttgatattataaactatttaaattttttaaaaaattataagaatgataggctgagagattctaatagaaaattacaattaacaatgatactcttattcctcatgtatatagcaagaatttgaaaaagaaagtacttttaatttttgggtaacttgatttatgatcaaagaagaagatgattgatgctcccaatgtcataaaccacgtgatctgtttttttgcttcttcttcttcttaatggtctttgcttatatatactttactccatttatagtcttttccctatattttattcttaaagtggaaattcaagattcaaataataagactattaagattaacaatataatcatggtccgccttaagaatataaccaactaagctataattatttattgtttacaaaagacttaattttactttaataaaaacttaatgatttttattttttttattttaggtccccgaaaaaagtaggccctaaacacgagcctaatctgcctatacctaagaccgaccctgactataagatccccccttccaactcacactaacactataatttttttacaaaactaagcattatcttatctttttttgataactttttctcattaacaaataaaattgtagtcttaatactttagctaattagcaattctccccccctgaattttgacatgtactaaatcatgcccctgaatttttttggccgttaaaaatttcccctggactattaagattgttaaatttaaggacttttat

SEQ ID NO: 234154 - DNA, 782 bp, Cannabis indica
ctttcaatgtactatatttttttcaaaagaaaaaagaaacattaattggattgattttgaatatacttaagcacacatgaatttaataaaacctttaaaattatacatttatgatctaattatagtattccaaagcataattcaaagttaagtgacgatgtgaaccaataacgatacataacatagtgttattgtcaacaaaattatctacaacgacatttaaaccagggcaaaaattggtgaacaaattttgagaatgtgtgagattggaacattcaaaaatgtctaaatagttgaatacacctttagtactaacacctgtataagcaatctcaagatgctttagcctcgacatatattgaagatgcaatagcaaaagcatcttcatatctttactctcatgactaatagaaatcaagttcctatccaatcttcctagactctcgcagttgtttctaatagccctaatagctgagggttccataatacaacaacttatatcaaaatgaactgagcatgagagtttctcagctacgctaatttcaaatgtagtctaaattccatctatttattttaatgtaaatatacatcaagatattataaatacggtgtcatcaattatatgtaaatatgtgttcaaatatttgatgatgttagaaactcaagctagatatcaatgggaatgtacagtcacaaatgataagaccgcagtccacctaaataattcatatatatcgatagatcgatagataatatttgcttaaaacatacccatgtctctc

SEQ ID NO: 234155 - DNA, 1403 bp, Cannabis indica
catgaatgatagtgttggaaccacatgtgctgatattttattttggaattaataaatattattttagattttacgttttgtaaaaggatcttttattttattaaataataatgatataattaataaattttagatattccgttttacatgagcctccaaattattaattaaaaattcaatcatctcagcatgttcacataaattatacaattatttttattctaaatttaggatgaataataattttttttttaattactattataaagtataatagtaatttttgtttttatttaattcactattatgctttcaaatttcaataattattactacattgaatattattaattttaaaattatgatattaaaaaaaattgaaactaaaataaaattaacatcacttgacacgtaacatcaatctaataatagtaatatatatatatattttcgcaagaaataaaacaagttcatataatatagtaatatatatgagcaaataacaagttttttagtcaatcaaatctcataatattattatgaatattttaagaaaacgactgtcatatatagtaattgaaaataaaaaatagcggcgctacattatatataatgttattattttttttatatgaaaatgggatagagataaacaaaaatgagatctagtcataacaaaaattaagatatatatgtagaataataaataataataaattcagatacagttacgtgtttcatgggctaagtgttgtgtggtgtagtagtatggtactttttatgtgcatatttctttacttaggtcagaatttaaaacttaccatagtccctatcgaaaaggattaaagacctaacttttttgaaggctatatatcttgttgtaggtagtgttatatatctgtgtgatagtataatctttgagatagttattgatgattcaatttataaggtaggttgaagtataaggctcctataattaatacatgatttttagaatcatcaaaataatcgaaaaagtgagaaaagaatctacatcatgtgatcaagaaaagaaaaatttgtatgggtcctgtaacaattaggggtgtttgcggtgcgggtggtgcggtttttgactattttttcaaatcaacccgcacttacggttttttcaatttctcaaaccgcacccgcacccgcatcgcgaaactaaaaaaccgcaaaaaccgcaccgcaaaaaatggtgcagtgcggtgcgatttatgcggtttggactatcattaactaattaaactatcacaaatacaataaagtttgagcaacacttgtcaaaaatactataagacttaaaataaatatgaaaaaaaaatttaaagtttcaacaatacaataattagtgggcttagattgggccttcacatatt

SEQ ID NO: 234156 - DNA, 3617 bp, Cannabis indica
ctagaacacaatacattctccaaagattttggggattggtggcgtaaggctgcaggatccggctgggcgggcactatattcatgagcaaattgaaggaagttaaaggaaaaattaaggaatggagcaagaagacattcggtaacaaacacgtggtaaaaaatgctctcgaaagaagactgttggcaatggatagagtagaagcttcaggtgagtggaatcagatactgatggaggaaaggagggcactcaaaaaggaatggcaacaattggtatttgaagaggaacgaagtgtgtggctgaaatccaagtgtaaatgggctaaggaaggcgatgcaaactcaagattctttcataatattttgaatgcaaggaaagccagaaacacaatatcaagaattgaaagggaagatggatcaattcttgaggaaaaggaagaaatagccaaggagataatttcttttttctcaagcctgtacacttctgaaagaagattgtgtagcggtattgagggaattgagtggcaggcaataccaaatggcgacgctagtcacttagagaggtcatttgatgagagcgaagtcaaagaggcagttttcagttgtgaaggtagtaaagctccggggccagatggtttcactctagccttgtttcagtcgcaatgggaggtcattaaagaggatttgatgaatgttattaaggcctttgaaaaagatggcatcattcaaggaagcatcaacgaaacatttatttgtctaatccctaagaagttgaacagttgtagggttagggactttagaccaatcagccttataacaagtgtctataagattattgctaagttgctttcaatcagactcaggagtgtactgggagatactattctcgaaactcaaatgcttttgttgaaggaagacaaatattggactcaattctcattgctaacgagacaatagaagactacagaagtagaggcaagagcggcttggttttcaaaattgattttgagaaagcttatgaccgagtggaatgggacttcttagatctggtcttgtgtaagaagggttttggggaaacttggaggaaatggattaaagggtgcatctcctctacctcattctcagtcttcgtcaatggcacaccaaggggaaagtttgctgggtctagaggactcagacaaggtgatccactatctcccttttctttttaccttggtggcggatgtgctagggagaatgatgaacaaggcgattagttcaggtaaccttgctggattctttgtgggcaaggagagagtccatgtcagccatctccaattcgcagacgatgcattattttttgttaataacgagcaatcgctatacaagttgttgcggttagtagaagcattttgcgctatatctggtctaacagttaacatgagcaaaagtcaactactaggcatatgcatggatgaaaatactattgcaaggcacacaggtagaattggatgtgaagtgggaagttggccaatgcaatatttaggtctgcctttggggggctcacctagaaaatggagtttctgggaaccagtgttgaataagtgtgccaaaaactagatggatggaaatgtgcattcttatctaaagggggtaggctgacactcattcagtcagttctatcatctcttcccttatactttctatcactatttaaagcacttaagtcagtgattagaacaatggagaaaatgatgagagacttcttctgggaaggcagtgaatctacaggtggggaccatttagtggcttgggagaagatctgtaagcctcgagatgaaggaggcctaggaattgggagattagagttaagaaataaaagtctgcttatgaagtggctatggagatttcccttagagcaaaattcgctgtggcacagggtggtggtaagcagatatggtagggctgataatttctgggattccaagaatggaagtcgtttgtctcccaaaggcccgtggagggatatctcagatctgtacgatgagtacttggggttggtacacttcaaaattggaagaggggataggatccgattttgggaagacatttggcttaacgactatcccttgctgagtgaattccctgatttagcagtaatatcaaaaggaaggaatgctcctataaaagaaatgatagcggatgaagggcaaccaggtggatgggtggagaattggaatttccaatttagaaggagcttaatggatagagaggtgccaagccttatatctttaatgcaaaaggtggaacacgtaagagtgttaagtatttcggatgatagtcgaatttggaaaccggacccatcaagagttttttcttgtaagtcagccttctcttggttgacatcaaatccctcgactgaggacctggtttggaccaagacattatggaaaagctgtgtcccatcaaaagttaaagtatttgggtggctcgtggcctagacaaagtgagtgtccatgacaaggtgcaaaagaggaagccgttcctgtatatatcccatggctggtgtgtttgttgtaaaaacagtggagaagacgtggaacatctgtttttggattgcagatttattcgatgcttatggagacatgtgctagaggagtttgaatggcatgggttatgccaaggtccataccacaaatgatagtctcaaagttaattggaagcaaacgcagaacaaagctatggaaaactgtgatcttagcaacaatttgggcggtgtggctcgaaagaaatgctagaatctttgaaggggttgccaaatcagaagcggatgtgtgggagacagtcaaattttggacagccacttgggtctttagaacaaaacactttgagaatctgtcctttttagacttatgcagagattggaaaacgtttttataagttttcaaggatggtcatgtcttaggacttttgtttgatgttaaatgtaaccacggttttcctccgccataagtgaggcttattaataaatatcggggagacctctcgatatgtgggtctatacccttttcaaaaaaaaaataataaaaattattatttaccaaaattacatggtatcagagccgataatattctgacctagatcgactctttttttttgcttcttctctgttcgttaatatcttcttctaaatggtacagagccatttggcattttttttttgtgagcagggggtgatgttttccttgctacatatttaatgaatagacttccttctaaaatactaagcttcaaaacgcccatatctgttcttaagaactggttttctaaatctagtttgttttctgacatgtctctaaaaaattttggttgtactgttttcgtgaaaaaattcacttaaaaatgctagtaaactcaatcctagagcaaaaaaggtgtgtttttattggtattgcttcaaactaaaaaaagtacaaatgttttgatcctacacttcaaaaaacgtttgtaatcatggatgtaaatttttttgaaaatatcccattttttaatcctaatcataagggggtgaagttaaagatttagatttggaataataaataaaagatttaatccttattacaatcttaaaaatattgcc

SEQ ID NO: 234157 - DNA, 1355 bp, Cannabis indica
acagaagtccatttgagtgtttgtttggtcaattacctaactatgatattatgaaaccttttggttgtgcttgtttcccacatctcagaccatatcattctcacaaaatgacctttagatctgaacagtgcctttttcttgggtactcttcataccataagggttatctttgtgaaaatgctcaaggcaggatatacatctccaggaatgtcgttttcaatgaagaatactatccaagagtcatccaatctactgtccaaaaccaggtacatcctatgacttctcacaatatgcctactgctacttttcacactagttttttcactcctactaatactggtgttgttggttccatggctccattaaatgaggcacctcaatgttgtgtttctccaacaaatgccaccactattgctcctggagacaatgtttctactgtgccaaatgcacaaggatctcatatcagcaccatgtctcccacaattctcccatctgccccaaatacccaagttctggccactacatctgtcactacagatccatcacctccagcagccactacagatcccattcctacactaaatacactcccagtttctcctcacaatcccacattacctactcaaactccctctcttgctgataacacctttatggctcgaactcacccaatgacaactcggtctcaaaatggcatagttaaacctaaagcctatatggctaccaaacatcctctacctcatgccttattaccaactgaacctaaaaccattaaacaagctctccaggatcctaagtggtttgcatcaatgagtgatgaattttctgctttaaaggctgctggcacatggattcttgttccatatcaatcgggtatgcaagttatagataataaatgggtgcacaaaataaaattgaatgcagatggctcattaaatagattcaagtcacggcttgtggcaaaaggattcttacaaacccctggcatagactatgaagaaaccttttcccctgttgttaaaccagtcacggtaaggactgtgctttcccttgctgtcactcacaattggccagtcacccaactcgatatcagcaatgctttcctaaatggatctttgaatgaagttgtatacatgaaacaacccccaggtttcattagtaaggacaaaccagatcatgtttgcttgcttaaaaaggaccatttatggtctcaagcagtcacctcgagcttggaatgatactctaaaacaagttcttacttcaatgaggtttctctacatctaaggctgacagttccttgtttgtttctagttcgggtgctgatcaaatcatattactagtatatgtcgatgata

SEQ ID NO: 234158 - DNA, 1084 bp, Cannabis indica
gtgatggttcagtggtttggactaagccgactgaaggcatcaaattgaatgttgatgcagcgatttttgaccatgatttcaagcacggcttcgggtgtgtaattagaaatacagaaggagaattggttgctgttttttctggtgttaaacaaggcaaagtggctccagaaattgcagaaattatgggcataagagaagccttaagttggttgaaaaatcgctcttactctcatgctgctgtcaagaccgatagactggtctgtgtggatgctattcgaagcaaagagaggctccattctgggttcggattcattgtggaagagtgcaagtttattcttcaaaatttgtcaaatgttactttatgttttgtcaaacgttctgtgaatcgtgccgcgcatttattgcccgacactctttgtccttagctgaacatatgttccctattaacagtgttccttaggagttgttgtctatcattttaggcgatagctcttcttaataaaagaacactttgtttacaaaaaaaaaaaaagtttagaagataacaaatgttactaaatttaaaaaggtaagttaaaattttttagataacaaaataatataatataatctaaaaaaaaatgaacatataagtttaaaagtaactaaacaataaagataattaaaatgtatatgaaatcattttattttaaattgaatctttttatgaaaatgtaacttattagtgtcttactaatctcataaataactaaaaagttacctttctaggcagaatagtaaaaaaaaatcttttttataaaaagtaactcattagtatattatcgatattataagcaattaattgttaaattaatatatttataaagtttgctaataaactatgtagcaagttctttataaattatattttagtaatttcttttttgaaaataaaagtcatcattttattaaacgaatatctccgttaccaaactaggcaacaactcaactggaacagtgcaagttgaataataaattataaatataaattatattttagtaatttatttaagttattatataaaataaatttattcaaatatta

SEQ ID NO: 234159 - DNA, 888 bp, Cannabis indica
tctaatctaaaagtcagacctataagaagaaagatacaaatgaatgaacttaattcatattttcaacattatctatagatatgtagaaatcccccattattcaattaaaacatgaaatgaaattacacaaacacaaatttattttcaagagacatgcaagccaacattgttatgcataactactcaaactagcatttgaactactttaatgtaaatgctaattcgaagagtgagtggaaagccatgattaaagctcgtaatcgacaaatgggagtgacttcaaatagtcttcagctataccttctcatcattagaaatttaaaaaatgcaaatgaaagtctgtacaaaagaaggaacaaagaggaaaggatgataggagctcagaatcagaacaaatgcgagaaacataatgatagtctcaccttaatgttgaggggaataggaggaaaaccaaaactgaaatagtttggaagaagaaagtaaaataaaataagagaaaaggaaattagtgaggaaccgtaaaaaataaaaataaaattatgtttaatgtagaaataaaaagaatgagaatacaaaagtgaaaataaaataaaagaaacgtaaaaatgaataaaaaaagtaataaaactctgtactaagggtgatttccctatataattttattattacaatatatattcaatgctacgatatatcaaatattattgtatatatttgatgatataatatatgtattcgttatagttataatactaacaaatttgtataatttaattttatttatataattttaaaaaaaaaatgacgtgtaataaaagtattttcataatttttatttattaatttattacattaggtcatcttcctaaactttttttaaaaaaaata

SEQ ID NO: 234160 - DNA, 878 bp, Cannabis indica
ttaacaaacttaacaagctcctcataataatatttccacgtcagcacaaggagaagagctcctggatgagacgtacgctaaagggacttcccagataggaaaggcaacagttggagttggctatccaaaactcccttccaggagagaacaactggccatccagaacacctttccggagggaggctagctttcttgatgactccttccaggtggacatgatagacatccgggaattgacatctatcattccatgagacttcttccggatggacaagttagacttctagaactcccatccaaatgtcatttaattttccataaccagaacaacttttaaagatcttttcatttagagaaactataccacaaccccatttggctaagcttctacttttgcttatagctagaagtgtaagataagaataagtttgtattgtttttaccgtttcaataactattacataaagatcttttttcaataaaaagtacttttaaagtgtttggatatcattaaaaaagatcttttgtgaattaattaggaattatgtaaattattttaattttgaaaataacttctcaaaaatccttttgagagaagctacaaatcttagcttcttcctggtatccaaatttttcctcaaggtgacacggcatccatctgggtgacacgtggaacacatttcataacctggacaggaaattctactcctagtgaaccgtataggaagatttaatgcttaaggtcacaaatagaacttgtgacatccgagcagagtacgcatagacatctgaccaacttccatcaaacaggcggctcacatgaatcaaccaggggatgcgaattagcaattttagagatatatcatatatatcttcat

SEQ ID NO: 234161 - DNA, 1115 bp, Cannabis indica
aatgtgataaaggcagccaccaaattgatttgctcgagactcaattgtttgctacctcagcttgtagctgataatcaaggaggattcattcaagggagatttattgcacacaatgttatgatatgccaggatctgatacgacattatggaaggaagcagacaaagccaagttgtgttattaagcttgatttgcaaaaggcttatgacacaatagaatggaatttcatcgaagaaatgctgcaaggtttgaagttccctactcagttcattcagcttgtgatgttatgcattcgaactcctagattttctctgatgataaatggatcctcacatgggtactttgaagctaaaagaggtctgagacagggagatcccatgtctcccttactatttgtactgggtatggaatatctaacaagaatcatggggaaaattgggcagaaatcagatttcatctttcatcatagatgtaaagagttgaagttgaatcatctcatgtttgcggacgatgttcttctattttgcaacagagattacaagagcattatctacttgcttcaagggctcaaactgttctcacagacctcaggtttgcaaccaaatccttctaaatctgctatatactgtcatggtatgaatcattcagagatgcaaagggttcttgatgcttcaggattccagagaggagaaattccattcacttacttagggattcctatcagccctaagagactatcaccgaaggaatgttctactttggttgaaaagatgacacagagaatcagagcatggagtactcggcatatttcatttgcaggcagagctgtcctaattaactcagttctcttggcaatacacacttattggagccaggtaatgctacttccaaagaaggtgatcaaagagattgaaaatatttgcaaagctttcttatggaagggtcaacatatgatgataggagctgggcaaattgcttgggaacatgtttgccaatccaaagctgctggggggattggtttcaaaaaagttgctgaatggaacaaagctgcaatgttcaagtatatctgggcaatagcaactaaagaggataacttgtgggtaaaatggatacatag

SEQ ID NO: 234162 - DNA, 848 bp, Cannabis indica
actcttttaatggctaagcatgacctctcatttgcttgacagaaaagtagactatcatcagcaaaaaataaatgagtgataggaggagcgtgtcttgttagcttgaaacccattaagttgtgactatcttgctcatgctgaagcaatcgtgagaacccttcagaacaaattaagaacaaatatggggataagggacatccctgctgaagccctctagatggtgttaaatctcccataacttctccattaatgataaaagagaaattattggtagtaaggcagctcatgataagagagatccatcgttcggcaaaccccattttcctcataacttcttcaataaacttccactcaacccgatcgaaggccttactcatgtctagcttgaaagaagcaacgccattacgtcccgcagttttatttttaatagcatgtaccaactcaaaagcaaccaggacattatcagtgatgaggcgattcggtagaaaggcactttgttcctcagagataaccatagggagggccaatttaaatcgagaaacaagaaccttagtaacaagctttgagatgacattgcagaggctaattgggcgatactcttgtatatgttgaggcttcttaacctttggaattagtgtgatgagggtcttgtttaaagcagtagggtcggcattgtcattgaggatgcttagaacaactttggtcaccaaatcaccaacggttgtccaatttttctgatagaacatagccgacatgccatcaattcccgggcttttgtcaggacccatggagtgtaacgccgtatatacctcatccggagtaaaaggcttaactaaagatgcatttaa

SEQ ID NO: 234163 - DNA, 651 bp, Cannabis indica
aacctggtgacgcgcaaggatcttagggaattcaataccccgatcatcaatgtaaggcctaactttgagcctcataaaccgaatgtccactgcctcacttacaaactgggttcgatcgaaacccgtagatagcgggtttgacgatgatcccccttcgtcaatatgccttgttctttttagtcccatattattagaatgacaattatttttttcctttttttttctaaaataattctaataaaaattgggcaacacctccccttaaatttctactttcccaaaatttaaaatacaccagaacaatctagatagatatatacacagtctagaatcacaataaaaacccaataacttcactatcaacaaataacaatcactatttccacaaaaattcctaaaaatcctcaatttctcaaatataatagagaatgatacttacaaacccgaagaagcttttattccacctccattgttgaatatccttgaaagcttaaggttgaagatgaagaacaatggtaatttcgaatttggggtgaaattgataatttttgttgtgatttttggtggaaagtgaagattgatgagtaaaattggattttgggttgatttgggattgagaaatttgtaaaaagatgaaaagaattgaagatt

SEQ ID NO: 234164 - DNA, 983 bp, Cannabis indica
ttgaatatggtgtataatttccagataagtatttgtagcaaaatatcattaatctgctctgatttgatttgattctgaaagctagtataatatggtggatttgattgaacagtgaatatttatattaggctaattaggatttttgcccatcgaactttgatatgtatcgaatcgtgtccctgaactttttagactgttaaaaattctccccgaactattgagattgttagaatcaaaggcatgcccaattccattcagttttactaatgtggtgattgtctatgtactaaatcgtgctccttgaaccttgaaatgtaccaaatcatgccccccgttcattgacatataccaaatcgtgtctcctgaactttcattcaaatcaagcctatgtgagtaaaattggatgaaaattcttaaatccaacaatcttaatagttcgaagagaattttaacggcgtgaaaagttcagagagcataattagtacatgtcaaagtttggaggacaaaaatcctaattagcctaaatataaatgtttttctgcctaatgcgagtagcaagaatttaaccaaaatgagctcatatgaagtaattggttgtctcaaattatgaagaatatgtagaaatgaaactcagttgaattctgatcgcttgtatcacacgtaacatgttactagtttcttctccatgttttcattctgctgattgaggtttttttaatcaataggggaactctcgaagaactctataagccattgcaagactcgcttattaagcgatgttttgagatagttgacttcgacaacagtcagaaaactcaaaacagggtgatttcaaaagcacaaagcgtttggtcaaaagtattcccgaaacctcgaagatgttggcttccaactggatgtttggtgagacaaatgttgattgaatctttttcgtttgatgtataactttcctcctctggcactgatctcacatttgaatgcgc

SEQ ID NO: 234165 - DNA, 1080 bp, Cannabis indica
tactggtatttataaaaacacggtatttttgaaaactttttcgtgtgacaatatttttataaaagttaactcaaatttcagtatttttgtaagtttccctaatataacactcactacttaacttttacctatgtcccttacacacctctaaaattattcatgttttcatccatacaatctaattcgtactattttatttgattttatattttagatttaattcaatatacataatgactcaaattcaatagttaatttagattagtaactattcagtattaaattatttaacatttattaaagaaaaaattacataaataacaacaaaataaaatattattattgttttatgtctttaacaaaataaataaaataataaataacaaattcaaaagaataaaaaaaaattgtatttagaaagtaatatttaatttaattttaaattatattttatatatttgatttattatattttataatatatttgtattatatatattaaaattttaaacttatattattttacattataataattgaatatatatttttaaaatatatgtgtggaattgattaaattggattatatgtcaattaacatccaatggttacaagtgtagaatagattattcgcactttaaagattgaattgaattgaatggtgttgggttagattaattattttatgaacattacttttcaaatgaaataatctttttaatttttcttttctcgccataagataattatatccttgtgatgaaatataagttaaatgtaatattattgtaagtgaatactgtatgtttaattaagttttatttatattattaagtgtataatatattattaaattcttgaaagtatagatattttattgttaatataaaagtaatacttcaatttcctgaagatattactcactttgatgggaacctctgtagtaatatttattgcagtgtcttgtttaaccacaaaaaatatgtggtctctattttcatttcaaactacagatttttctttaaaatcattctagctgataacttctcattatattcttttggtttttttcttttaaaa

SEQ ID NO: 234166 - DNA, 1708 bp, Cannabis indica
ccggccaggccttaaacaaggcctctttgaccagccaggatctgcatggatcagaacacatgttttttcaagaactcaaacatgttcttcgtgttctttgtgactcaaagagccaagaatcacaacaatagtcgtattcaattcttttttgtctaaaaattacacattatgtatcttaaggctatcatgcagatcaaaataccgaaaggataccaatctaatgtaagaatcaaggtgtgttcaaagaaaagaataacattcatgcatccatggaaaaattaatcaaatcaagtaaaatgacaggattagaaagcttacccactacaagattttattagagaagaaggtgggaagcttggattgtcaaaacagcgaaaaaatcccgagaagaatgatgcttgtggattcaaccacttagagagaaggaggagattttcctaaggcaagtttctagtgagagaaagtgaaaagttaaaagtgacaagtgaaaaaaggtttcccccaaaaagtcacttatgtaatacatgtgggccccttttcttcacttacctcacctacacatcataaaggcaactaaagcagatattttctctactgtaatgagatcagacagtcaagacaaagtgctttaaaaggctaaaagtgcattaaattttattcaacaaaggctatagcagtccttaccacatcaatatagctagtaaagtccctattcgtatagacatccgtacagggacttggggggtaaatgttctcctaatttttgttctcctaacttggcatgcttacgtggaaaaaattagtgccacgtgggagtacaactcaccaataggaaggccaagtcagcacctgaataaatggagaccccaacactcaaatgtgcatcaagttacagaccaactccctttcaagagctggtcggccacccctggccagccgtatgaccggccagccttgggacttcaccatggccgggaaacctggcctccacaaggtcttggctggccaagaggtactcttcaggctttcctgggcacttttacacgtggaaaacaagtcatgggttgtcgattaggccctaaaagctcaacagaatagctgaataatatctagattcaagggcaatttaatcttttgtaaatatctaataaactatgcaagtattgagggatttaaattgtaatctagagttttaggcctcctatataaaggccttaaccttagcctagaaacctaagttgactctaagcttgaaacctgcctccaagctctaagtgtctgactaactctctctcttcctcatttcctctctcacacgcctaccctagcatcatctcaacacttaagttttaccattattgattcataccttataatcgtaagggtgctatagtagattccatttatagtggtcatgatagtatttctctcagtataaatacaactaaaaggggagtaggtcattacccgctatcacaagggggccgaacctgtataataaatttgttgtttattgcttttcattcttatttatgcaaacacgtggcaaacatcagatccatatgaccccactgttggttgatcacattttgaggtcaatacttattttaaaaacataaataaaaaagaacgaacgaaaccctctccttcgttgcggcaaaactctcctcccccttaattcatgctctttgattttcaacccaaaacc

SEQ ID NO: 234167 - DNA, 1062 bp, Cannabis indica
aaaccgtatatactcaacgttacaggtttgcagatccttctcatgcaaccccatctgtttgaaggcttggaatttcaaaagattcacagagcttccattgtccacgagtatacggtggacgttatctccgccaatattggcaacgatgactaatgcatcagaatgtgggtggtgaacccatcttgcatcactttccataaatgtgatgtcgtcgcactctcttttgaacaacttctccggtcgctctctcaggttgttcacattgggaagcagtttttctttggcttcttttgcatatcgctcctgcgactttctggaatcacctgcgatatggggtctgcctatgatggtcaggatgttgcgaggagttcttgaaccactcgcattcgttttcttctttatcatccgctcggggatgactttcctcattctttttgtatttgctgaagtttcctctcctgatcagctcttcgatctcgtcctgcgaaacccaacactccaaagtagtgtgaccaatatctttatggtacttacattattttttggggtctctcttgtcgcggtttcccctgatcgggggaggcttcttgaagaccccattcttctcttcgatggcgtagatatggtcttgaggtactgcgagttcagtatagttcacgaagcatggtccaccttttcttttcggggaggattccttctttggaggggacttggccagttttggacttcgctgtctccgtggactgcctcttcttgggcttcgtcctctggaattcttcccttgggattgcgggatcgtggtcgcggcattggtgacttacgcttatccttccctttctccgactctgccagggaattctcaatcctcttatgcgattctgccatggcaaagaattcgaccagcgattctggtcttcgagcttgcagttccttccaaaaatcggttcttggcacgacacctattattaacaaacatactagcgaagactcgggagccttctcaacttttgttacttcagcattaaaatccttaaaatagtcttgtaaagactcaccaggttc

SEQ ID NO: 234168 - DNA, 947 bp, Cannabis indica
atgactatttggtgcaggtatagtggttaatatttaagttaataattatatttgtagatttttactaataaaattttatgattcagttatttgcaggaacattcacttaatatcagtggtttgaataatacatatgtatttttaaatcctgctttagtatcctcaatatcttataaagatcccaatagacgtacacagaatctcattgagcggttgaaggaaatacagcccgatcaatggttgatttgtccctggaatcatgcgtaagtagatttataatttaatatatgtaaatatagatcgatcagggagttcactaaacttttttaattatgtgcagtagtcaacactggatagtgataatcatccaggctgctactcagtcagtggcattcattgacccaaagaataagccaattgaaaatgaaattagaaattgtgtcacaacgtaagttatcatttttttttctttaatttaacttttcttactaattctttcactaattaacttctctttggtgtagtgctttggaaacctacatgacccaaaaaaatatacgaaaaagggttgagataaagatcaggcagtacaggtgtcgaggacaaccggacgataaacagtgtggatattactgcatgaagattatcaaaagcttcatgactcagtacaatcctgcaacttttttgaaggataagatgaatgggccgattttgtgaagtcttatatattaatggaatgagtacacggttctttatacgtgtagggtatataacttttatatgatcgctacttttggttgtacttagttttattgatatacatcatagtcatattaattttttgttatggcgagcataatgcaacttttatgattgttacttttggttatattagatttactttatagttttatcaattttttgtaacagtgagtactacaataaat

SEQ ID NO: 234169 - DNA, 1191 bp, Cannabis indica
cttcgtggagtgacgactgaccttataaatcaacacgagtattttcagcatactttgtcttcactcgcacactttttctaagaggtcacacatcctgaaattaccccaagttaagcacgcttaatcgtagagttcttttgtgatgggctaccgaaaaataagatgcaccttgacctgaggtagtctcatacctacacagtctcaaaaactccacggttaaacgtacttgacctgaggtaatttcaagatgggagacctcttgggaagtattcacaggaagtgtgcgagtgaggacaaaacgctgaaaacactcgtattgtttgtagggtcagtcgtcattccatgaagaagcttgaaacagggacgttacaattttactttaaagtaaattgtatatcataacaaataaggccaaccttgagattggataggtcttaagaaaaaaaaaaaattagtgagcctttatttaaaaaatatgtggtattttcaaaaactactaaaatatatgtataatttcaaacaatttttttttttttttttagagcccctaaactaaattggctctaagtgtgagtctaacctaccttaccacacatccctaacaaattaatacatgttgagctatatattagtatatgaaaatataataactacactaaatatatattattaattaagtcaaatattgaatcaattaacaaaaaggatagacaaagtgtttaacaaaaatattctaattctagcatgttaacaaatagtcattaacatttgtgtagaattctcttctattattgtttgatatttattgtaatcttaaataattattttatatgatcaggttgatctacaagaaacattacaacggttaatcacattcgacaatgctattctattcatttttgggttagatttgacttcttattcatttaaatcctctaaacttgaatatcaaaaggcatttaatgagatgcaacagatagtttttcaccgacatattttaccaaaaagttattggaaattacaaagatggttacaaatcggaaatgagagaaaactaaaattagcaagagaaaaattcgatgaattcatataccaatgcatctcactaaaacgagaacaaatgagccacacaattaataatagtgatgaagaagctaatttaggtatgttaacaatttatatgaaagaaaa

SEQ ID NO: 234170 - DNA, 2052 bp, Cannabis indica
atatatatatatgtattaattatatttgtagtggatttttttgtgttgaatttgtaatacttagttgttttgtgtatctattttcatgatattttgttctattttatcacttaataatgttattgttttatttatttcaaattgttatctgcgtttctgcaaagcatgacaagtggcattttatgaggaagattaatttaatccttccctaatcaaagccctttgatacaattctatcacagagaagcctcctgaagccgagaacaactcgagatggaagaacacacagaagcctacttaagcttgacttagcttcgcggatgcagaaggcgaatttcttctcccagagttggaggggtctaaaaagggaagctcacacagacgatacccagaaaggtatttgaagggtctaacgcagacatcgaccattatggaatgtcatggatgttgaacttttatgcatgctaagtcatcaatgtgatggttatgttttttctgacgaagatcagatcttgtctcctatgcccaagcatggtagtgcgcgtattcctaccacatttttcccaaatgggtattatagacctttactcataaaggagcaagctttaggtgacatgtagcctctacttttaaaagttgaacctttgcatgccacgtgtccatatggtacaaaatgttcctattatctaactattttacgcacgggcttaaagttttccataggatcattcaatcagctctaatatcgcatgtaaattaccccaacaatgaaattttggcagaaaccttaggcgtgtcatgggcctattcatacctgccacttagtctatcaatacccctcaattctcatatgaaaggaggatcacaatttatgtagctaaaactctaccaatattactctaggtcttcttcttctttaagagacacttagggtatagagttgggatttcctgctaaaatattgtatacacatcaaactcgccctaagaggctaataatctgactcatggactaagatttattaacacctgaaccacgtaaaaaaatcttcatctctttatttttgtaagactttatttctttagctcttaaatatttagttttcaaaaatcttggtaaacttttttgtacttttattgagaggtaaagaaaggtgtaaaccacttccactactatggtgttcacacgaaacacgattcctaagaagattcttcaaggtgggctagaaatagtcacggtagaagtaaagcccctctcgccagagcacgcccaattaggttgataggcctatcttgcaatttttctcatctatttggaatcgtctacagggccagcccatcttattttatagggcctggctgacctatgctctcctattgcgggtcaggtattgttcctgcaacctcaatttgtgcctgccagctttctatgtgtctgccagcctttctatgtgcctgccagcctttctatgtgcctgctagccttcctagcttttttgtaaaactttccttgcaaaggtcaggcctctttggtcaaagaggcctttctcgatctattagtcacttcttgtgccggccaacttgtgcttaaaacttggctgcctacaagatttttttggccagcctacacacttcccttggttggcaagacattgttggtcaaggtcttgatggcatgcttaactccttttgcttattgcttaatagttttgcttgattgctttagaacccttgacggatgacatgttgtgtaaggagactatatcctgttattgacaagttgtatctcatctcagtcttgactatgtggacatgtcatgtcaaatggaccaacccaatatttggcccccttgtttagctggtaatgacctactccccttttagttgtattcactcttgagataataccatgtagatcacaggttagaaccttgtgatttctagctatgtctctcttcagtattacaattgtgagaataatgtgttacaaaccaagaactaataagttcttatgaaggacttataaagagaacttgacttagtgtctaggagg

SEQ ID NO: 234171 - DNA, 1219 bp, Cannabis indica
caccgcaacccgtagcctttctaacttgtccttacgaccaagagtctcacacaaaaacaaaaaattgggtttctttagataaaaagatccacaaggaattgataaacccgtggttcccaagtccacggtaattccacctaatgatgctcataatgaatagtgggcctggatcccagcacccaccaaaggctcattttttgagcccaaatcatgattaacttcagccacctgaacctccatactactattatccttctcaactggatcataacacggtccaatagaatgttggcccacaacccgtttgcccgattgcactccatcccttgtgcgccttttttagaatccaacaacatgacatcatcatttggatcatcaatatcagtgtcattagcatttatcccattcccactatggtcaacaccaacatgatattccatattttccttcacaacattcggagaattaaattgaagatatttcccacccgaatcgccacagaatcctccaacaacctcctcccttctgggctgctgatgtagcattctcgaagcagtcgccgcagcaccattgaatcggccagcaaacatctcatatgtctcattcccatcacgcaaccactgagagcccaccaggttgtttcgtcgtcgtggttgagccctcatccaatcaccataagcctttatgatcatctcggctggtgtatcaaaaagcttaggacaaaacttctcagagtgccctaataaagcgaaatgtagggatgtattcatttttgaattcggcccagaaactatcctccattgcagtccgacggggcttcttgcgccttttcaaaggagcaataatatccaatgtaacccgaacacgcatataatctctccacgcattctgaaaattcttagggtcagccttaacatacgtaccaacaaagttacccgaattctccacaacactcgcagacttaaaccccagttggagaccatggatctgcacccagatatcaagattgtttagcactgcccttttcggatcatctccccttcttagcttgtgaaaaacaaactaaactctattaaacgtccaagggcttccctctatatcaccctttctaagtcaatttcatggaaaaattgaaatagataacggttggtgtcaatctccttagcataaacccccttgcctagcggccacaaagaggccataacatggcgcatagctt

SEQ ID NO: 234172 - DNA, 643 bp, Cannabis indica
taacagtgtcttagattggtagaacacatattttaattatgtatagggagtggatttcgatagatatatatacagagagagtgagagagagacttggtgctggcaattctcttcagtcagtgtcacatttatatagctaaactcttaagtttacaatgttctgattaagcattttgttgaaggaagcgtgtgtctgagtagctgttaacattgcgaaagaggctagagttatagctaactaactcagacctctctgttcaaagggaggaacccttcttatgtggtttccaacttcataatggccgatatatctcttctcgttttacatgtagctgttttggaactaattgttgtaatttttaatttaaggtttgggaccgtgaaaagattgtgatcatacctgaccattatatatttacaagtgatgaacgtgcgaatcggaatgtggatatcttaagggatttctgcactgaacaaaacatcaagtacttttatgatatcaaagatctgggcaactttaaggtatgactaacaattttcacaatctattctgttattctagttatatgctgctttgtcccttagttatggatattgaaataagcttggtatatatttgacaggctaatccagattacaaagg

SEQ ID NO: 234173 - DNA, 993 bp, Cannabis indica
taattaataactagtaaatagtaatttacctataacagactaatggagcaacataaatacttgatatctaaagtaagatacaaataggtaccaacaatgagttgatcttttgttgtgagaatgactcaaagtcaaagtcaaaagggtgagaattgaaatgaaaacaagctcagcaagaacaagaacaactttaatcattttcttcttatcttagaagattaagaagatgattaagtatgtaacctcaattacaagataatacccatttatagtcacaaccaaaatacttcctggatgaataaaaaggagcccataaagtgtccaaacaagacaatttataagtgtagccaagtatggcacagctgagtattgctccattgattttcttttccatatttaaataaatgttggcctataattaattaattagctacattattaaccacttttttatttgttcatcattattgtgacataataatcagggacgaccctgaaaaaatgggggcctaagacgatataaaattttaggccccttaataaataagttgtccaagtaataccattcaacaatgaagcaaaggataagaaaaaatgcataaactctacactcttagtagtaattacaaatttctgcaccaaaaaaaaaaagaaacaattaaaatcaaacaagaactactgatattaaaaagtaactaattaataactagtaactaataatttaccataacagccaatagagtagcatacatcgtgatattaaagagtatacaaatggtcccaacaatggttgcgagaatgagtagaaaaagtcaaaagggtgagaatagaaatgaaaacaagctcagcaagaacaacaagactttaatcattttcttcttatctaaaaagattaagaagatgattaagtatgtacactcaattataagaccagacccatttatagtcacaaccgaaatacttcctggataaataaaagggagcccataaagt

SEQ ID NO: 234174 - DNA, 1003 bp, Cannabis indica
acataggacagcttgtatctatttggaatctcctcccgatcactttcctgacagggagcgcctctgagagaatgcaccaccaaaggatctgatgccactcaagcattttgctattccataacttgttccacaacattggagccaccacataatggctggctctttcctgtgcttgagttaggtaagatgatttacttgtgaatctcccgttaggctctaaggtccatccccatttatcctcttcctgccctgagggattacctcctttcaaaatagcagagacagtatctttgtcaaacagattatttagttttgaaatgtcccaagagccagaatttgtgagaagatcagccacacagttcaagcctggcagaatttctctccttggtttcggaatgaaaccttttaagtgaggaatccaaggatccctccaaatgcaagtgtttctaccatgacccactaacttacaagctcatttttttcaggattgccttagctttgaccacattcttccagaaccacgagtcagaatttttatatttgcagtttagaaaatcttttcctctaagatatttggcctccagtactctgcagcataaagattggcaaccatttagaatcttccatccccatttagccaggaaggtcaggttcatttctttcgttttccaaaaatcaagacctctaagagactttagaagacggagtttatcccaagctcttagatgcaggccatggtttcctttctcaaaaccccaccaaaaattcctgacaagaccatctatccttttaaccattcgatcagaaagtttggtggtttgcatggcgtaaatcggtagcgatagtccaatagatttaatcagggtcgcacgccctgacttgaaaagcatctttgctttccatccctgcaattttgatgtaagtctatcaagggtgaaattgaaatccgcatccttttgtcatgatctaaacagaggtaaacccaaatatttaatgacccctt

SEQ ID NO: 234175 - DNA, 1321 bp, Cannabis indica
attgagtaatttgcggcgtaaatacttaagtttaactctcgtttgcggataaatactaagcttaatttcttacgagaataatacctaagttatatttttgaaacttcctgttaagtatcaagtcattatccacgtattattttcttattggtgtatttaaattaacttttaaataaaataaaaatttaatgacttagagcaatcatgaaagtcatgtggtcattgacatgatatttaatgaccaaatatttatgaaagttttaaaaatataacttaagtattattattgtcaaaaattaaactaaaatgtttatttgtaatcgaaattaaacttaattattaaattatttgtaatggaatgttttgttatcatttttacaagaggattgagtgggaaggtaataaataataataggtatttatattagattaaattgtccttaaacatatatatattttagctattttattgggctattaaggcctaattcgcagttcacgtgtaaaactatccacaagatcctcctaggtccagtcctggtcggtcaggcacctatagggagcaagctggacggccttgtgttgtgtagaggctggctgacatagggtcgcccaggagtagccgaccaaccctcttgaggtggctggtctgtcacttgtcgttctatttgagtctcggtgctcccgttggctcgaggctctaatttgaccttcttatttgttgacctgtattgctatataacactaatattgtccatgtaagcatgtcacatcaggtagtaaaaaatctcccatgaactattgagattgtttaatttaaaacttttttttaattttaataaggaaagtctaacatgaatgaaagtttaggggacataatttgacacatgtcaaagttcgaggggcgtgatttagtagatattaaagtttggagaacataatttagtacataaacaatcactaaattagtacaattgaatgaaattagacaaaaatccttaaattcgataatctcaatagttcaaagaaaatttttagcgactagaaaaatttaagagcatgatttaatatatgttaaaatttataagacaaaaattctaattagtcatatatttatgagagttctaaaagtaaatgttattactgtacaaattaaactaaaatatttaaataaactaagttattaatgttgaaggttttatttttacaagtggattgagtgaaggaggtaataaataataaaaggtaggtgaaagacacgcgcggatgtggtgcgagtattgtaaagaggggagtagtgttggacaggtcattaattaaa

SEQ ID NO: 234176 - DNA, 594 bp, Cannabis indica
attgacgatattttgcttttttctcctgatgcgaaagcccatcaatcattattggcccagtttgctttgataactagagcccatggtatcatgttgtctgaaataaaaatgattatttgacagacgcaaatagaattccttgggatgaaattatccaaaggaaaatatgaagtccaaccacatatagcccatgaactactcaaattcccagatgaaaatctcacgaaagtttaggtgtaacaattcttaggcatcatcaattatttacgagactttgttccccgactgtctgaactaacaaggccactcaggaatatgctaaaaaagaatagtccagaatggtcacatgaccaaactgtggcagtcaaaaagctgaaggaaatcatgcaaaatttaccacctttacagattccttctaacgaaaaaacgtgttcttcaaacagacgccagtgaccaacattagggtgttgtccttttagagaaagatgagcaggggaaaagacgaatatgtggatataagagtggacacttcaaagattcccaactccattatcatacaacactcaaagagctgattgcaatcaagatgggaat

SEQ ID NO: 234177 - DNA, 1093 bp, Cannabis indica
accttaacagcatctctcatcatcatcacattcggattaagccattgcacctctgtcaaactccctgccatacttcctagccttttaacgttgttaatggtcaaagcattcagtgagaaccctttcattttaatacaatattccacctcatttagactagcttcttttcatttaccattagatggcaatttttctgtaatcaaaatgccaccatggaaaatccatgttgacttcttgtacactttttctgcaagaattttatcgtcaaaggacaagcctaccactgtgcattgtttctccatagcaagtatttccactgaccactccctctctttctcccaaattctggagaaaaccgatttaaaaacttagccatgcagtgtcttctggctagcactcttcccacaagagacgccatcctctggcagcctcgacgtgagactcccattcatcttccacctccacattcaaaactacccgtaaagagaaatattattttctaaatcctcttctatcagaaaagcacctctaccaccctacccacgacaaaaacacaacagaggaacgctccaaacaaagctcacacactcacagtcacttaccacaaactcaagactagccgtgcagagagaaccatggtttatctatctcaacaaagagcatctcgtgtagtactaatttgagtttgaagttttttaactcctctattagaactatgattttgaatgtaaataaattatcaaatgggagaaaattggaaataaataaagaggacaaaatctcattagaaaaaagcatttttttgttctccaaaatttatattgtccttttttgctgtataaaaatctatagatattgctaataattaataaaagcccttagtaaaatacaaaattgaattttaactttagtgttgtcaaatgagaataatcgaaacttttcagtttcagccacttccttcttgccaaccttttctagcgcttttggttgccccttatttgttttcaaatacacaaataagtggcgttgacagctttgtatgcaatataaaaatgttggttgcccctcgtttgttttctttattttttttttt

SEQ ID NO: 234178 - DNA, 567 bp, Cannabis indica
ctattaataattaatgttagtataaactcttatttatttcttttctttcaattttgttctttattttctcaattataagtgtaccattacaaaccagttaatttagtatatttatatgcatataaatatttcagttataaaattaaattaatatatatgacattattactcttcttttaattttatcatcatttttttcacaatttgaatgtacacaaaaaatacactgaatttgattttatcattctccatattattgaagatagatcaatatatgtgtgctttctctttgaagttattatgagggtacactaaaatctcaaaattaatatatagtttttttcttttctaaattcatttgcttaaaatattattatattgtcgtacatgtactatatgttcaatgttatatacgtgattaaatgaagtttgttaattattaatttttatattgtctaaaaaatgtttaattatttcattataatatcgagcctatttgttttttttttttttaaattaaagtagtctttcacatattatcttggaatattaagtttgaactttcat

SEQ ID NO: 234179 - DNA, 665 bp, Cannabis indica
ccagattttgaagttgtcactccgaagttcagggatttcactagtgattttagcgtatttagaagtggatgaaatagctgcaagaataggattacaaatttaaatgtcaaaaaaattaaagctttaatgaattcatgttttaccaatgtagaaacatgatgaatataaaaactttattaaatctaaaattgtctgtggactaaattttaaatctaatgaaattatatgaattttatgatagatttaatgaaatatttaagttaggaaaaagaggaatgaaatctatcttaattaaagtttgtgataaaactattatattaaatcctcgtaactccctgtgaagtaaattaaaagaatttaatttaatatattatcctaattaattataaaaatataagaaaatccttgtaggataaaattattatacctatataattaattacaagttatgtccattaaggtgaattttaattaatatataattctatataattaaagatgttgtggttactccctaattatttaaaattacattttcacttagactttagatattaagctctacctaaacgtaattttgttattaacgtagtagacaatcactgagattagtgcttatagtgtggtcgtctgaagatcattaaaaaccgttctagatatgagca

SEQ ID NO: 234180 - DNA, 717 bp, Cannabis indica
agaatttacttttgatattccttccacatacaactttctacatctctcaatgaaagtaccaaaaggttgactgaaatttttaataactaattaattagagttgtttaaatgattaaaagagatttaatgcaagtatttttacatggttggggcattaatgtgccttagttcacgagtcactactatttaatatagtagtttttcttacagagggtgtttacaccattttttctgacccctttttaagaatatagttggaatatttatagcctcataaagaaggcaaaaatgttactattgtcacaagtgtcgaaggatggcttgcataagttcccagattaagataatagggtatgtatgtatgtttgtcttggtaggttgtataaacttttcctaggtgtttggtaaaataagcccttaaccttctttgattgacgcgatagtacactatgcatccgtcataagactcatagattagagtgtaatcgtcgaataatgggtttaatgcctctaacacatcttttcggaaccattcacagacatttcccccatgctgcatttaatgcgcctatgcaattcacgtctgggatctaacgaccggacttggatattttacctagctactggaagcaagcataatcctaactcaatggtatgattgaagcaccctaagggacctcccgaacatgactataggtctcgaacgcgttctcttac

SEQ ID NO: 234181 - DNA, 1389 bp, Cannabis indica
agtacaaatgaaaaaaaaaatgataaaggcagtaatgggtgtaaatttccctaatattgttattttttatatttatgaaataattcctttactcatactaatctttacataaaccaagaaattgggccttttgatgagttttatgggctcggtacactgatacctattggggtgatcaatggctggagtcggattgtaacccaactatactaagccaacctaacaaaactctaccaataaatttcaaactgtttttctttttttagtgtggtgcaaattttttttaaaaaatactatgcaagtttcatactgtattaagtttttattattgttttttagttgttttttagttgtttttaattgttttatttttttattttacggttgttttaaaaaaaactatattttggtaaaaaaattgtgtgacagtaaaattgtaaattttgaccaaaatttagtatttttgtaaaaatccatttatttatagggatttatattatactaatatttcagccaataaaaaaatagcttttctatttttatactttgaaaattaatttttttttttgccatttttataaaaatctctattgtaattaacagagcaacctaaatcgtatagaaatccacatagaaactactagagaaaccactttgaaaatccaaaccgtaaattttaaaaataaaattgaaaaaataatatataaagtaatttccctaaaaaaaatttactaatataaataacatataaaaataaaatatcttaatttttattccaatttgaagtttcctgggttgggggttgaagttcaagctgcttccaatttgatttcagggaatttgatggatgtgaatatgggattgtttctccttggctcgaatggaaaaatcattgataatacgacagatcagatgaataataagatacagatgatggaaaagggtgaggccagtcaagttaattgcaagagaaatggttctcggagggaagttcatgaatctataaagggcttagtagctatggatacggataatgcttttgattctttatgtttggggaagggcagccctggtgctgaaatagattatcttaatttggtggaagttcctataagttatgttgatggattggagaggataagtaaggcaaaaggtcctttaaagagaagggtgactccaaaaaaaacaaagatcaaagagaatgtggttcaggcagggaacaataaattggagacggttaaggatgtaggggtagtctttcaaggggattttctaaggaattggatttgatcattgacgatactttggaagcggcgaacctagttgatcaaggtcgctgagaaccatgatggccatgttttggaatgtccaaggtcttgggaacccttg

SEQ ID NO: 234182 - DNA, 798 bp, Cannabis indica
aaaatacttaggtcaacatcatcatctccattccatgactcaatcgtcaacttaatacatttatttttaaaatgtgaacaactatcattagtgtgttcattcttctctccgaaatcatcttctccatatttcatgtttgaaccaacaaagtatatatatatttttgcaacaaaccagtgaatccacatagactccaatcttcacaatgttgaaatatttaacttgaaatttatagaattttctttcacttgtgttaaaagtgggaattatgtagaaaaatatagaaggtagtcatttaataatatttctagaatagtctatagaatcctataaatagagaagtaatcccaccaatttgtatcaagtaaaatatcacaaaagttaagttataaaatatagccttttccatattattctctccaatactcttcttatttcccaacaaagtggtatcagaggtttgtgaagaaaaaatggcaagtggaagaatgatccccttctaagtttcaatgctcaccaagagcaactatgacaattggagtattaagatgaaggcgctagtaggagcttaagatgtatagaatattattgaggaaggtcataaggagcaagacgatgttgctctttcccaaactaaacgagatgccttaagggattcaagaaagagggataagaaagctctctacctcatctatcaagtgggggatgaagatgcattcgagaagatctcaaatgcaacaacgaccaaagaagcgtgggagaagcttcaaacttgcaacaaaggagtggagcaagtga

SEQ ID NO: 234183 - DNA, 639 bp, Cannabis indica
ggggggtattgataaacctttcggtacacttagtatatactaggaggccacgtgatgagtataagtccaaagtttaatttgttaaaagggcttgttaagtatgtaatgggtcttttagtatttttatcctttaattttcttatttgttttagtggtggctgtaataaggggggcaaggcttgtaattcaattattggccaaatcctataaatagaaagctgagaatctaacttgggacgattgggatttagatgagttatgacttaattgggagagataactgtctcgaatggttgaattggagagactagcctcttgaaagctaggtgtaatgttggccactaatatcaataaagtaatcattttgaaggattaatttttttagcgtgttgaattgtagatagaaacattctggtctaaagaaagttctatcacccacaagctcgttctctctgccccattatttggttcttaccaaactctaccaccgaaaccacacttaaacttcgatgaccactacccacgaccctccctctctctagttctttctactgcatgatcgagacccacgaccttccctctctctagtgctctctagttctttctattgcatgacagagacccatgaccctccctctc

SEQ ID NO: 234184 - DNA, 1491 bp, Cannabis indica
tactacaccttattcgttgcacggaccaccaaaatgtatcaggacttgaaaccctattattggtggtgtggaatgaaaagagatgcagtggattacatgtctaaatgtctaacatgtcagcaaatcaaagctgaacaccagagataggtagggttactacaaccatagcacttctcgagtggaagggagaggatattacaatggacttcgtggttggtttgtccaaaaccacaagaatgtatgatttagtatgggtcatagtggaccgtttcatgaagtcagcacattttctgctgataaaaacaacttatacagtggatcagtatgcaaagctatatgtgaagaagatagttcgtctccatggagctccaaaatctattattttagatagggatccaaagtttacatcaaaattctgggtaagtctttagagagctatggggacgaggctgtaattcaatatagcttttcaccccttgactgatgggcaatcagagagaacaatatagatattagaagacttattacaagcatgtgtcatggactttgacggttcatggagtaaatacttacctttgatagaattttcctacaacaactatcaagtacaatagggatggcttcctatgaaatgggggaaataaagtatttgggtcttgagttagttcaaaggaccaatgaagcgatagacaagatcaaggctcggatgcttacttcgaaaagcaagcagaaaagttatgttgatccaaagtgcagagatgttgcatttcaagcaggagaacatgtttcttgagagtttctccaatgaggggtatcaggtgctttggaaagagggacaagctaagccctaggtttatagggccatttgaaatactcgagaaggttgggcaagtatcgtaatgactagccttaccaccagtgttatcagctgttcataatgtatttcatattttaatgttgaggaaatatatttcaaacccgactcatgtcttgagttacgaagccctagagctacagtcggacttatcctatgaggaacaaccagttcaaattctcgataggaaagaaaaggttcttcaaaacaagaccatagctttggtgaaggtactttggaaaactagtaaggtgaaagaagccacctgggaattagagtccggcatgagggctcagtatccaaagttatttaggttagatatcgaggacaaaatccttttaatagggggataattgtaatgattacatgttagattatggattagtaaaggcaattagcattaattattgatgttttataattacatatgattttttatttgttgtgggccccatttttagaaatgggcattagagttataatttctcaattctaaagattttattaaactctaagagtattgtttatgctaaatataaattatgaaatttttatgatttttttttgctccgcgacgatgaaaaatgtgaaggatggtcgttagagtcacatgggta

SEQ ID NO: 234185 - DNA, 784 bp, Cannabis indica
gcatgaaaaaacttggtgttgcgatcccccgaatgtaaccaatcaatccgtgagcgttggtgccaataaatctcttcttgttctaacaaatcatcaagaatagcttcagattgtgcatagcttcagcattgcgaaggggagcattgttcagactctctacttggaaacgagcttcagtaattgttttcttcatattaccaaacttgccaacatgccatctttgtaagttagtcgcacaatcttgtaaatttcctatcatagtcgcaatgggatcagttgctgaggaagatttccagcttgctgtgatgatgtctttgctttgtgagtcagaaagccagattttctcaaaacggaatctacttttccttttatcttgctgaagctgagaatcaactggtgtgaaaacagcagagatagccctatgatctgagctaaaataatccagatggtgaacttgaggcagagtaaaagtgttttcccaaagtagatttacaaagcaccaatcaagtcgctctttgatcgtgtctacagcagtctgattttttatccatgtataaggatcaccttcgtaaggagtctcatgtaacttgcaatgatccaaggacttacgaaactcgtcgatttgtttttcatttctgaggcagccaccagttttattatcattggagaggatttcattaaaatcaccaatggcgagccacagtaaagtgggagtgacatcagctaatcgttgtaaaagaatccaagaatcagccttattttgagcatccggagcaccataaaa

SEQ ID NO: 234186 - DNA, 599 bp, Cannabis indica
agaaattcatagtaaaactagtaaagatcatttttcatacctctagggtgtatcagtaatactaaatagtattgacaagcattagttaattgtgtaatgtaatgacctattaattatgatttgaattgaaatagtcagagaaactcatttctttgtctgccacaccaagtttaaagtttcattcaaatcagtgaacaagttataaatagaaaagttaatgaagtatttaaaatcatttcagaactgaaaatttctgaacaaaataattttattagatgttttgttagttatgagcttagaattccttgcaaagactaaaggcaaaaagatattaaactgataagaacagatactacacttgatcttagccaaaaggccgagaaaggtatgatttgtatagtcaaaggcttggagttttataagtctttaatgagctactattgtagcttgtgatccatgtgggagtaatgagactttaaccatttaacagctataacaaactacatcctaatcttgccagtaaataacttccttctaaaacatatttcaatttttaagtaaaagtggcaaattttcaattttacaacatcatataaatt

SEQ ID NO: 234187 - DNA, 983 bp, Cannabis indica
ttaataaaaatctgtgttaacatactaatatcatttacaagtagctaaagtgttttaaggacaaaatatattgaagggtagaacgataaatttgtccctactcaatgtagatcatctataggcgatctttgactatttggattgaaatactgggtaattcaaatcacatctattttcggtatatggagcgttctatgtaatcaggagtgtaattctgaatctatacttgataaattttggatctacttattggaagcttgattacatagggccatgatccccacactaatgaggatactactattttgtagtctcaattaattaattttaattaatcaattaaaattctaaataagactatgtctttgtttgtgaatctttcactaaacaatgacttaattgagaagagaggatttagggtttatttattaattaaaaaactttgtaaggtctttttagtaaataagttaaatgataattttatttgataattaattataattattaaatagatagaattgacattaacagagttagaattaaaatacagcatttgtgaaaagaaagataagatgagttgaataaaatggcaaaattaaaatccataaggcccattaaggttttgaccaaggaggttcaataaagccatttttatcttttttaattccatttaaatttagccttagaaggaatcctaaaaatagaataagatggctcttgttttttttaattattatcagaccactttattagatagaaaaatagaaagcaaagagaacctctcttctattcaaattccttcttcttcctctaactatttcgaagcctatggtgaattgagagtatacccactcatgtcaaagcaatacctagcatagtgagaaagattgtatctaaacatattgaaggagagaagatccaggttcagatattgataatgctctgctacagataggaatcaaaggctagagatctgaatagaa

SEQ ID NO: 234188 - DNA, 1737 bp, Cannabis indica
tgattcttgccacagtttctacaataagatatatggtggttcatgcaggtaaagagttgtgtcccattacccttgagagggggatacgccaaggggaccccattttccctacttatttttgctttgtactgaggggttttcttcatagacggtttgagactgctagtgcattgagaggctgtaaagttgtgaatggggctccggtcatatcacatatcctatttgttgatgatagctatgtctattatcgggctacagagcgggaggtctctaatgttctgagactgcttcatttatttgagatggcttcaggacagaaggttagttttagtaaatcatataccgtcttcacagtaaacacccctactgttttgaagacaagaatatgtggtattttaggaatggaacttacaaatgagaatagcacttatttgggtcttccctgcaccatgggaaggaacaaagatgctatgttaggattcgttaaggataaaatgcagaaacatattcaaagttgggagggtcgtctcttacctaaggttgggcatgaaattctgctaaaaactattgcccaaagctcttccaagttatacaatgccagtctttctcttgcctatgaagacatgttctcattaggaaggattgatgtctaagttttggtgggattcttcatccaataattcttgtgggattagttggatgagttggcgtcatctttcctggcataaaaacattagtggcttgggattttgtaaccttatagattataatatttctttattggggaagcatggctggcgccttctgttacgtgagaattctcttgtgggtcgtatttataaatctcgttattatcctcggggttcttttttgacagcaactttggggtctaatccaagtttcatttggagaagtgtttttgagtcctagagcttgataaaatcagaagcaaaaattagaattggatctggttttgcaactggtgtggttaatgtgcgttggtttcctatcgatgacaatccttaagtgacatcttcccatcctactttactccatagcaaggtttatcaacttatgacacctggtttaaaggagtgggacgaggatttaatatgagatgtttttgattccagggacaaccatatcatccttagcattcctctcagctcttccataagtgaggatgtttgatttgggaaaaaggaagcatttgatttttactctgtgaaaagctcatattagcaccttcaatatttgagaggagactggaatgttcagttggaaatctgacctgtggaagcaactttggaagctcaaggtcctctcaaaagtgatccattttgcttagcatgcactatcaggatgtctcgccactcgaacatagcttaacagcaagcacgtccctattgatatacagtgtgtcttctgtagtggggaggttgaaccaatcctccacgtccttgttaattgcccctttgctcggtcatgttggaacatatatgcaatttttccctctcctgctatgggttttaatgactggtttgctgagttttggtaaaaaaaaaaaagaggtggagcggttgaagaatttttgatggtgggatggtaaatgtgaaaactattaatgagattttatggaagaattgcccacactctgctgctgatgttgttactttggcacataacgttcttaatcaatggagatatgctcagtctcgttgtattgagccgctgcta

SEQ ID NO: 234189 - DNA, 427 bp, Cannabis indica
agacttggacatgtcttcttcttcttcttcctcaacctcgccattttttcctccatcttgttcttctcccaaagtgcaaaagtttccttcgcaccgttctacggtctcgacttctttctcaacaagttttttagcaagcttcttctcaacctcttctgcttgggctttgatggtcttctcggcctcttctttttccttcttggcctcctctttcaccttctctgctccccctttcgccttctcagcttcctcttttgccttctcagcttcctcctttggtttctcggcttctcgcttgaggcgggtattatcctgttgggagtcttcccggtgcttactcacaaccttacattgtgatagtaacttgtggacctcgccctccaagtactcaagccgctcagagagtagtcggttggaagcaaaagaa

SEQ ID NO: 234190 - DNA, 643 bp, Cannabis indica
ttttcaaatttatttttttaaaattttcctaatcatttaaaaagattttgttttttaagatctaaactgattttttaagatttactaaaaaaatgttaaatctttcttatttttattttaaagaggtacgatttgatagttatcaaagtttaaggggtaaagttgctaattcacgaaaatatattaccatttaaatagaatactaggatggaacctacaaaaatgactaaatttctgtaaatgtaaaagtttaaaagaaattcttaacaaactgtatattttaggaggtagaattattattatcgaaacttcagagacaaaattactattaatcctttgcacaattattatgtaactaccacaagtgacctttaaaatttagggaaatttttatttatatacctaaaatataatctattattaatattaccgttaactaatttaatagctttttattaacgttccacgtcatcatccctaccgagaataaaaaaaaacaataccagaattgtaaatatgaaacttgcaaaaaccatcccataacgcgtcgtgctcctctattatccacggaattgcatcaatttcaatcgcgtgtgtgtaatcgactaacaagaaaacctataaaactataactcaaaggatt

SEQ ID NO: 234191 - DNA, 1154 bp, Cannabis indica
tatatatattatattaagaaccgaatcttttagttattataaaatgagaaatttttctgctcttaatttgtttgtactttgataatttgctaaattatctaaaaagaggcatagtaggaccgataattcattccacattcatccttgtattcaagctataatgaagaatggattaactaattcttaatcaggaggaaagaatcataaactattgttttttgataccctttcaagatactgatcagtagttaaaaagtgattggtgcaatacattgtttgttttgcattcaagaccaactactctactgaggctacaattacaaagagaaagttagttttgacttgagttttcaagtctttctttgtaggctgattgtctatttcttttatattattgaaacttttcctttagtaaatataaatatatatacatatatgtatgtgtatgtgtatctatgcatcaggtaggaaaataagaaagagtgaaaaataaaacatgttaggccattaaaatgaattgagaggaacattaattatgtatgaatcctttcaatatttatgtttggtgaataagtgtgaataatattgatcataagaatctaagagcctgtacaaaaccagtttcaacactcattacaatcatctattatagtttttgacaaatatttttgagtcatagttggtcatttttactaactcctttgtataagaattttacaatgtaattttttgtttacttattgttgttttcttttaacactattatttattggttgtaagttgttgtgatgtatcatgtcatttcgtgtgtgctatatattgtatatatagtggaaaatttatggtcaattaatcttacatttcttagatgatgattatgcttaattggtttgacttctccttgttgtcacttctgtattttcaaggggtcaaaatacatattaaataagttttaagcaattatgatttgacatcctctttgttattactttttcttatagttttactctggcgtactttatttttttttttcatttcagttgacattgtagtccatagaattccattgttgctttgaataattatgatagatttataattattttgtaggtatggatcaatatatgcgatagattggctgaacatgatgaaga

SEQ ID NO: 234192 - DNA, 1579 bp, Cannabis indica
taggacataaaacccaacagatacaatggttaatcttaagatcgttgctgctaatcctgaaacaattgctattggtctggtcattagtaaagattcatcaaaagaagttggaggaaaagagctcgaagatcatttttctgaagtagttgttcaagtttgtatcaactccgacgaggaattaattagaccatatggacaatgcaagacaatctgtgaagttgttggagcatctattgcatggccaacaacatttctagtaacttaaatacaattttaaagttttcattatatacatatacgaatgattattcatttgttatttattgtgctaaaaattatgcaggtttcacgaaaattaaacaacttcatgactcaataatatgactttataaacatagagaaatagactcatgtaaatatttctttattttcattgatgttatatagatagtttgtatacaatttttattgttattgttcatgtttgttgtaagaatacaaaattattatgtattatatctttatattgttaaaatctttatgtaacaaacttattttagttaaaaactgttcatataaaattatatttattcttttttatgtttagagattttttatatactaatagcttttatgtttagaattcttttttgaatatatatatacaaattcaataagaaataaaaatataggtaaaaattatttaaaattacttattgaatttatatttaaagaaaattaattttgttcctattattgtaattaaaaataaataatacattacagaaataatttttagtggacttttaaaaaaaaatgtcactagtataattttttatattttcaaaatgtgactaaattattttttaaacattaaataaataaataataaatattacagtaacatttgaaattgccacaatttatgtttaggggacattttaaaatgtcactacaaaactaattagtgacccttaaatttttagtcacattgacacagcttacattttattgaaatgccactaaactataaaatgtcactaaatattagtaacagtggcatttaaaaatgtcactaattgggatttttggtatactgaagtcactatccatacaacaagtcaccacaaattgtttatctttgatgtatttttttattaaaaaattatttaatgtatttaatgttttcgctcaaatataatgtcaatattaacctttacatcaagatctaaggttcataaataaatcattacaaaaagtgattaattttattaacctttacatcaagatctaaggttcataaataaatcattacaaatagtgattaattttaatcactactatacaagaaccctatatttatattattatattatacacatggtataaaagtggaccgcgtgtctttcatcttctatataaacatatatgtattttaaaaaggtaatttacattattcacaagtattgccttttttaactactaaatttgtagtcgcaactaccataatatatatttgtagtcaaataatatatattgatctagtagtttactttttatgtttttatagtgactaaat

SEQ ID NO: 234193 - DNA, 1051 bp, Cannabis indica
ataggtggtgttggatgcatttatggtgcatgtgtagtcttgaaggtatgtaggttttttgatggttctacctctttttgtttggatgggaggatctggtggtttattgccagtgttatcagagtttggtgtagctgatatgtcagtgggattggctacagaattttttgatgcagcaggaggtgctgtcgtggtagcagtgggaatggctgctgaatttttggtagcaggagaagctacttttgaggaagcagggaatgatactgctatgtttttagtggcagcaggtgctgcaggtgttaaagcagtgggtggtactgctatagaggtaggaacaacctgacttggttgtgatggggcagttggaaaaactgctggtatgtgtgtgaggttggtatgttctgcactagatgggatattagtattgtctgcagaaaatttggtaggaaaaatattatgaatggtgttgtgattgttggatgattgattaacaagagggtaaatggattcatagaaaataatatctcgagagtgaaagatgtagttagtttggatatcaaggagggtgtaggctttcatatgatcgggatatcctatgaaaatgcatgctcgagctcttggagagaatttggttggtgtggagacatgagaggcatatgctagacaaccaaaatttctgaggtgagaatattgtggtggttttttgtggaggagttcatatggtgttttatcttttaaaaggattgatggtgttctatttatgagataaatggctgtttttatcatgtgactccagtatgaaataggtaaattggattggaaggccaaagctcgagcaacatttagaatatgttgatattttctttcgacaacggcattttgctgaggtcgagctacacatgaatgataattgattgtgccttggctagcataaaaagtagtgagtgttaattctttagcattgtcagttcggacagctttgatttttgagtggaaatgaacatgaacatatgtaaagaaattttgaataattgattgggcatcagattta

SEQ ID NO: 234194 - DNA, 672 bp, Cannabis indica
ataacttttataaaatatcgctgtaaccaattacaaggtgacatgtttctagaagtgctaaacgccactgtgattgcctaataataatactgattatataattatatgagcattgctattaggcactagtgatgcctaataccttctagacgtatcgtcttgcgattggctagcaatattttctaaaaattattacatttaaactgtataagatctgatacttaattgcacgtgctagtcaccagtgggtatcttttaacatttcttataattatatagattcttaaattaagaaaagaagaagaagaaaaaaacaaaagaatatggtttaatttaattacctaaaatgatgggaatttgtttatgaggttttgggaaaggaaaagtggttcctttctttggaaaaatctcaatagctccatgaacagtagctcttaaccaatcactatgagcatgccaccataatgttccttcttcatttgaaaatattatcttttggttgaatgtttcacctggttgaattgggcattgtgttatgtattctggcccatctgaccatggatttcttggttgcttcactccatgcctatacatatataacattaattaacataataaataaccccattcatgattaattaagtatatatatttattattatttaattgatt

SEQ ID NO: 234195 - DNA, 1987 bp, Cannabis indica
gacaacaatctgagcaacaaaagcaaaaaccggagttccaggtaaagcatctatcagaatatgcaattttttgatagcttcattagttaattttttttttttgtagaagaattattttgaattctttttgtagttgtgtaactacttggcctcaattagccttgttaacaatgataataaaaaaaaaaaaaaaccctcttggtagctcaaatggcgatgcatgtgattattttgtaatataacgtattacacattacaaactttgatttcattaaataagcttttgagtcaaagtaaatgctaaagtcacaaattatgctcaactattttgggatatggcatgtcccctttgtaacagaatcagtggactcaaatatggtaaaacttttgattgtatatattgcaaaaataatgaactcaaagaagttcttaggtaattaaataactttgctcatttttcatagttttcaatttaaattatattttcactaatacttgggtcttacagatgctgaatagatgatgaacttgttgattcattagcctgacttatggcaactgtgtttggggaaattactgaatcattgctctcatgcaatgctacaacattaatgaatgccaaaatcaaggtttctgcactcaattcacaaatatcttttgaattctactttactgttttcacatctcaactacagtaaatgaattggttcaacaaagttatccaattattcctcgtttttattttctcccttttctgatgtaaaataaaataatctgcctcctatagtctttttcatcaacaaactcttactaataaattgaaatgttatgttataggcaagtaacaacatttctaaagaatattttgaactctatgacaacaaagagataataacaacttacatcaaggcagtaaaacaagattcaagtgaagaatggaaattcaacatcacttcattccttaatacaacttcaatctcaaatgaagaatcaatctctaatacttcaagttcccatcctatttaacaaaaacctactgctaataatcaaaagaagaaacatagagctacttatgaagattttgatggagatgaagagaaccacaaggcttctaatgaagatcagatacattagaaaggttgcaaccaactcttcttataaatagccttactctttcaaaagtttcaggactactaaagatagaatagatatgtaaataggccactgaatttactatcttgttgaaacacttgtaattggcttccacttttgaaagttccatcactactaaatagaatagatatgtaaataaataggccccaatttcagaacatgtaaacaacttatacttttaaaagttatgtgaaattgtatcactactaaagtgtagtaggaatggatatgtaagtaggccacaactttggaacacttgtaaataggcatacttttcaaggttatatcactactaaagatggaacaagtatgtaaataagccacaactttgaaaactactttcgtgctggaatataaaaaatttttgtcactttgaattattataacgtgaatgttctatatcctactatccacctccctagtatatataaatatataaagaaaaatagccttttcttaataatgggcttggacaattgtccctcttgcccataacttgagccgacactgatggtaactaggatctttccatatggacttctttgggactcattctacaaatggtagtgactttgtccatcatcattttacacaattcggcaatgaaccaatagagacccttctttatatcatgtcgtatatttggcatgaccgtaacaatgactatcatggatcttgcactattcttgatgaagttcttgtagagaaagctcttgcctaccttcaggaattccaccatcacactaacaaataaacggtttccaactgaaaagtcgagttttaatttgcaaatgccaataattatactaaattt

SEQ ID NO: 234196 - DNA, 845 bp, Cannabis indica
tttctgtaggcatgatgtggcaaatcaaggtttaaaaacttttaagcaacggaaggaagaacaaaggaaggaatcagaagctcgcggtgatactaaagcatggaacactttgttcatgcgccctgacgctgtatgttgaaataatatactatatgtgaactggttgaattttttttatccaccaaatttcaaagtgtttcttctgaaggtttttccgactcactcctgatgacaaatcattcatttctaattttcacttgtatattgatagattgcagagaatattgctaggaaatatggtgtgagaaagggtgatttacttgacattgaagcaaatgatcttcctgtacgtctcgcacttggagaaactcaagtgattaaagagacaaaagaggctcttaaaattgctggagtaaatgtagaatctttagaggactttgctgctgggagaactgatggcatgaaaagaagcaaccatgtttttctagttaagaatttgccatacggatcttctgatagtgaactggctacgatgtttggtaaatatgggagtttggacaaggtcattcttcctccaacgaagacgatagctttggtaagccatcatgtattgtggaacaattattagttgtccaccatcagttcacttaggtattcacctgattttgtggggctaaaaaagtggaattaacatacccatgctgtgtttataataagggataagcacatatttcttcaaaaacataaaaagaacaaaaaataaaatagaatccaagcggacacaagctggttaactttgtatatactggttaactacgagtttgcttaacttgtacttatttttt

SEQ ID NO: 234197 - DNA, 1034 bp, Cannabis indica
tgaaaaaggataatttctatatttttttgcttaattggttatttatattaaaatttgattattttatcttatttctaaatcttaggtcagaaattttatattttgattatttaaataatttctataaaatgatcttatttgaaatttaaaaatattatatattttaataaaataatctagataattttgaaaaactaactagattttatcaatttttcaaaaatttgttatttttaaattaaattataaaattagataaatgatatttatttatcaatttattttattagttatttaattttatattttataaataatatcaatttgaaaagttggttgataatttttgtaaaagatatttagagttgttataaatctgattttcaaattataggcttaattttaaattaattatttaataatttggaaattaaatatttttttttatttgaccattttttaaattaattaattaattaatttaaattaattaaatcctataaccaactatacaatattgttacatgtgtgttttatttattgtttattcaaactttttttaaaacctattattgtttgatctaaattgctacagttaacttgttgagagatccaatgatcttattttaaccatagtctaattgtcaataggtcaaataaataatttgtaacaggtgaattttttaatttgtttataaacctagtaatatgataggatctatccaaatcattgtgtttacttgagcctatatgtttgcttttaggtctagatgcatataaggagcccatttaatttcaataatcaaaatggactaggttgctaaaataaacttgtcactttgatagtttttatttaggcccaactagtattgggcttattcagttaataacaatgacttaattagggttaaattcctttcttttgggccttgtgtgagagttagggtgccattagtagtggatacgatatactgaatacaaccctttctcacatgaacaactccaactatgaaggcccatttgccttatttaaa

SEQ ID NO: 234198 - DNA, 1559 bp, Cannabis indica
accaaacggcacctaaattaataattatttttgaaattatgaaaaaaatatcgaataaaaaataattaaccttataaaatctacaaaaaaaaaaattatgtacgtttttattttttaaataatttttaattaaataacttaacaaatctattaatgtaattaaaaaaaaaagtataaatggcatcttaaactattaaagttaataaaaaatttaaaaaaataagagaattaataagagaagagacaaaactatttggagtgattttagaatgccatgtcacccgcctcatatatctcttttatagatatactagaaaacaactcgcgcttcgcaacagtcgtattaaatctcaactacattaataaaaaagtctaataaaaaacaataagtgagtattaataatttcaaccctagtatttgaagtaattttaaattgtcatgtcaccaccttatatttcaactatatatatcttatattgttggaatatctttgaccagaatctagatttgctaacaagtatgattttaacatcctaaatataaatttctaaaacgatgaaaataaatacgtaaaaggcatgagaaaccttacattggttgcatcggaattcaatgactcattctgctcagatctctaacccttgtatcctttctgtcgcagagtattaccaagatctgagcctgaaactccttcagttgtttggattcttcacagtcttacacactatgattgaggactcacttgctatgtgtgggcatatactcaatcactaaaggctcgaatttgatttgtgaagaaggctatagaattcgaaattagaagaagaaaggaagaagtctcataaacctagttgtcaaagagaaggaaactaggtttttaactttagaagcattagttggataatgagaccatatctttcattttatactaatttctcttagggttagggatgatttatttggaataaaaaaatgataaaaatggagcaaaaatagggacctagtggccgaccatgaagtgggtccagcactagttagtatttttttttctattttctcaactatttatctatttttcacaaataccactttttgcactttcaaccctataaatgccaaaactatttatttaataattaaaataattatcaaataaaattatcatttataatatttattaattagattccacaaagtctcttaattaataaattaaccctaaaatcctatttcttcacaatcaagccataacatagtgaaagtgaaaagtgaaaaagtactcataaccacctctagctttgacatgtagtggtccacaaatttttgaatgcactatggctagtggttccttggcacgctctccctttgcagagaaagaacaatttgtcattttgccttctaggcaagattcacaaactggtaatccacctaaggtgacatttttcaatggaccacctttggttaacttctgaagtctatcatgttgggattttatgccctaaataaaactcattccaatccaatctgatttgttatcaataaaagattagaagtcatt

SEQ ID NO: 234199 - DNA, 2313 bp, Cannabis indica
accatgtagaattaacaagtttacgccattcatactcttgtgcaaaaaattacaagataaatttgtataatattttctatttttaggaattatttaaataagtcgtagtaatagaaatttgttttaacaactgaaaattggtaatttcatatgaaagttggtgggaggatctaaataaatataatatcactactaaaaattgtacttttggtgttagatttaaattgaatcttataccaataatgtttgttcatagaacccacacctattccattaagacaaaatatcatagtgtttgtgtctgttgtaaactgacactaatgagttttggggatgttttacaatcgacacataaagtgtacatatatgtttttacctttggtgtcagttctaaactgacatttttagtgtacatatatgttattacctttggcgtcattttagattatgttttttttcgtgttgctttataatcgacactcaaaagtttttgggggtcttgcgtcaattttaaaataacacattgttattgatagtgagaaaattgcaattatttattaattttttttacttgtattataaattttagaatttatacaaattcaacatacgcagactttgtaaagtctgcataattgtattgtcattaaaaattttattatcaaaatataaataagatctcaactacttaatgttttgataagaaccagcccataatgagcaatcaaaaattatttaagatgggaataatttgagcatataacatttagtaagtgtagagattagtgaatcgaattgtttgttgtattccatagaatagtatatatttatatacaaagttaggagaaactactaaatacaagtcagcctaatttttttgcagctaatattctaacatttcccctcaagcttgattattacgaaataaaagttgataaatccatattacctcacacacagacacagactgggccatagctctatattctgattcagcactggatctagatacaacattttgtttcttactcttccaagagaccagattgcccccaacaaatacacaatatcctgaagtggatcgtctatctaccttggagcctgcccaatctgcatcagaaaaacactcaatctgggtatgtccatgatccttgtaaactatacctcgtcctggtgctccttttaagtaacataaaatttgttctaatgctgcccaatgatgaattgttggagaagacatgaactgactgataacactaactggaaatgcaatatctggacgagtcacagttaaataattcaactttccaactaacctgcgatatttctcaggatcttcaaatggtttcccatcacgtgtaagatgcacagctggattcattggagcattgcaaggttttgatcccaatttccctgtctcagttagcaaatcaagtacatactttctttgagacagaaaaataccttgtttactccgagtaacttcaatccccaagaaatacttgagttcccctaaatctttcgtgttaaactgggtgtgaatgaaagacttaagggatgagatgccttcagtatcatttccagtaataacgatgtcatcaacatacaccactaacaaaatgataccaacagttgatcttttataaaacacagaatgatctgacttacttttcaacaaaccaaacttctcaacagcctgactaaatttaccaaaccaagcacgagggctttgtttcaatccatataaagatttgcgaagatgacaaactcgccctaactccccctgagcaacaaacccaggaggttgctccatatatacttcttcctcaagatctccatgaagaaaagcatttttaatatcaagctgatgcaaaggccaatgatgagtagctgccatggaaatgaacagtcgaacagatgtgagtttagcaacaggagaaaaagtatcacaatagtccactccataggtttgagcataacccttggcaacaagacgggcctttaagcgagcaactgtgccgtctggattgaatttaaccgtgaacacccatttacacccgatggcctgttttccggaaggtaaatcaaccaagacccaagtaccattcgcaaccaaagcattcatctcttctatcattgcagcaagccaaccaggatgagacatcgcttctcgaacagttttaggaatagtgatagaatcaagagaagcaataaaagaacaagaagaagaggagagatgattataagacacaaaagaagtaataggaaaagtacattgacgtttacctttacgtagtgcaatgggaagatcat

SEQ ID NO: 234200 - DNA, 1297 bp, Cannabis indica
tttcgttttaagaactcgatttcgataaaaaatgagagagatatggtggtttgaagttttgggtccattgagcgcatcaatgttgagcaccatgcgcgcataacacttggacaaggtgatctgcgcgcgcatgtgctaggacagatgctgtctgaactcccttgcacgcacgccttcagacacgatgcatcacgcattcgcccgccaacaccctatagctgaccgagaaatctcagtcaaggaggttgtaatcctcctggttcgcgcgcgcttaaggctgcgtgcaacctatctcctgtgtaacaccctaactagcataggcatgttagcgtgatttttaacgtactatgcaactcgttgctaatcaacgaggttattggaaaaacgtgaataattaaaattttgcttatttaattaaaatataacatataactttgataaacttccgggatcccgtttacaaaatactgttacaaaagtttgctacataattacaaaatacttggcgcctagcgacaaaacaacaaaagccctggtgtcctgaggatcgtacgctccaagcctaaccgccccgacatgtacaatcttcaactgcacgctctcacggctcctcaactttaactttgcccttacctacacatagcaatagcactgtgagtcaacagactcagtaagaaaagcataacataataaacatactaatatcccgggttataatcaggccctcatacacctaaccataaccctaactgattcagaatcgatcttgacaaagtatgactaaccgcgaatccagcctatactcagtactctaatcgcactgatgtggtagcagttagtccatactatctgatagcctagtatatctgatagcatctcggtgcaactctatgtacaccttactgttgtcctgatacgctactatgatggctatagatttgcctaacatatatctgatatgttattctgacggcaactaacatgtacgctaaacatggataaacatatgcatgagattatactaatcttactttgattccgaattcaagtgtgccggccaacctgagtggaacaactgctcgtcgaattatatgctcctaaatcacattaatcaaaacataggtgagtgacacgctaaatcactttccggggtcttaaacttgaaactaaaagttttcctatcgataaataacatggaaataccccaaatatctcaaaaaagggaaaaactagggttcccaaaactcccccaaccggtagatcggttccccaagcagaattccagttctgtggggtt

SEQ ID NO: 234201 - DNA, 1190 bp, Cannabis indica
aatatacccacttttttgagtggattgtctaatataccctcactctctacttaagtctagcatataatttacataatctaaggggtcttatgggaacatcatctatgaaagtgagtatatctaaaaaactatgaaaatagaggtaaaaattaaaataagtaaagtaaagtgagtatccaatgtaatttcctcatcttaaaaggggtagactctcgggccaaggtcgtgttgtgactattgggtctggactaaggaacccaatagtcgattttccaataagtcgacgtatttagtccaagctcttcaaagagtccctccgtgtgatctcctttttttttggaataggctatgggatagtagaattcttgaacgtcataagatgctttggtggagtgtcatttctaatgctttcctcgtttgttcagtgttgagcaagagaatgtgtatcaatgacactcaatgccatgtctgcagtggtgatgaaaaattaatggaacatctctttatacactgcaatttagcatatcatctatggcaatcatcccgtgggatattttttctgcttatgaaaatgatatttggatgtgggactgggtgaaatttatttgggatctgagcaaaagaggaatcaaagttgaggtggttttcttgtatgcttccattgttgtggacaccgtttggagacctcgaaatgatcagatacacaataataatttgggtacattaaatattatattaactctattacttactattatgcatatcaatctacttctattttagtggaggcgtggtctcctccccctcaagattaggtcaaattaaattgtaatgttagagtagggatgaaagacatgaaaccatttcggtgtggtggtttgggcaacttctacgagattgtgttttcctaacctactttgtggcgagactacgatttgtttcttagctctaaatacaacgacaaagaaagtttacaagtttgtaattgtaaaaatcaattctagtgtggtcaccaacactctcgaaagagtgagctcttgatgagaaattgattattatactagtcattgtgaacgactttcttcctcttttgtctgttgtttgttttctaatattgcatggacttatagttaggggtgtgcagaaagtcatccaatctaatttcaaccgaccgatccaatcccaaccga

SEQ ID NO: 234202 - DNA, 744 bp, Cannabis indica
acttgtgagatgaatttctaacccttaacatgaaaggatgatgttttatttataggctaaagtcaggtttatgggtaaaccagacccactagggttttcttgtgttaactaagcccactaatggggtaaaatacaatattatagtgactttgggctagttaagtgagacctagtttgtgagataacggtcatccgtacggggggaccacttgacaatgacaagtggcatgcgtcgccaattgtgcacagtacccatcagtgaagaaggagttggacaaaatgcatgtcccttttggtgcggtacgcatttcccaggcctaacattggggacaaactcccaattttgtgggatttgatgttagaaaggtgccacataggatgatatctggatggctcttcaattgccctttccagattaccccaaatatggtctgactttattatgtttataaattggtgtttgaatccgaaactgtgacccgactctattgtgggctgacccactagcttgattgggcctaagaatgggtttgtcttggttaatattaagcttcaaaagtactcgtgacacttatttggaaacacgaattacaatgtctattttttttgaatgaaagaagaaatttccattaataaggcacaaagccaaagtagtccaagggcaatacaaacaaaaaatcaaatttgaagacacgggggaagacccgaccacctaactagagaaacatcgaaggataacaccaa

SEQ ID NO: 234203 - DNA, 1604 bp, Cannabis indica
ggtataacatatgcatatataataagcaataagtaataatttaaacgctacacaagccactaggggtgtttgtggtgcaagtggtgcggtttttgactatttttcaaatcaaaccatacatgcggttttttaattttccaatccgcacctgctgtgcaaaagtaaaaaactgcagaaaccgcacggcaaaaaatggtgcggtgcggtgcgatttctgtggtttgaactaccacaaaataattaaactattacaaatacaataaaacttaagcaacacttgtcaaaaataccataaggcttgaaaataaatatgaaaaaaatttcaagtttcaataatacaataattagtgggctttgggctgggccttcacatatgaacctaaataaatataaaaattagtatttttataatgtgttgcggtacggtttgaaccgcatattaacaactcaaaaccgcaaaccgcacctcgtaatttagaaaaaattcaaaccgatatcgcactggaaagaattttaaactacatttttttgcggtgctagcggtttatgcagtttgatgaacaaccctacaagccacataaaatactttcatttcgtatatagagacctgtaactaatcaattatagcataatcaatatttacttttgagattttatattggaatcataaatcataaaaagtattagacaaattccattaaaaaccttaaatataagtttagctcataattgtcattctagacaattgcataaaactaattgaaaacatagaagaaaagttagaagaaaaaactacgttgaaaatcaatggtggtagtctccaaggttgctctttctctcaaaattcgtgcccccaaaagtctctcacctttcccttttttgaattaggtttatttaacctaatcatgtcgaaaatctctatgatggtcgcggcatgggtggggatccaagtttgggtttgagtttgggaccgaaatcatggttcgagtccaaggttcaagtttgggaccgagatcgtggtctgagtccaaggtccaggtttgagtccaagttcagagttcagggtccgagttcggggtcggggctggggtttgggactgagtccagatcagggccaagatccgggtccacttcaaggtccggggctgggtctagggctggggtgtgggaccaagttcagggccaggttcccagtttgagtctgaggtcgcggtctaggtctggggtccatccaggtctagagttggggtcggggtctggggtttgggtcagggccgggaacggggttagtttgaggtcaggctctaggtttggggtctgggtctaggtttggggtcagggtatggggttagggtcggacttcgaggttcgacttcggggtctgggtctgagtccagagctggggcctgggtttgggtttgggtccgagtttggggctggggtcggggctggggtcggggctggagtttaagttcgggttcggggttcgagttcgagtttttgttcaggctaggatccgagaacaggtcggggtctaggaccaagtttaagcctaggtttgaggtctaagtctggggtcaggtttaggtccaggactggggtcc

SEQ ID NO: 234204 - DNA, 904 bp, Cannabis indica
attaaattaataattaagtatatctatcatatataagaaaagtagagataaatagattacaatatcgggttacgggttataatctgaacaaaaaaaaaacttattaacaaaacccgaacccgaaacccgtttgaagtcttttcgggttgaacccgacccgactacacgggtttttaggggatcagattttttgacagcgggtcggggcgggtggtcgagtttttcgagtttgtgggtctaaatgtgcatccctattagccgcaaatttctctaataataataaatacaatatttaatgcattgatttctttcaaattaaaaggacaaataagctattgccaaatatggtagaataaattaatttgataattattttttaaccctcttatttatttatttatttttgacatatttacgatgctgacattcgcaatcgatgcaagaacctcttcgaaccagaatagcttattatctaatcaaagggcatgctttgccaacccatgagttgctgaaataatcgggctacatgggacaaaattgtctcgaaattcagacaataaaactttaacgacctcaaacaacacaccataagagttatatttttaccctgtaatactaaaatactagaaatatctcaaaacaaacaccataaaataaattgtagtaaaatggttatctacaaacaaaataatatttcaataaaatattaaaatttcagtctctatattcaattaagttaaaaaaactaatgaaaaacaaaacttaaaaataactagccaaagatgtaatcctgctagtagcaacatactaatataaaaatcagaggtcaaaatataattaataactcttatataatcaataaattcttctaatcttatttaagtatgagaattaaaattaacct

SEQ ID NO: 234205 - DNA, 899 bp, Cannabis indica
tagattcccaagcttgaaaaaaaataaactgcataaatcctaaattaaaatttgaaccaagacatattcgtcgcggtctatctatggatggagtaaatctacatatatctctaagtagtagtcataattcatggcatgtcttccttgttatgtataattttcctccatggttagtgatgaaaataatatttagtatgttttctttaatgatatcatgcccacaataacatggacataatattgatgtatatttggaaccattgattgacgatttaataaaattgtatgaaaatagtatttaggcctatgatggttttaaaaaagaattaattcttcaatctaaaagtagtgttattatggaatgttagatttttagctacagtaatttattaggcttaagcataaaaaattacgaaggttgtctaattcgtagcattaacatatgggctcgtcgcttgccaaatggataaaaaatgtgttatattagtcatagacagtacttgcctaaggatcatcctaatagagacaagaataatgcatttgatggtactgaagagggagatatgactcctttgccactgtcagggtgaatgattatatttgcctcttgcttgttgaaatggatatccgacaatctctggcacctgaaaagaaaggtgaatgattatatttacctcttgcttgtttcactttgtccaaaaaagaaaataaatggtttgcgaatcattttcaaatatgaaagtacatgatgatactcgtctaacattaaaaacttggcatataaggatgaattaaaattaatgggtatgaaatcacaagattgtcatgcgttaatgcaacatctgcttccaatttccattagaccagtctcgccaaaaaaaggttcgagagtgtttgac

SEQ ID NO: 234206 - DNA, 964 bp, Cannabis indica
tggatggttttttgcaagtaaattgatagttgagggagttttaccgcaaattactctattggatataatattcaatgacataaaataagtatttttcaggtcataaaaaaaaagtttatgtccaacattactcggcgtgcgacacataatagagtggtttttttagattgaattagcacacattttttaatttttttttaaaaaaaaattaatatgaaatataaatattttaaaattttaaaatttatatatatattaatattaattacattaataaaaataatataattttaaatttaaatataatatttaattgtaattattcaaaatcagacattataacaagttaacaacaaaaaatacacatttcttattttcacaaacttgttaatgttgggttgtatgacctaaaagaaacctaatgtaattcaatttaatgttaactcaataaagatcaaaaatcacactttgacttaatcaaatgcttggttcatgtatttatttacatgattatatgtttaataaatagattctattaaatttagagtatatagttattcacagttattgtgatgtcatcacattgaaaaataattataagtatatgtttcaaatatttaaaagtcctgagatttatcagtgcattaatggacttataatgacgtgataatcagcgatgtgatttacttactctatgacaagtggtatgtctttttcaagatattggtaaagtagaattgtatcgaatgtattagtttgcattggacttgaccgatattaaaaagataacagatattataatattactgttatatctattctcagtcaatatcactaattagttgatcatagatcaatttaagctgaaacctgacatgattaagctttaagctaattattttatttgagttttttgactaatgttatatatttatataatataatatttaaattaaataattaa

SEQ ID NO: 234207 - DNA, 2558 bp, Cannabis indica
cgttaaataatagcagtagtgatgccgatatgataaagaatatatatatttataagaaaatgatgatgatcaccggaggatattgatgtttaaaacttgtacgtagtaattatgatggctaccttggctcttagagaaataagtgattggctatagaagaatggaaaagatcgaaggaagacaaaagtttatataaaggtttgaggtggtttcagtctaagtataaacaaagtctatagagtattttcttgagagtgttggcttaggaaaaatgaaatgagctaggctctatttatagagctcacactaaccataccaacccctccaatagactaagaatctaattaaaatttaataaattttgaattaattacaagcaatactcaatcaaaccgtaactccctcctaatacctcccttcacaatcggtacacaccttgaccaagaatgcagctctcatctcatctagtattttaaatttttaaatttattacacgtcatgagtaaatacaatactaatacactatatcttttgatatatgtatgtacacatatacatatttctaaaccactcaggcatgaaagaaggaactatatggatcaagaagaataattccaagtccatgtgatagtcttgatttaacaactttaatatttttagctccatttatttctgaacggtgagcttatgtgtcctctcaacaaaataattaagactatttccaagccttgttataagctcctaactctagtactattcccatttgtataataacacttcaaattaagacttatataaaaagttatacccaatatacacttactaatacatatacacaacatatatatatggttaaatatacgaattaaattgacataaattagtcgtgttaaaaacaagtgcatgtatatatttatataatatgttttttatatatacatgagaaaaatgtgattttgatttggtaattcaaatgataaatgataaatgatatgcatgcatattgatataattgattaactttctctgatgttgccaatacaatacacaacatgctcctcattgtgagctttaatgtaccctatataacagtacaaaaggaataataatatataaatatatacatatattaaaaataaaaataacttttcactacccatacacagacacatggacacacaaccatgtataaattataatatataatatctaaacactgtttgttatattaatattattccttgcttatattttataccatagagaccattccaaagggaacatctatataggatataaaattgttcttcatttgtacttgcatttccttttatgggaattcttttatgtttaattaaattgagtttggagaacaataggaggaggaggccctaaaaaggaggacaaattccaaattcatatgcaaaaagaatcataagatcatcaatatatatatatgaccattatttattttaattttatttaaattaattaatttttttgaccattgaaaatagctaacattggccaaaatagcataagataagtactgagaaatgaccacggaatgttattccctagcttgatgggaaaataaagcattttttttttggtggggtatgaacatatgtatgtatgtatatatatagtttgaaactataatataatatatataatatgatatgtttatttataaataaaagaaaaaggaaagaaagaaaagagagagagagaggttgagattctatttatttgggaatatgagaatgtggaatcttaactcaaagtaaagccaatgagtcatattctgaagtcaagaataaatatatatgggttattcttctcttctcaatgccacaaaaaatgggttccaagttcccactatatataatatcactttcttttttttagctctctctttagttaatttggttagatgctctctcttcaacatgtaatcatcatatatactcttcctttgttctttattattaagtgtgtgtacaaatatatatcctataattttcttagaatattatttgtcactgtttgagattgtacttttcagttatttcatatatatatataaataaaaacataaatatatatatatatataaatattatgatcaagatgtaaactatatatatatgtaagtataacttgagagtatgaggagagtactatatattttaacacttattaattaccataactcataatattctttggaaaattgctaaaatttactattggtgcccaacacattttcggtgtcatatcacttttgatgtaaagtgtcgagtcccatataacttaagaaaataacttttaaggagtatcgctaaccattcgtgaggtgctcttctctaccaattgagggcatatttatatgcgataagtgctaacattataataacattactttttttttcaaaaaagaaaaataatacttctaatttactaatataagagaattaccaacaactttttagtgacaatataaaataaaagggtaaataacgacataggtacctaaaatttcaagtttgtaagtg

SEQ ID NO: 234208 - DNA, 1047 bp, Cannabis indica
cctgtttcttgcttcactcacgtagatgccttgaagcgccaacccatgctgtatctcatcaggtcttccacttgtatttcttcatcttccttatgtaaagcacatagcaataataatgatttggcttcctcctcatgacttccaagaaaatcgtaactcaacttaatgctggagtagactttatcattcacatctgaactctttagtcgtcgtaatgcatccttccatatggcctcctcctttttgtatttcaaagcatgcgccactgttgcaatggcaattggcaagcctccacattcattaacaatctcaagtgccaaagcattaatgtaatctgttttagtgtctccaatgatttttatgaacaaattgatggcttcactcgactctaaagcaccaattaagaacacattactctccgccacacccatgaagttgcgtaaaacttgttgatctctagaggttattagcatcctgcactcttcgtggattccaatagcttctagatcaagttcattccaaatatcgtcaaggattaatagaatcttgctttcgtcttgcttcaatcgcattcgaagaagttctgctctcttgcccgtactgtctttctcttccaacttcaaaccaagcttttcggcaatatgttgttgaatctcttttatatttggtgtttgagaaacagttgtcatgaccaccttactaaacaacttctcttcctgagctagtctagcaatttctttggcaagcatagtcttgccaattccacccattccatgcaaccctatcctctctattaccatctctcacagctgccaatatgctcttcagaatttctccccttgaatcaaaactctcgtaccctttcgctggtgttgcagaggaaccttctggcggacgaggataggatattggcatggaatcaaattctttattcttcaagaccactgcacgtacattgactgacatcttgtttgctttcctactgagtcggtgtcgcgtcaccaaatgatgacggggtatccacaagagcacaaggcctttgcatga

SEQ ID NO: 234209 - DNA, 662 bp, Cannabis indica
agtgttgccaaaagtattggtttaagacaacacttaagaaagtgttaccttatgtcattactttaaaaacacatgttgtaacatttccaataaaagtgttgccatatatatttttgtatttataagttttaattttttaaaaaataattaattattatttcttattaatttttattattattattattatttcaaattcagtttatttttgtcaaaattagaaagtaaattgaaagcttttatttttattaaaatgcaagtttacaaccattttacagtaccaaagaaattcttcataaaaaaaaattgtacactaatatcaatgatattcttagtctagtgaatacatagcaccaatacaaaaattattttgccacaactctagttttcgaaagccttctattccacgttcaaggcgctagaagctattcaactcattccctgtgctaaaacaccaaagttctccattaatccatgatgtgtatatatatgtttgtggaagaaacactacaagaaaaaaaaaattagtataagctatcaaatgataatttctttatatgcatgtaactgattcaaatatatgcatatattaatttagtatcaatataccatctaatctaatatatttattacctcatttagtcgttgttcaaaaacatcaa

SEQ ID NO: 234210 - DNA, 2988 bp, Cannabis indica
aatttgattttaacatttgttaggtacaatttacattattaactattaaagttccttttttttttttttttttgaaatggctataatgttcgaaatttaaaataaaagtaatctaccttttaaattaaaacggagaatgattagaatttaatacaatcaaaaaaaattaaatttaacattttaattatactttatttcaaaaataaaagaaaataataacttgactaattgactttgattaataattgtttatagggatattggcggctaaaccacctcaactttactatttgtaacacttaaccacaaaaatcgaaattttggcggctaaactacctaaactctagttccgttttgctctgcacacctccgtccaaaaatcacagttaagtgccacggtggactgtccacgtgtacacacttgtacacgtggcaagtttttagtggtccacgtaatattaatttttaaaaaattataaatattaaaaaaattaaaaatcagaaaaaattattttttttactttttataatttaaaaaattaaaaattaattttattttttttctttttcttcttctttcttcttctctttcttctcgaaccagtacccattcttcttcttccttctcccattccttcttcttcttctttttttccctttcttttcccaaaaattattcagatcatctctctctccctctccttattcactatcaaaatcatattgagtctagtttagatttaggtggtttacaacacaaatgaacaagtttaataatcgttaacatatttccttaaccgagtattatcgaaatgcaaacccaattgagggtgaatgattgcatataagttgcaacattataaacaatgatgagtaatttcacattcaattgtcgttcactgtcaaaaacaagaaaagaaaaaggccctgaaatgttgctgatccagctttgcatgctttgctttgcagttagcagctatcaccatctcaatttgtactactctacactacactacactacaggctttaaccccaccacaccacactattcagtattcaccaaaagatgaaaaagaaaagaacaaaaatcatgatatacttactgataactacattacaataacaccaatagactttacataaaggaatcaataataaatatctatctgaagattttatctttgatcatgccaacaccattgttaagagtcctaaaacaagtacactcctaaacaagttcaacacaattcaaaaaggcatgtagttttttgatgaaaatttccctcactaattcataaaacactaccttaagaaattcaacacattggtagtcagcttagatgcattcaaaatcaattgctagtaacaaaatttgattattttcctttccattacctctaaccaaacacaacttaagattcttaaagtgcctctaagacaattcaaaatcaagcatttttcataaggggacaagtagtttttttaatgaaaatttcctaaagaaaattcaacaaattggtagtcaacttagatgtatttcaaaatcaattgctagctgctaataagttaaagattaaatcccaaatcatgcaatttcaaaactaaacaagtatttgtttttaatgaaaatgttaactcattattcaaagttgtaaacaacaaaaagatcatcatcatcatcatcattatcaccaacaactatgctctacttccttttaaccattacattattgaacaaaattacaagattcccatattatataaacacaaaacaaaaaacaaaaaagcaagagagaatcttttccatttcccattttccattttagcaacaaaaaaaaaaactcattgaggaatttcatcatataccttactaccattaacctaaacaaaaaaagacaaagaagaagaagaagaagaaatatacttagcttattaaaccagaaccgtttcgattgatcagagagtattctcagctacaaattggacaaagcaccaaaccattctcattacaatctgggcatttcacaactacagagctagaagaagaagaagaagaagaagaagaagaaaacccctgtttttgaccacccatttcttctttaacctccataaccactttacaactcccattacagtgaaaacatggcaaaaatctcacatttccacaaccttcacaaacctccccacctcttctcttcggtaacccttcaaaaagttccaacaacaaaccctcttcagcaattctcaaaatctcttcaactccacccacatacctccctttcacaaaaatttggggaagaacaacaaccctactttcttcttctttcatcaaatccctaagctcatctctaaacccacgatccatcgaaacatctcgctccgagattataactccggtggcctcaatcgcagccctcaccgcattacaagcctcgaaggttttcctaactccacgcagcgttgtcgtgtaaatgaccactttgccctcgccgttcggcggacaaaccttcccgtaccgatcgagaagattcctcttcttctccgccgcggcagtttcttcgaatcgcgctttcagagtaacggatccgtttacccggtttaaccgggtcgggttcgggtttgagttttccttattggagaatcggaaactgtcggcgtcgagaccagccatgagttcccaggagttgattacttccgggtcggtccgcattgggctcgggtcggcccagagtgatttgggctctggcggaagtgggctggggtgggttgtggaacccattttgaaacggagtggtggggtggtcggagtagaggaatgatgacgtggcggtggttgttgtggtgggtccagagtgagaagccgtaagttgaggaagtgagtgagacgatgtggtgactgagtgcagagcttccgagttgagtgaactcgtcttcatggtttaacagattcgaagaaacacaacccattttttcgatttttgaaactct

SEQ ID NO: 234211 - DNA, 976 bp, Cannabis indica
ttgaaaattttataattaaagtaaaagtcgttaaagctctagaaattttggtagaggggtacgtggtcaatatcaacaatgcacctaggaattcttaggtaggtgtacaaaaaaattatattctaccaaaattaagattaaaggatatgtcaaactacatgctcataggctattacatatttttcaagtattttaaggttaaaagcttgttacgtaccaaagtcttcgagctaagaatcaaattattaaaaggttgtcaagagtggattggaagtgtttgtttaatctggttgtttttggtgaagtaactggaaataaaacttgttcattttaaattatttgaactctcaaagtatcattataaagaataaaaaaattattttacttctggaattttaatttttatgcatatattaattgaaaaatgaaaaactaggccaatattaatacatattgatgggtatacattatgtttgagtattcaaaatgctcctgtatacactcctcacccttttagccgtcccttctcttcctctattcactctcttctatcaaaaccttattttctcccattctctctaaccaatttacacttaaattttatttttagtatacaattgatctcttcaagctactacaaagtactaaaagttttttgtttgttattgcttcttataattagtttagaatgttgtttcatgattgatttgtggattgttgctgttttttcatattttgtgttgaaatggttgttgtctggtttttgctatttttttcgtctagtccaatggggctcgatgctagtccgatggggttcttagatctaaggacagggatgatgacccgatgctagtccaatggtcaacttggacctaaaggcagggctcgatgctagtccgattgtcattgtggacctagggacagggataatgggcccgatagtagctcgatggggtccgatgcttgatagatttat

SEQ ID NO: 234212 - DNA, 1148 bp, Cannabis indica
agccttcaatacgctaaagcacgctcgatgacatttctcaaagactaatctcgatgattgaacaactccctttttcttgaaggactacaatctgcatattgattcaaatggtatattttttcttaatatggggaaagaaaaccaggcatgtttgtgtatcccgaatcaaataaataatatttagtcaaaaattgactaccaaatggctggagagaatgactttagctccattctgagtcaaatactatttagaatattttaagagcaattataagtggttaatcctcatgaagtttacattcatcacacttaatcaaaatctatgttacatgctaaagtgaactaaataacctacattcttcacagtaatactagcaagcgtcataaatttgtaaataatttgcatcaaaattgacaaacaatatacagtatcaaaatactatccaatcattttcacaagtaaatcaaacataaaaatattgttttcaaatcaaaaagactgtattcaggttggtccaataaggttctgttttaaattttaagcttactaccaccaaccaccctgaatttctagaagaaaaagaacaaaacagaacatcttgaaaccaatattaacttactaatcaaattttgattctcatggttggtcactaaagaaatcttgtattatatgattcttagttctctcaccacatttccaattcattgagctcactgaaccagtcaaaccacacccagcacaacttataattgttctttaaatcaaagttggcaccttctattagtctcaccaagacagttaagaagaacaatactcaaatcaagtcattcacttaaaaagagtctccactgtgagctaaatttctcaggcaataaatctcaccaggaagttgattttaccataaaatatagtttaattatacatttcttaagcaagaaagattacacaacaacataaggacttattacaatgggatataccaatcaatcttgtattgtatatgcctcagttctcaccacattttcagttgatagagctcaaccagtcaaatcacacaacaaacttttacaaacaaattaacaaaccagctcattttataacaatgacagaattggaatctagtgggaaaacaacagtcattgtaatg

SEQ ID NO: 234213 - DNA, 652 bp, Cannabis indica
gcatttattttttgtattttacatttttcataaatagttctaaactatctttagcatgtaataatcctatgtgatgaaatccacacataactatatttcctaaaatttctcgaccctttgaatcgatcaataatggacgcataataaaatgtctgcacggtagaaacataagcaatttacttaccacagatgtatcctatataataataccatatcaactttttaaatcaactacataaatagaacaacgtcactgtgcatctttatttacatacataaataatttacatttggattatttgctacaataatactaaatttaggtaaataatagcataataaatactcaaagttttaaatttgtaagtgacatagacttaatgtttatttttagccgtataagtatccaatgtttataaaattataattttttttttaatttcgtcaatatagactttgttattgtcttaaacaagatacatataaaacttaaattctagatcattaggtctagacataaacatgtagtattagttacttcgaaattttcttttaataaattcaaaacggagtcgtattgacgaactggaggaaacactacaaaaaacttgagttttagtcacgacaagaattgtgactaaaagtaaaaaat

SEQ ID NO: 234214 - DNA, 783 bp, Cannabis indica
atatgtatagtgagtttccatgcatgttatgtgatccgatcaatgatgtaaaacatcacgctctcgtgaaattgagtcaacttgatcatatacaatttctttttttattattgaagttgattcttgtttttaagtttataaaatgttagtagagaaaaaagaaaaaaaaaaaaggtattataatatgtttaagtgtcatgttcattgcactgtcccaaaaggcactacatatgaccttttctttaaattattaatattatgttatgtaatgcatgactattaaatcactttttcttttcatttgaaaatgagtatattaacttttgtatataataagtaataaaaatgtaaccatttgttcaatccgtaccttcacctaacaaaaccacatctaattatatgtgctctttgtgggtctatgccataaagtactttacaataaaagtccaaaaaaaaaaatacattatactttaagccattagcaaaatattaggcaaaaaagctcaaacatcatttttttaaacaaataacttaaataataaaaattgtctcaaaaaaaacaaatcaataaaagtttaatcaattttaagcaaattgctcataattatatattaaatttttaaatttaaaattaaaatttatataattgaagacaattaatcataatttttttcattgattttatttgaagttgacctaattaaatatgtaacattttattacaaaaacaaactttttaaaatcaattgtttttgcaccatttttttttttttgatgattttc

SEQ ID NO: 234215 - DNA, 1341 bp, Cannabis indica
acactctcatggcagaatcttgaaccagttgactgaactatttggacaggcatcaattcaagctcgttttgaagcgacaaagaatttcatcaatacacggatgaaacctcatcagaacgtgcgtgatcaccttctccaaatggcgagttacttccaagaagctcagaatcatggagttgttatggatcagaccactcaagtgagtctgatcttgaacagtttgactccagcctttctaccttatacttcaaattctgtcatgaacaagttggaacttgactttcacgagttagtaaacaaccttcagacatttgaaaatttgattggaggaccacagaaaggaggatctaaaacttctaattctggaaatgctaatggggcggctaaggctgaggcaaactttgcctctacttccaaacccaagaacaagaagaagtggaagaatagcaagaagcctgttcaagctgtgaaaacagttaaaaagaaaaaggctgctactcctggtgataagccaaaaggaaaatgcttctattgcaatgaaaagggccactggaaatcccaatgccctaagtttctagcaaagaaacaaggtatttctttctatgctataaactcatgtgttttagagaattattatccacttggattattaattctggacctactaaccatgtttatttttcttcttatttcagctccagctgcttgaactcggatgctatcctagcgagttgaatcggatggttggacagatgggtggagatagtccaagattgaagatgaagctcggaatcttctacttttttttttaattttgaattaattgttttattttcagaataatttggatttcaattattggtttgggattttactccctatttttcatattattgcagacaattcatttttttgagaatattattttaataaaatttctcttttgctaatgaattgcatttatgaattgagctttgtttactttatcttgagtatgccaatatcaattatatttaatgtttataatgtttatacgtgtatgtattttattgttgatacaaattctatggtatattaaactctgcaaagatttaatactacataaacacttagaatttcaattctatgtttatgaataattgttaattctaaaacaattattaagaattaatttaataaaaagatcttttgatctgataggggtggaaaaagttaagaataatatgcagtttgacgattttttatatctattgaactctggattacattcataactccacatgatctctatatcacttagggattgacctgttgggttttatgccctaaataaaactcttt

SEQ ID NO: 234216 - DNA, 1597 bp, Cannabis indica
gaggcgtttgcatgagcttggacgcactacatcttttgatgacttggtctcgtcaatatatcgagtaagtatctttttaaagcttctttcttattgaagtttttatttgttctaatgtttgtttgttcttgacaggctcttttcgatgtgatttttattcatcaagatcgcaaatagcttgacaaggagaacatcacccttaaaaagtccaacaaagcgcttcaagaggaaaacaagagagttgctaaaagcttaacactttacagaagaggattgaagagactgataaagagcttgtaactgaaaaggagaaattagttggtttgtatgctcagttagatgacattgcatttaaagctatgtgtaaatctcgcctagagttgttcacaaattttaaaaaaggtaagtctaatacatggaaggtacatgaggagttagaagtttacaggaaaatgtttatggatgaggttaccttggtgacgaggaatctacaactcccgagttcaacactagtgttctcgaggctaaagaggatggcaatcaggttgcccagttttataaaggtaccactgaagtttcggttgattttgaggtggctcattagtatgttatttctctttattgtatgttcattttattcgagcgatgtattttcttatttatgatgagaaccttgttttttttttttttgaatttcattttatgtgtaatgctctatgttgagctcttttgatgtgggtttatgctttgtgaattgagccttattgatgtaggagtttgctctatgtattgagcttccttgatgtgtgttagacctctttgatgcacaattttattctatgtgttgagcttttagatgtgtattgttgtttattgatgtaggattatgaatatcattggtttattttcatcggatgggatgttttattcagatggaggatttaattcttcccttgacttttgcatctataagatagtcatgtagcgtgaatctttgctacaaacagggcctgtactaattaagattcttgtatctgtcttagaattatcacgtaacaaagagtgtcactctaggactttctatccatattgagattcacgcgtctttcatagaattcaggcatccgtcctagaattgtcacgttggaaagagtgccacttatacactttccatccatattaggattcatgcatccttcttaggatcttggtatctgtcctagaattatcatataacaaagagtgccactttaggactcttcatccataatggaattcatgtatcctttttaggatcctagtatccatcctagaattgtcatggagcaaagagtgtcactctaagactctccatccgtaatgagatttatgcatccttcataggattgaagcatccatcctatagttgttatgtagcaaaaagtgccactctaggactttccatccataatgagattcatgcatcctttttaggatcctagtatctgtcctagagttgtcacgtagcaaagagtgtcactctaggactctccatttgtcttggattttgtgcatccgtgttaagattttgagctgttggtcaatcattttcctttat

SEQ ID NO: 234217 - DNA, 601 bp, Cannabis indica
tctaatggggaaggagagaataaaaaactctagtgtttcttggggaccactacctatttatagactcattatataatgagttttgagtatttataattcagcccttcaacaaattatacattaacttaaggtatctacacattatttctatgacaatctaatacccttttgatacccataacataattattcacttaattttatatcacactttagaatagcatatacattatacatatgtgcccaaataggattttatatcacgcttgccttggagtacataatcaaagggaagatattcattcattcgagaatacatataatcacacatggcaattataatattccgataagactaatggtaaataattagggtttatatttatattatgggttaatcaggtaataagtgggattacggtcctactaatttattttaacataaaatttaaattttgcaataagtgagtaaataagcttaatttgttaattacggaagtttatatagtatgtgtgaatataatatgagttatttgtgaaataaaaatattttcatgttcggcgatcatggagacccaatttgaggccaaaaatgtcacaa

SEQ ID NO: 234218 - DNA, 1827 bp, Cannabis indica
tttgaatggatggaggaatgcaaaaaatcctttcaagagctgaaaatgcaacttctaaaacctcatgtactctcaaaatctctggacggagaagaattagggatatgcttggctatcacggaacatgtagtaagtgtcatattgatcagagaagagaacaatatccaacacctggtctattacatcagcaaaagactcattgaagctgaaggcaggtacccattgatagaaaagctcacctattgcctaatcctagcaacaagaaagctaaggccctactttcacactcatcctgttcgggtatacactgaccaaccatcacgtcaagtgttgcgaaaatcggacgcttctcgacagttactcaaatgggcagtagagttggcccagtataaaatcatctttcagcctcgaacaacgattaaaggacaggccttagcaaatttcgtggttaaatgtacgggtaaagtggagagcacttcagaaaacaacccagagccagtacagaattcttagctgagcaacagtaaaggcgaacccatttggaaactgcatgtggacgggtcagctacagatcaactgtccagcgcagggattgcccttgttacacctgggggcaacatttgaacggagcaatcaaatttaggtttaaagcgtccaacaatgaagccgaatatgaagcccttattgccggtctaaaacttactcgggaatggcatgccaaacacattgagatctacagtgacttacagttagtggtaaatcatgtatctagggaatacaaggctcggggagaaagaatatagcttatctaagcaaaatacatgatctgctcacccgattcaaaagctacgctctcaagaaaattccaagagaagaaaacacaactgcaaatgcattagcccgactcacgagtagcagcataaatgataaagtgaatctgttcctcatccaatttcttgaaaaacccagtatcactggtacggaggagattgaaatgattgatacatccccaaatttgatgacgctaataacagcctatctcaacaccggagaactcccagataacaggaatgaagctcagaaaatgaggagaaaagctgcacgatacataattgtagagggagttatgtataaaagaggattctccatgccactactcaggtgtgctacacaagaagaagctgtatgacttttttcataagtacatgatggattctgcggcaaccacgcaactgggcaaagtttatctaagaaaattctaaggcaaggttatttctggccaaccatgatcgaagcttccaaagcctatgttaagaagtgtgataaatgccaaaggttttcaaagataccccgtgcactgcccaatgaactaacttagatgcaaagtcattgaccttttgccatttggggaattgacatgattagatagttacccaagggcaaaggcagagtacagtatgcaatggttgcagttgcctattttaccaagtggacggaggtcgagccactggccacaattacgtccaaaaaagtccaagacttcattgtgaagaacattatttgtcagttcggattaccatacaagatagtctcagacaatggcaaacaaatttgacagtcagtccttcaatgatttctgtgcaaaccatgggatcataaaaagtttctttgcagtggcagatccccaagcaaatggtcaagttgaagcagtcaataagacacttaaagatactctaaagaaacgactagaagatgccaaaggaaactggccggaggaactccctgaagtattatagtcatatcacacaactgagaaaacaacaacca

SEQ ID NO: 234219 - DNA, 1555 bp, Cannabis indica
aactcaaagttaaggccactcctttggtacgtacactcacttcgcttcattttgattttcatatacttattccagctgttggtaatgcgggagggatcattttggcttggaagttagggtttgagtttgaatgtatttcctgctcccaaaaccatattattggtcttgtctaatcggatcctccgaccaacccttggctgctgccttgtgtaaatggccctccatattgtaatgccaagagatcgttttgggctaagttcatgaaggttggagataggtttggtggtccgtggctcattctgggtgatactaactttgttctgaatgagtcgaaaagagttggctcaaagggtagggacccttttatcccgttcatcgcaaatttggttaactatagggggctcattaacatgcctattaatggagacaaacttacatgggacaaccatagagccggggagaatcatgtcaagtctgctcttgataaaggtttatttaacggagcatggctcaacttgttcccaaaggctgttttgttctcctctcaaacttgcaactctgaccataggcctctatgtctctttactgatggtatgggggaaaaattcaaaagaagcttcaagttttaagatagttggacccgggatgagagagcaagctggtggttgatagcgcctggaaatcggtgtgttatccttgggctccagagttttcaagaagattggtgcaactcgggttgctctcttgcattgagtagatcccagtttggtaaagttgatagcttaattaaagatctggaaggtaaactcaatgccatccagggattgacagtgggatcaagagactgggatgctgagtgcgatatttagcgagctcttaatgaggcctatgctcggaaagatctgtactggaagcagcggaccaggatttcctggctaaaggaaggggatagatattcgaaattcttcttcctctcggctgcaatcagagggagacagaatgctatagaatgtattttaaataaagataatgtttggatttccagtcgggagttgattggcaaggaattcctagagttctttcaaggaattttttctggatcggatcatgagcaggagctaaattttgatgttttcattagggatagattgtctgctgatgatcaagcagagctagtaagagggccttctcatgatgaaattcgtcagactctttttgctatgagtaaccacaaggccccgggaccggatgggatgtccgttatcttcttcaagcactacttggagactgtgggtgtggatttttgtgaagcagtctcagatttcttcatcacaggtattatgcacaaaggggtcaatgcaacaaatattgttctcattcccaagacccaaaacctgaagagaaccaatgattttagacctatctccctttgtaatgttatatacaaggtcatttctaaaatcatggccaatagaattaaacctttgttggcatcccttattttccctacccaggcggcttttgttccgtgaaggaatattcaggacaataatgt

SEQ ID NO: 234220 - DNA, 987 bp, Cannabis indica
cttccgagcgaatgccaatgaaaatggagtatgtcccgttactatttttttattgttcgatgggcccagagcacctgaggtagctcgtcaactcatcttcttttagccgcatcgagctttttctttatagtgtcttttaaggttttattaacaatctcgacttgaccattagcatgtggccttgatactgacaaaaagattttaacaattttgttcctttcgcagaacttagtgaataaatctccatcaaactgagtttcgttgttagacactatctctatgggtattctaaacctacaaatgatattcttaatcacaaagtccatgaatttttttgacatgattgaaaccagaggttcaacttcagtctatttggtaaagaattcgactacgactactgcatactttgcacctcctcaccttattggtaaagatccaattaaatcaacccccatatggaaaatgggtagggcgaggtcatcatataaaaatcagtaggcagtatcctctgtatatccaaaaactattgaaacttatcgcacttcttgacaaactcatgggtatctttgttgatggtgggccaatatgtcgaattatctttttagatagactttgccatcctgcatgatctccacaaaagcccttgtgaatttcttttatgatttccaaggcttatgatgggagtacacaccgcataatggcatggaataccctcttttgtaaggttttccattgacaagtgtgtatctcgaaatggcatataagagtttacgtgcctcgcctttgtctgtcggaagttctctgctcaacaagtatttgatgatgggaatcatccatgtgggactcccgtctatcatttctatgtcttgcttttcaaattcgcagatactcggctcgcacaacacttctactggaactagattcaaattgtctaaaacaattgtgatgccaactttactaaggcatcatcattagagttttgttctc

SEQ ID NO: 234221 - DNA, 3262 bp, Cannabis indica
gataactaatcagattgtaaagagttttatttagggcataaaacccaacaagacaatggtcaggtggattatgaccatttgcctagtcttccacgacacccccattattgttgttattggccattacctcttcttgctcaacccttaatgcaactctttctaccctcttgttctttctattctatctataggtcttctcaatctcaagatcaataggcactcttaaacttggtccttgacgtcacataaaccaaaagcacctgagatagaataagaaaaattgaggcaaaatagttagcaagaagtaaggaagaaaccaaagtagaatttagtccaatttctgtaatatcaatttttaaacaatttttcagtcttgatgccaaaaacttgttacgaaaattataaatagctacgcaaatacacataatcaagtagtactcacacaggtgaggttgaacccacaagaaattgaactgaataccattaaaatagacttattttctatttggtagacaataattttgttcaagataaaaaattaaagaataacaagaaaaataaaataaagcaataaaagtgtttaatcaaaggatgacaaattaaggaaataaatcttgttgtttcaattacccgatcgttaatgctaacaactattctgctttctttaagtgaatattagattataagattaacctaatcttttaggtcctaaatcatatgttatctattgcatctttgagatagagtaacatacaatctgcatcaaacaataacctaaatgtcacaaatgccatgtaaatactctcatttcacatcaaaattaaaatttattcaattttagcattctcaactctcacttttgtaattttgtattgagatcataaatcattgctaaggtgatcaatctcaaacatgtaattaaccacaaatatgaataaatttacaattaaaaaagaaaaagtagtaattaacaactcaaagcatatacaatcaatccacattcatcatcttcccaaaaagggagtttagttcataaactctataatcaaatccaaaatcaaacttgaaacaaaaattgacgtaagaaaacttaaaagagagagaaaagaactgatggagaaaattgtttagatcgccacaagtcgctctagaggtcctcctcttttgtttctaggtctaactttctaaataatggactccaaaattcataacccttctaaaaagaacaaggttacaacttaaaatcttgaaattacaaaaccgcttgtgaatttgcaccgaaggtgttgccgctaccacaaatggtctagtcgcggcaaccgttgaagctcaaaaatcgcgcattttgaaaactctctcgctgcgactgtaaactaggcttatcgcgacaacaataattggtcgcgactccctcagtgctcgttgcgatgagcttcgcaaaattcaacttgaattttctctcattttttctcgactttgtccattctactttaatgaattttctctttaaacacccgacgaacctgaaacagagagaaacaaacataaaatcatcctaaaagtggaaacaaagagcgaaaaagtgacccgatcaacttaggctagaaatagcctaacaataatttgatttttaacaggaagactataaatggggctcttgagagtgaaagaaagaagaagaaagttgatattgcagattttccttcacagcggctaatatttgattagtatttggttatcagctttcattgacagtcatcagtttttaatagtatactgtttgccacttttgacttatgtaagtgatactttttgatacactattggatagagaatttgattcatatatgacattgttgcataaatcttgtccagtatatgctttgttgggttttttttttttttttgttaaattgctagtgcagatccattagatacggattattaataacatttactacagatctatttacataatttgtctttggtttttccctttctcaattttcatgaggattgataatgttgtgaattgatacaccatgtattagtttagtcatgacatacatagattatagacaacagtacatgaaagcttatgtgtcattctacatttattgttgctaaagtaaaataaagatatacaagtggcctaaactatatatgtacaataacacgtgattaggggaattactcaaaaaaaacaaatgactactattttaacaaacaacaaagaagaagatatttactcatttctttggagttgctgttgctaatttatggacatttaatgtggttcagtatgtacttcacaaggattcaatggttgcagaccagctgaatcctattacggttaagaaatattatttggtaagcttgtggatgtgttacttgtattgatagttcatatggaatatatacgattcactctcgagatgtttaggtggtgaaataatacacaccagactcaaaatcttgtgctaaagattgttgggattcgaagttctctacaaaacacaatattaaatatattttcattgaattggaataagttgtgtagtgatgttttccatctgataaataagaagtccgttttgaaatcgcacacctttgcacccattgttgagtatatgcttcaacatgaatcatataagagttgatacgatggaaatctcttagtagtgataactgttagagagttccacgttgccaatgtgtcgaaagataatagaatatataagatgaatgggctactcctcccattgtcaattggttttgagatgaaacccaatgattctctgataacgtctgtaattaaacgacgtcttacccatttagtgcctttttgtttaatcttattggctctatttggccgaaagtagcaaaaatttttagaaaggatgtaccaaattttcagatttaacaaactccaaattattacctgtagttggcctgcagtcgcgatagagcgtgggaaagagactagtttgtgagatgccctaactagttaaaacacaaaatgtataaaattaaattaaaatgtaaaatctaaaaaataaagaatcaacaactgaaactcgaaattagatgaaattaattagtatcactgatggccaaagaaaaatgttgaatagaagaatagagattaagaaaatgaatccctctcaaaaacgtacgccaaactccaccttgagcagtctacatgtactaagaatgtgatttctattagaatcatagtgatgtatttttatttttatttttt

SEQ ID NO: 234222 - DNA, 799 bp, Cannabis indica
aatgcaagttagtaaaagattgagaggaaaaaaaaaagactcatgcccattatctagatgacccataagataaatatatactgagataaaaataaaaggtttctcatgataagttgtaacaaaatctagagacaagttacttacaaaaataacgaagatgaatgcaagttagtaaaagattgaaaagaaaaaaaaagactcatgcccattatctagatgacccataagatagatatatactgagataaaaattaaagggagagtgacagcaaacaagtgaaagaaaatgattaactgaacaaaaaaaaaaaaaaaaaatttgtattgagaaccatgttttcaaaggcgtttgaggcttacgcctaattcttagatagatgttaactcatgctcaaaaatagcctatgaggcttagcctcatggttcactgttagtgaggagaaacaaatataataaataaatgaattataatcaactttcccaaaaatatagttcatatgtataatattagaatgagattgaagaagtaaataccatttgtcgtatagccatattcagaaaattctttgaatgtgttctacgaaatctaaaaatcatgaaatgaatgagaatttgcagagaggtttccatgaagggtattttgcttcatgcgccatcaagctccgagcctccatgccttcctcaactccctttctctatgcctttccttcagttagtttttttaggcagtgagaattgcttcttcatcttcttctgcaacaaggatgctttgtaagaaaacacaaaaaccttagcaggt

SEQ ID NO: 234223 - DNA, 520 bp, Cannabis indica
atactctcaattttaaaaataaaaataataaataataacgttacaaataagatatttatatttatatatattatacttaatgtaaaataaataatattaatatttatatatatttataaaactaatcctactaacaccgttaaatttaacagatcgaatattattttatttttaaagtatattttgttaaacaaatagaaatagttaaatagccactttttatatataaaaataatagaatattcttttacttctaaagtatattctgttaaattaacaaaaatagttagataatcattttttatatataaaggtattatatataaaaatagtagaagagataattacagcacatgtaatatataatacatataatataatataaaaaagaagatatatatacacatttgtccaaaaacttattttccctttctctaaacactaaaggaattctcatggaaatagctttggataggggtgcacatcgggtaggttttctgggctttcaggtttttgagtt

SEQ ID NO: 234224 - DNA, 1041 bp, Cannabis indica
ttttatttttcaacaaaatataaaaattaaataaaaaatacgtattaacatcttaaaaaaattcaagtaatttaaaatcacgaaactcattatctataacacaaaatcgacaaagtcatcataaaatatgaactaataattgttcaatcttgacgaaaaatattaaaaaagttctaattgttaataagcttcactcattatcttcatcgtcgatttgctcttcatatatgatcaacaatttcattacgaacattagccattttacgaatttgatctcttgaaatgctaaacttaacactatcattcaaagttttgtgagtgctttgtatagtagcatcttatacttcaggaatgtcttcatctccatcaaaatatagaagctacaacaattacagtaatggttcctaatcctaattaaattattgtaatagagaatattctataaaattggatgtatatactcactaatttgaaaggaaactagaaagggattttactcttattcatccacaaactagaatactaaaaaaatttgataccaataaacaaaactatacaaaacaaggggtaacaactcccaaacagtgaaatgcatcagcaaaggactcaaaacaatcctaaactaacaaacaaaatatttatacatgactttaggcactatttattctatgtattaaaagtgatacttttaggaaaatctaaggaatattttgtaagcacacaacacaatcaaatcaaaatttggtagattctatcttagaaaaacaataacaaataatgcagaaaacaaaataaaagaaattgacaaaacataatcggatttatactagctcagcctagagattttaatatgaacaaagtatctgttagagacttatctcagatcagcaaagatcaatctaggaaactatcgtgaatagaacccaactgagaatttaaaaaactattttacatacaacttaaaaatcactcatttagagaatcttaattgctgagacctttgaatggagcaggtattactcaaatacaattctaaaaaat

SEQ ID NO: 234225 - DNA, 862 bp, Cannabis indica
aatgggttttatttaggtcacaaaacccaacaggataaacgtgctccacgcacagttaatggaagctcgattattcctttactggcgacactgtcaccaataaatccacacagatttaccatggaaggttttagtttgactttttcaagtcccattttcttcagtgtgtccttatgaaggatgtgcattgaacacccgttgtccaccagcaccatttttatccttttattggcgagctggatgggaactaccagtgagttgacgtgaggatatctcacgcatttttcatcttcctcggggaatacaatcagaggttcttcagtcttagctttcttagaaggtttcggagaaaaagcagtctgctcgttcttcacttcttttacatatctctttcgggcattgttactttcccctacaacatgtggcctttgcgaggtaaccaaaatatcctctccttcaagaggaggaggttgtaatccttggttgcctgggttattgggcggatttggcttgttttgtccattgcttatcttttaacatatttccagaagtgacatcatgcgatgagactttctatctcatctttcagctaacgacactcgtctgtcgtatgcccaatgtctttgtgatacttgttaattttggttgcatctctcttttgtctcgcatgcctcatgggctcaggtttacggaatgcgaccctgtcctcatgtgcgagtatagatgttttctcgagtttcattaagctcagtgtaaacggtgtatattggcaagtacttgtcgtgcttcttttgcttttccttgtccttggctaactccttacagttatctttactctttgaactagaggctcctagattgt

SEQ ID NO: 234226 - DNA, 600 bp, Cannabis indica
tgtgatgaacacaattgaaggagaagagggtttcgattcagttcttaagcatatgctgcaacaaaaaggataaagggttagataactgaacagaatatgacattgtattttgctgcaaccaatgtgaggttttctaacctttatgtgtttatttcatcattttaagatttattcatatttaggttgttagattatagatttataatcaacatatgtgttagtaactatagatcctagtaaaataacttccaacaacctcttcttgttgtgtcattttagccctttggccttggaccagttattttaagcaagttacctctgggtgctcaaagggatccgccgtattttatggtcgtagtcttcctcctctttatcatcataaccatcttctcatctatccttgtagtatatgcattggtcttctccatcaagattttctccatgaattttttcaggttggctgacatttctaaggcaattaccactcacaattgaggcaacctctcctgtcacggtcgttgcctaagagttagtcaaaagaggaagattcatcaataatggggtattcggtggtatttcgatctgttttaccaagaggtc

SEQ ID NO: 234227 - DNA, 766 bp, Cannabis indica
ctgtaattctctcacagaagaggctgtaacagaagtatcagtagagccgcaacagatggaaacaaagaagacaggaggagggggagatcctcctcttttcaatggataaaatcatctcctagaacgtccgaggaatcaatagccagcaaaagcaaaatatggtcaagcattgtattgctaatcaaaaggctggtttggttggtctccttgagacgagagttaaggctccaaagcttggagccttatatatgaatatgttttcgggttggtattttactactaatttggcttggcataagggaggaagaattatcttagcttggaatcctaatcagttcacagtgtgtatcatgaattgctcgagtcaatttatccacactcgggttacaacttttgatggtaaataccaattttatgcaacctttgtgtatggatttaatgaagaacaaggaaggcagcaaatgtggcagggtttacaaggtctttctaatactgatccttggatagtattaggggagtttaatgacatcctttataaggaagaacgaataggtgaaagagtaaggcatggtaattcgaatgcctttgcagattgtgtttctaaatgtcaccttgaagacattaaatattcgggaagctattttacgtggagtaataagcagagtgcagctgatagaatttattccaagatcgatagagtcttggctaacgaggcctggatggaattattgccaactgcagaagctatctttctcacagaaggctt

SEQ ID NO: 234228 - DNA, 1062 bp, Cannabis indica
ggataatgagaccatagccttccttttataccattctccaatagggttagggttgaattattaggaataaaaaatgataaaaatatagtgaaaattagcacatatggccggccacttaatgggccccatacacatttggtttttgccatttttctcaactattttatctatttttcacaaataccacttggaattactattaaacattctagcaaccttttattcaatcaagataagaatctagcgttgtcccgtttaggcgagagtcaacaccattctatcttatgagcttccactattgtttcatacttttgtaagtctcagtaataatcggcaccattagggtgattagtagtaggaataaaatacttacaaataatacttatcttttaagattctacggcgttaaattgctaatgaacgttcatccattaggaatgattactcactaaaacaagaacaatgtagaacaaacaatggagatcaaatatccttataactaaagctcattattttgagaaatgtattttcatttgatatttatttttgttaacgagatttttgttaacgaaaaatgagcctttttttcgtaataatttaaacacagatatattgaaaaatgaaaaaaaaaaattaataatagtaataaccacacaaagttttttacgtgattttacagttaactctgcatagtccacgagtctatcttattaaagatatttctggatattgatatagtattacaatcagtgatctctttcctcaaagattaatttccgtccctttttcttgaaattcaagaaatgcaaaagattcactacgcttcagttgttgggagtctaatgtatgctcaagtttgtacgcatccagatatggcgtacattgttggagtgttaggcaaatactaaagcaatccaggaattgatcactcgaaagcagccaaaaaggtcatgagatattttaagagaacaagagagtacatgctcacatataggaggtcagatcactttgagatcattggatattttgactccgactttgcgggatgccaagatagtagga

SEQ ID NO: 234229 - DNA, 943 bp, Cannabis indica
atttataatattgtcatgggaagctaagtgtgaaaccaaattatgtctatgaccactttttaaataaattataatattatattattttattgaaacacttattataattatttttaataatgtatatttaagttattacttatcattaataataattatattattaggtcaatttttatctagatcggagcacaataaaaaaatagtgctaaatataacatttacatttttttcccaaatttaagacatatttttacatattctttttagggaaaatcttaaaaatatctcctcctatattcgacctaaaatctaggtgagtctctctcttaattttttttttaatttacaatttacattaacaaacttataaaagctaagatatttttgggcaaatctttgaaaaaagaacagagcatgtaatgtgtgtgtaaaattgtggtgaatggccaaacataaaagataatgcccatgtacatgatcatgtatttggttgattgagaccatttcttgtgttagtcaaaatccatcaaaacaggatatgaatttataatgggtatgtgtttgtctgcatgtaataaaatctgatgactttcaaaacaattctaatgcggttcgccaaatcatcggacggctgtcaatacactatttaattaacaacaacaatggtgggccccacgatcaggtctcccactccactccacgtggtgaattttccagctattaaagccaatcacgtaaattaaacacttactttctcattagtcactccataattttttatgttcaactagtttatgtggcctgctcttagagcatctccaaggagctcattaaatatggtgtcacactatcactaaatttgatgttaaaaactatcttcactccaaccacaacaccaaaaattacactaaaaaaatattccttattattatattaattt

SEQ ID NO: 234230 - DNA, 743 bp, Cannabis indica
gatccccgtccccgccccgtttaatattcggaaacaaaaagtgatccccgtccccgtcccgtttcccatttagacggggaattcccaccccattaggagcgggtccccgcggaccatgtaacaagtcaattttaaacattaaattcaccattcatgtatagcatttttcatattgtgccaataataattactgaaaaatcaattaccatttccaaaactaatacgtttaatgcattcattattatttcttagtttacgtctgcctacgcgcgacaacataatttagaaggataatattgtaacaatcaaaatctgcagtttttttttttccacaagataaactaaggctaatcctataaccatatatgaatctataattcacaaatttaatttaatttttagcaataataataagtaagttatatttttagaattttataagtacttgattattaaatgttaagtaaattatcacgtggcaatctctgattggtcaaggttataaatttttatttttttaaaaaaaaattaattatttaaatatactaataaaacaatgacacgtgataaaaacttaacatataattcaggtacctacacagttccagaaatatattttaatgggccggccctagatataggcggcctagacccgcgcttagaacccacttattttaagggcccaaattaaaaagtatcttttaaaaaatatacataattttttaaaaaattaaaaatataat

SEQ ID NO: 234231 - DNA, 1044 bp, Cannabis indica
tcataaggaggctttagttagttgcccgtaagtttgcttatagattccatcctatgtgtaaaagcctaaaaattatcaacctctgttttgctgatgatctgatgttatttagcaaaggtaataaacactcggttcaagtgctgaaggacatccttgatgaattcagtgctacaacaaggcttttcatcaacaccaataaatctcagatctattttagaggggttggagaagctgaaaaatagttaatactgagagagatggccctcttggaaggcaatttccctctaaaatatctgagagttcccttaagacctaccaaatggagagcagaagattatggagtgatcattaagaaaataaaacaaaggttgtccacatgggctagcagacatctttcatttgcaggtagagctcaactcatacattcagttttactaggtttgcgtaattactggataagtattttcataattcctcatagtgtcacaaaggaaattgaaaaatctttgcaaagggtttctctggggttggaatggaaataaattcaagatacatgtggctgcttgggagaaagtttgtctcccaaaagcctatagagggttaggttttaaagatgaaattaaatggaatacttgggccatctcatccaaaagagacattctttgggtgaaatggatcaatattatctacttgaagaatagttccatttggtcctatgaacttaagcaagaatcgagctggtattagagaaaaatgtgtctcttgagagacagattttcctgcattgatatcatgaaggcaggggctgttggaaggtttaaatcgaactggttatacaacagtcgtttgccccaagttcagttcgatttcagtaagggtatttggagttctttaaacttgcctaagcattgttttatcctttggcaagctgtaaatgcccagctgttaacttgagacaattttgtgcaatttcacattgcattggacagcgctgattgccctatgtgtggaatgacgacaaaatcgcactggcacctattcttt

SEQ ID NO: 234232 - DNA, 1035 bp, Cannabis indica
tgagaaagagtgccgacaagtgcaccgaagaccaatcgatcttgtcagaaccaagtgagagcatcgggattagccgctgtgacgttattggtggtaatattagcaggagggaaagggaaagtgccatcaacatatttataaagattgtgacccaaaagttgtgcctggatttgagtttttcaggcaagatagttggtagatgtgagtttgatggtatttggaaggtgaagaagaatgaaagctttggtggaatcttcaacattatttaattaattggtggccatagtgatgaatggaaacacgaagggggaaaaaattaaagatcaaagggcactgataccatgtgaatgttggaagcaattgataattattaattcataaagagcctttatataggcatgtacatttacaagaaagaatactaatatatactacaagcaagggaatactgatatatactacaatcaaggaaaatagtgactaagttattaacaaactaataacaataaaagatagagaaaagaggaatatacaaaacaactctaacgaatatagctggcagtattatccttctacactaagggcatggaaataatgcaacacacttgaagaaatatcattgttaagaaggcaatttttgctctctccaaaagcaaatatacccttacatgactcacaatcatttccttcttaacaatgatatttcttcaaggtaatgattgttggcatggtacgagaagatgggggcctgcacgcgagccataaggggtgtagacaagggcttaacacagtggaaggaggtggggggctcgacagtgtgagccatgatgtgcatggtggagtgtgtttagggaaagatccacgagcataagggagagagcgattgcacaacgacattggaaaggatgaaaggcaaggtgtgcaagggatgagcataccgactacacctacgtgaagactgagacaaggaggtcaagtgcggtgaaaattggactgcaaaggcctgaaagctcgaccagggtacgctgcaaccac

SEQ ID NO: 234233 - DNA, 1557 bp, Cannabis indica
attaagcacagtgtcctatttttactattttagaaaatacaaggtccattttatcatttaacaaaacacaaggtccaaaatggtatttacccatttatttattaatatgcccgtaagctttaaaaaaaaaaaaaccttcgaagtttgagctcctttctcaataaaacagagcgggaaatcttggcgccaaacgagtcaaaatggcttattccctatttaaacctaacccaacttcctcccattccttaatcatcgctctctccacaaacccttttccctttcgcttcactcttcctcatcgttttatcacaatggcaacccacaacgcccctgaaatcaacgacccaccaaccaagcttcccaagcttcaccaaaatggcgtccatcaaccttctcagaccaccccatcatttttcagagtcaagaagctctctgagaacgctgttactccatccagaggctctcctctctccgctggctacgatctatcgaggtaagaaaaacaaatacccttattttatttttgccattttctcaaaaacttgattcatttcggtaatatatttttctgggttttctaattgttttgcagtgcgaaagatacgaaggttccagcaagaggaaaagctttggtaccaacagatctgagtattgctgtaccagaaggaacctatgcaagaatcggtataaccccatcgtagttttttgtcacttgtaattatttttctctttattttggcaatattttgaggtgatattgttcttgttttggttagctcctcgatctgggttggcgtggaagcactccattgatgtgggagcaggggttatagatgccgattacaggggtccagttggggttatactcttcaacttttctgatgttgactttgaagtcaaagttggagacaggattgctcaactgataattgagaagataataaccccagatgtaatggaggttgaagatttagatgccactgttagaggtagcggtgggtttgggtctactggcgtttagggtatttagggtatttaggaaagttcagtttgtaactttgtcaaacagttggtgtggaaattctgtgtttttaatcaagtagagtaatagtagtagagctaagaaggcttaaaagagttgtgaaatactgaaaatgtgatttggtttatggattttcacttgtatttatcagaatcaatctaatttgatgtgcttttagatctttttcatgagcgtattagcacaatcatttcacatataagcaaaatatctttcaatttcatctcaaaagagaaatacctttgtttttattggttaacaagtcttggttttgattgtggttgtttattaacacaaaaagaccataaagttctgatctagagtagatataaacatatggattttttgatattgatgtgggaaaaaggatggcaccctacacatgattttgatcataataacttggaaaagaaaatggacttttgagtaccaaacaaataattgtcatgttttttttcctaactaaatccgaagagttctcaatgccactaggcaca

SEQ ID NO: 234234 - DNA, 2018 bp, Cannabis indica
ttcttgtaaatttttaaaaagctactgaaaccaatttcatttaacacaacaattaatacaatactctatatcaattgataatatcatatatggtactgtaattcacttatatacaaaaattatacttagatacaaaaattatatatgtcacactataattttttctttttaaaactgtatatctaacccattcacttctatccttaaaaaaaaatactcacttctatcaaccccgcaaaaaaaaaatatatatagaaaaataaagaaataaaccagatttttttctcaagtttataacagaaaaagtcccacaaagtgccataactattgcaacataatttaaacaatcacataaaaactgatactttttgttctcgagatatatttttgttataaattgcaaactcattgttcaacgtgactcctaaaaaaatacaaatcattactgaatttaattttttggcatgttaagtcataatccacatgtcattttttattggtatatttaaactattttttttttaaaaaaatataaaaatttaatgatttggatcaatcagaaattgcacttgacaatttacttaggtatttatactacaaatttaattttttctacttcaaaaaatttatgctaataaataaatcatgatcatcgagaaatattttgatgagtgagggaaaatttagaatatatatatatatataattaaaaaaaaagtaaagtacgtagagagaatattgacaacaattagtaatctaccaagaaatatattataaaatatagagagaaaaaaataccaataaaaaatcgaggctaaaatcatgaataattcaaagtaattaatgatggtgaaattgttgacataaaaaagagtatgtatgtgaaatattttgatgagtgaaagattaaaaagaaatagatgatattaacaataattagtaatttacagaaaaatatattataaaatatagaaagaaaagaaataccaatagaaaatcgaggccttgatgttgtctattgatgtcattgctactgtttattattcgtcgaggtactctaaacaaacaaacaaaaaagatttgaaaaacatataaggttagagaaagattgtacactaaaaataaaagaaaagaaaaaaataaaaaaaaaaattaagaagaagatcgaaaagaacgtgagatagagtgaatgtgataaaattatatatagatttaaggttatatattattttaaaaattagtaaaaatttaatattagatattttttatttattaattaattcattaatatttataaattgaataaaaaattaaaaaatgagagaattaaggagagaatagtttagagtgttttgagtgattttagagtgacacgtcaccgctttatatctctcctttatatatatagatatatatagattatatgtatatattttttttgaaatatatatatatattatatgatcgtctacattataattataataccttaataaatacaacataaaagtaaattcaaaatagttaaataaaataagtatgcgtgtaattaattatttgaattatatttttaacacttcaaattatttaaaaaatttcgaaaacagatagagtaactattataactataatttatattattattattagttcttgttgttgtttatcgaaatttccagaaacaaatttaaaaaagcttcaagaaataaaagaaacaataaataaagtagataaagatttttacgtgattcaggtgttaataatttctagcccacgagtcagtatattggccttagaaggcttatttaatgtattacaatgttgtttacagtaggaaaccctaactctgttctcttagtttctcttaaagaagaagaaagcttagagagattttgacagagcttcgattatcccccctttgtgtggaaataaaagagtatttataggctaaagtaccgacatgagcatacccatgacctatctaggatttctgtaaaaaaaagcccattattgtagta

SEQ ID NO: 234235 - DNA, 982 bp, Cannabis indica
cgtgccacaatctggcaccaatctatcacttcgtctaaccagatgagcctgtaccacaacctagcaccaatatatcacatcggctaaccaggcgagctcgtgccatatccaggcaccaatgtatcgcttcatctaaccagatgagcctatgccacaacctggcaccaatatattacatcgcctaactaggcgagctcgtgccatatctaggcacctatatgtcactacttctcgtgcttaattaagatcaccgacaggaagaaacctaacaacggttttagtctgtgccatagcctggcacctatatgtcactgctgctcgtgcctaatatggatcgtcgataggaagaaacctaacaatggtttcggtctatgccatagcctggcactcacatgtcactactgcttgtacctaatcaggattgtcgacgggaagaaacctgacaacagtttcaatttatagtcatgactttataacggtttcctcacaggcacaacctgaataccgatatccacattgcctacccaggcaaattcatgccataacctggcattcataaatagcatcacctaatcagatgcgcttgtatatcacattgccttattaggaaatcccatgctatagtctggcatccatgtatcatatcacctaatcaggtgcgtttgtatattacattacctaaccaagcaatcaataattacgaaacttgtcataccatgtgttacattgtacttttcttacgtctgatccagattcatgcatgttagccaacccaagtagagaaacctccccgatgatctcggccctatgtcacaacaatggtaaaccaataagtgtttatcccataacactgctaaatatttgtaaaggataacatagggtttcttacaaaaccccgtagtacaattacactaaaattaaacttatattttggctctaaaacatacaccatgttgtacagctcgtcgcaagcttcaaaaca

SEQ ID NO: 234236 - DNA, 927 bp, Cannabis indica
aaaaacaatcacaaccttatatagtgactttcttaatacacatttccacctaattcgcacaacgcaattcaactcaacaaattacacttaaaaacaactaatacaacaattaaacctccacaaatcaagtccgaatccaaaacatcaaataattcaaaacttcaatcgattaaatcggacattataccacgacactccaatcaactaattcatcaacgaacttttaaaaaacaaaaattcaacgcaattcaactccacaaattacacttaaaaacaactaatacaacaattaaacctccaaaaatcaagtccgaatccaaaacatcaaataattcaaaacttcaatcgatataatcagacattacaccacgacactccaatcaactaattcatcaacgaactttaaaaaaacaaaaattcaaaacatcgaagaaataacaatgagagtaaattaacctggagaagaaggcgacggcggcggcgagtcagaagagtcggaagaagctctgagtctgagtctgagggagggaagaatgggagaacgagttctgagcgagtggagacgaaagcagcgaggagaaatggtagggaaggtgccgaagaagacgagactgtgaggaggaagaagagaagcagtagaaggagtggccatggtgagtcggtgagtggagaagggaccgatttgaggtcctatcctgagagccataagttcagaccatacaaatggtatcagagtattttgttgatactaaagaaaaacgcatttgtattctgttttctgggggagagcgagtgagtgagagtgagtattttcatttggacacacatacatacatgatcctactctcatccatacacgcatcgcctcgcgcgttcattacaccttctccttataccaacttaaaaggaagggaatatactcatata

SEQ ID NO: 234237 - DNA, 1462 bp, Cannabis indica
gtattaaactaattattaatcttatttagaacaaatactaatttttaagaaataaataaaatcatattataactaattaaatacctcttggaataacctttttagaaggccatacaactgtggaaccaacagcttcttgtatcgtaagcatcacatagttaggacaaaataaataagcacctgggacgatagcaacatcaacccataaccgcataaattctggtccaaggggaagtccatgtatctctatgtttggatcactagaaatccaacgaccttcagcaactattgtatctgacaaatcaagcatgtaacaagcattcatcgcttctgtaaaattatggtccttttttagtccaacactctgcaaaaattgattttacatataatctattagctttcatatccataatttcaaaaaaaattctttaaccaataataaatttgataatttaccttaggagaaggattattgttggattgggtaacattaagggattgtccctcacttggtgtttctttaccaccctaaattaaaaagaaagatatgttgcatttaaaattacagatgttgagttgtataagtgaaagaatgaattgttaccaagtgttcttcaagtaaatccaacatttctgccattttgagcttcatattgtgttgctcttcttctaacttacagatcttgttattagacatattcataacattcaactttgatcttgttacccccttccttgtccgattaaacgaccagattttgggtcaccaaataattttgttaaggcatccttctctatattttctgtaatttcagagtttggatcttcacgtataatgttatccagttctccctgtatatgaatgagtaaggctgaagtacaattatagaaaacgaatgtaattataaaaattaattgataagtactcacaaaaattttcgacgctgtcgggttaatcggttcaccattcttcttagtatgggctctccgaaaagcctcaatcctagatacttttccctctttattatctttcttctacaaagtacaacaatggacaatataaccaaggaatataaaaataaaaaacaacatacaatcaatcaaaatgttaattgttaccatatcatagattgttcgagcgtaacctcttcgacttaaggtgtgtggaacaactttctttcttctctcttgaaatttggcccttatagcctagttaataagaaataaataacactaggtaaaacataactctatctacactaatatccaagtacttatttctaatcttaccatatgttctttactagttttttgagtaacaaatgatctccattcaccatcactttttatgcaatcatgcttcatggctagtcgctcactctcattttttgcatcgttaagctctttgactaatctagactttccagatctccatagagatgccatcatttcaaagcacatc

SEQ ID NO: 234238 - DNA, 1798 bp, Cannabis indica
gtatgttcttgacccacttccactaacttttattgcttgttcgagtgtcgcttttgcttttgaggctcattgtcgcttggggtcatatatcccttcctttgcttaagaaattttgtccccaatatagtaagttttcttcaatagattgtgagtcatgtcagtttgccaaacatcgtctgttagtttgagttctcgagtcaataaacgtgctagtgttcattttgagttagtttattttgatatttggggtcctcctattttgtctcaatttggattaaggtattttgttactttcgtggatgattattctcgtgtaacttggttatatttaataaaaaattgttcaaagttgtttactatattttatgccttttgtgctgagattcaaaatcaatttaatgtgtctgttcgtactttgagaagtgataatgccaaagagtacacatttgctcaattttaatcttacatgacctctaatggcatgtttcatgaaacttcttgtgttgatactgcacctcaaaatggtgtgacagaacatacaaacaaacatcttcttgaaattccacgtgccttcttatttcaaacttcttgaagttcctaaatatttttgggccgatgcagtttccacaacttgctttcttattaatcgcatgccatcttctgtacttaatggtgagatcccattcaacattctttttcttagtaagtcattgtttccagttgctcttcgggtatttggcagtgtttgttttgcttgcgatgtttgtccacatgtcaccaaattagaccctaaggcattaaagtgtcttttttggttattctcgtctttaaaaaaagtatatgtgttattgtcatgatctcaacaaatatcttgtttctattgatgttacctttgtggaaaattcaccttatttttcatcttcaactactcctacttgtcagagggaggatgatgatttgttggtatattttgtcacatcctttgcgtctgatacatgtttaggcgagtctcttgttccttcacctgcctcagtcatacttcccacaatgccaccatctccaccactccttcggcctcctatagtgtacaccaggtgttcccttcctccacctcctgtttcatgtccggtacttgcatcttcgtcatcagatccgaaactcaaagatgatgttcccattgcactacgtaaaggtaaacaccaatgtacttttcttatggtttttttttgtttcttataattatctctcctcttcttcttgctcttttattgtttctcttgattccatcactattcctaaaactgttcatgaagcaatgtctcatccgggttggcttgctgcaatgatagaagagatgaatgctttagttgcaaatggtacttgggacttgaataatttaccttcaagaaaacaggccatagggtgcaaatgggtgtttacggttaaattcaatcaagatgaaacaattgctcgtttaaagacccgtcttgttgccaagggttatgctcaaacctatgtagtggactattgtgatactttttctcctgttgctaaactcacacctgttcaactgttcatttccatagcagctactcatcattggcctttgcatcagtttgatattaaaaatgtttttcttcatggagatcttgaggaagaagtgtatatggagcaacctcctgggtttgttgctcagagggaattagggtaagtttctcgttgttgcaaatctttatatggattgaaacaaagttcttgtgcttgatttggtaaatttagttaggttgttgagaaattt

SEQ ID NO: 234239 - DNA, 1556 bp, Cannabis indica
caatgtctcgacagccgtcctccttagcatggattaaatggacagcagcttgacaatctgattcaatactaaagcgatgtagtccccgttatatcccaacttgcaagccattttgaatagccaacaactccacatgtaatggggagtactcccttggcatagcagcagccgaagcaaacaaacattgcccctccgcatcccgaataacacaactgaaactagaatgcccctccccacacttcacacccgcatcaacattaatcttcacttcagcattcggaggaggcagccaacgtgccttctccctcccaacccgaccactctcaccttcacacggcccccgagcctcctgcacataattatcacaccattcaacaacattagcaggccgcgagaccctacccccatgctttgtgctattcctaatgtaccacaattgccaacacaataccagaaaaaactcaaacatattctgactcaaacctttggcccttctcatgagaaaagaaattatatcctccttaccaaactgttgagtagcatccttaaaaccactaagcttccaaacaccccgattagcccgacacccccatatagcatggaaaatagtctctcttacccctttcgaacatcgatgacaaaccggatcaatagccaccttcctatgtgccaaagccgaattagtaggcaaccattcattagccaatttccacacaaagtgcttgatcttggaaggaatcttcaacttccacaacttagtccaccactcaaccattagcttctcattctaagttgcaacctccttcctcatttcaagagccatacgatatccactcttcaccgtatactcaccatccttagtataatgccacatcattttatcctcaacaccatctttaacatgaggcaaactaataattaacttagcatcctcatcattaaagttagcacggataaagctttcatcccactcaccattaggaagcgtcaaatccaccacacacaattgcgccgggagctcggtcgtgtcataaattttgaaactgcgaggccgaggcagccacggatcttccactattcttacacgctgcccatttccaaccctccaccgagtacctttgtcaaccacttccttcccccaaaccaagctacgccatacaaaagacgcatgggatccatactttgcctccaacacccctttagtcaggaaataactcgccttcaacaccctactacatagagaagacggttgacgaagacatcgccatatttgcttagccaaaagcgcttggttaaacaattccaaatcttggaaccccaacccaccctcttccttcggcttacacaagtgtttccacttacaccaatgagtttttcgctgtttttcagttaagtcccaccaaaatctagcagccattttatggatactattaatagtactcttcgggagacaataacaactcgtggtataagtcgaaatggcttgaacaatagccttgatcaatacctccttgcctcccattgagaacatattagttttccacccacgcatcttg

SEQ ID NO: 234240 - DNA, 5385 bp, Cannabis indica
cttggtatcgacatcattccattcaaccagattgcattgaactagattgaaaatattctcacaatcttcatctaaataaatttatcttctttacctaaagttaatattagcaacattcctcaaggggctaatgaaatcgaccatcatctagctaaaaatgctttaagcttagatcaggaagctttttccaactatgtcttgaatgttggttccattctttaatggacatatctttccttaaaaaaaagtaaagtatagttgcttcgatgtggtgaccttacctacagagaacccttttgtaatgactctagttttcttacgtatggtcgttttgtttctaaaaaaatatacttaaaataattattctcccgcgatacctccaatcaaacaacacacacactgactctcactcacctcaacttcatcaatggcgaattcttcttcttctgagttcttcctatgctgatttgtgtctcattctgacgtaatgacgaacaaacttcccgtccggtctcgccgccgtccccgctccggcgcctactacgcctgcgctgtcggatcagccgtactcctcctcctatttttctctgtttcccttctctactcccgcctctccctctctcatccccacaattccctcctcagtcataaccgcaacaggaaccctttctccgaatacgacgacgtttcccttactaaccctctcatttccgatgtcgtttcccaggacgacgatcccctagcctccgccgaggaccgcattgacgagctcgatgacgtcgttgaggaggcttccgttagggaagaaagttttgaggaagacgatgattcaactcctgtgaagaaatccaatcgacctagggattatggttatttctacgatcacgtgaacggcgtgattcgtagggccttcagtcggagatcgattgaggattgggatgacgagaatttagggtttaatgtgggattgacgacagaggatcagagtaaggctgcgtttggatccgacgatgttcctgtggacgaagctgtgaggaggaaggccagcgaagtggcaagtgtcgaggatgcgctattactgaaattgggtgggagagtttctccgttaagagagggttggggagaatggttcgataagaagagcgattttttgaggagagatcgaatgtttaagtcaaatttggaggttttgaatccattgaataatccatttttgcaagaccctgacggattgggggtcaccactctcacgaggggcgatcgtttggttcagaaattgatcttgaatgattttaagagagttccatttctaatgaagaagcaattgagagtcaattcagtttcaggggtttctctcaaatctagaggtgatgagaatgtctcaggaagggttgtcttgtccagaagtaagattaagagaggtttgaatgaagttccggaaagtggatcggataggaagaaacccgttaatggcggcctgggtgtggactctgatggggttcgtgggaaatcggagttttcgagtcacatttacgcagatggcaagagatggggttactatcctggtttgcagccgtatctgtctttctcggatttcatcgatgagtttttcaagattggcaagtgtgagatgagagttttcatggtatggaattctccaccatggatgtatagtgtccggtaccaaaggggactcgagagtttactctatcatcatcgagaggcctgtgttgttgtgttgtcagagaccattgaacttgatttctttgaagagagctttctaaaggatgggtattttatatatctgacgtccttgtgttttgaaatatttatgtgttattgtgttatgtctctgaatctttgatgcgtttattttcccctcttaagttataaagttgctgttgctatgccaaatcttgatgagctgctgaaggatacaccgacccatgtatttacttctgcctggttcgaatggagaaagaccaagtactattctactcattatagtgagcttgtccgccttgctgcactgtacaagtaagcttgttttgcttttgttagatcgtttatattggttgttggtaccatttttctgtctattatttttatgattgtgacttggagtgttatactagttaacaacttatgtttagctatcaatattttgaccagagagtatgcattgactagactctgttatcaattatagaatatgagaaaataaatatcttgtcatcatctacgaggatatatcaaattgaggaggaacataattgaattattacttccctagttatggtttggtgtttcagttcttatagacttttagtctgtataactataagcagaaactttattgctgacaaaggaatgaattactaaatttcaatattagcacgaagctgtttgatttaaatatttttataaagaaaatggagaaatggaaggttaagggtgtagtctctttgctttgaaattgtaatgactatcaaggtatctgtttgtgtagaactatctactttgaactttaaattaactgtctgaacagtctaagcctgaaaagggtgatataacctaccaagggaaaaagaaaaactgaatgagaagtgcaatgcaagaatttggtgctctctagtaagcgctcaaatcttgtgctctggggctttcccatcggtttaggtgctgggagagcccccagagtatgctccttcattcccaactcctaaacctgaagtgaggaatttgcctcgtataggcagatgggtaaagtggatcactttgccaagattcaatctgtcctcgatcttccttgtatcatttctaacaaggttgacaaaataggtagatacgtaaaagatgttctttcttttccatcactttgacatgtgtcagactttgtacttgttcgatagggaaatccaatttaggtaagaatgaccaatctggcagaacaactcataagataagaagtattgttaatttcatcatactcgtacaatttacaaaaaccttagtttacttacagtacaagaaagataagtcagtcttagtaataaaagaagcaattactagaattaatggtcaagtactaaactgcacgttttaccaatgtccctggggacagaattgagataggatcgtaggctagatttaggctatccgacatcggattatctagttgcttgtatttttttcttttaaatcgagagtgggttagtattcagtgaaactctaagcaaagtctttttgttactcaaaccgatcgacaatattcatctagatctaagttttttatcacttgttttttctttaaaaatcacagctacttgggtatttaaaaccaaacattttgaggatttgtcttttttagatttatgtagagaatggaagtcattgatgtagtggcattattttctttgtcaagcatactttgttcagcactgttgagtgctaactgttataggccttgtttgtctggggctatttttgtaaccaaggctttcctctgccaccacaagttaggattcttaatacataacagggagggtcctgtcttaagacaagaggtccctttctccttttcaggaaaaaaaaaaccattcatgagtgcataacatacggtaaaagacatgcctctagacactctgtcgtagatattactgttgtctgctgctatagcttccatggagaaggttggcagaacacaatttctgctgctagaaagaaagaaaatagattggtggcttggctttgctattgctcatgacctggtatagagttcgtgtagtcatcggcctcccaccagaaggcctatgatatagtggtcgagtcgacctttcaaatttcgttttctgagaagccctttatgactataaaggacagagggctggctgttcacctttggaaacttagctacttaagtactactcaatgctaaagagcgacaatctgctgtagtgttgtacagttatttaatagcacagcaattgaaatagcggtatcaaatctattcccatgttttcatctttccatttcttttacccattcttcgggaaagtctcccaactatagttgaaaatatacttttaagtggtacctcttcttctcttatgagagataggtgctctctctacagccaattctctttaacaataaaggcattttctgatcgtagaccacccttttttaacatttgcaagcttcgatatcctgcggatcttttctttagcaaaactaatcattggctcaagaagtttaagaaaactaatctaatgatccttgattatcttcttaaggtttgcatattggcgacgatagattgaaatgtgtacaataaagcctccacaaaacccttatactaccaaactcactctttctttttatctactactttattaacttcaacttctacagtatggtctaacctaacttttaaattcggttttcaaattctattgagctatacatggtatatcatgactcttgaagccagatttgtctgtgcagtttattatacattagcttcttgatatgatttggtgatgcaaccataatttggagaccttattttctgaggaaaccatttattcactgattttttttccttttcttttgcttcgaatttctggatgaaaacttgtgtattttaaaaacgaggtttggttagttttcacacgtaaagctgaactcctctgtttctttgtagtgtgtctcaaatgaagcgtcactttgaatctggtctagttaattgatgtataaatgtgtttttgttagttacagctatgtattgtgtacatggaatatactaaacgcttgtgactcaacatcaattgcgccttgtttagctggatattaattatgtatttacgtctttttcttttcagatatggtggattatatctggattctgatatcatagttttgaaaccactatcttcacttagcaattctattggaatggaggatccagttaaaggaagctctttgaacggagcagtgatgctgtttagaaggcacaggtactcaatggtctttgctttccagtagctattctacaatttctggcttatttaaagtcatatcttactgaatatgagtgttaagcgttggtgaaccacagaaaaaattgtaaatcttttttttttttattgaaaaagagaaagaggccattgtcaaagactgacccctcccccgaaatatatagaaagcctcacttgtggcggaggaataccattattacaagtgttatatcacaaacatataaaacatttgaaacaaaaccaaaccaaccagacataaacaattcatgtactattaaaccacgttacacaacaatctccaatctctattcaaatctaagaacgaaaactgctcgaaacttttagt

SEQ ID NO: 234241 - DNA, 835 bp, Cannabis indica
tttttttttaaaaaacatatataataacttagtaataattaatttaagaacaaaaacaaactatctatttataattaataattaaaaaataaaaaactatctaatcatacataataattaacaaatcaaagacctactatatatttataatttttaaatttatgataattaattaataattaaaaatatattaaaaaaaattaaatatctattttctccttaattctctcatatttttaatttttttatattttatttaattagatatcattaattaattaaaaaaaaactatacatttgtatatatataactaataaataaatatatattaataaaaaaaataaaccaaaaaaaaaattttttttagagaaagatataactaatattaactaatataatttataaaaagaacaaacctaaagttgcttatttttttataaccttctctctcttcacataataaaagtaaatacttaccaattattgtttaatttattttatgtatataacaaacctattaggaaggatattcatgataatttcaagtgagatacggtgattaaatcaactttaaatacaatgaggctataaatgagatacagtaatgatagttattttaaaattatataaagagttttctataaatttattgtcttctttctgttttagatctctattttgtgtaagaattgtttagtttttaattttcttcactataatgtacatttaaaaaagttatgtgcttttttatttatataagaaattgtatgatatttttttttaaaaaaatatttagagttttctatattgatttactattttttaataaacaca

SEQ ID NO: 234242 - DNA, 820 bp, Cannabis indica
agagagcacaaccacgaccatttgccactagagagagagagagagatatcacgagaaagagaatggctaagatagtcttgtaggggtgtgacgttggcggtcgtgggggctagggtggctctttggcgtcgttcaaagcaaaagaaaagggagatgattacttcttagggtagggaagagtgaaaagggaggatggaatggttagggttatattattttctttctatatattgttgttttcattatttatttaattatttttatttcttaaaaaaaaaaatctgatacaaatttattaaggaaaaggcaatttttctggcccagctcaacccgaacccagcacctaaaccacacccacttgcccacatgaattcaaacccactcgaacctgaatcccaggaacttggtccccaaaatgggttgatttgatacactactttgcaaaacccaaaaataaaaactctaaaaatttgcctgatatgtagaccaactttggagtccataagaaaaattacaatatattttttaataaataaataaatatgttatctttcttcttaaactttggcatggtagttccttttttattagaatgtatctcaatattgagagttcctatggtacaccatgctgtgttgtattatactgtatactatttgttatcctaatttttgcactctgacgtggcatcacatgatggtgacacgtggaatcgacttcgagtatttgctcggagtaatatagtccaaacatgatacctcatatgcatgctcgaggcaaatcaataagcaatctgtacagcgcgaccaacacttagcga

SEQ ID NO: 234243 - DNA, 2432 bp, Cannabis indica
ctttcctcctggtttcaactgtgatgctcctgtcgatgctttctgtcacaccacccaagctgcttttcctaccttcaccactgctgtgcacaccacagtcgaacttggctctgatgctatccagaccatggccagaaccactgagaaatcgaaaggcaaagctattgcgggtgccaaacgttctgccttcactccacaatctgttatggtgggtgactccttcaaaaacatcctcaagagagcccgtgctggacctgttattaatgaacccccaactgctgatgatacctcactccaacaggcgggtgttgctgagcaaccccgcccagaaaaatgatgctgatgagttggaatgcccgtgggttaaggagtcctagggcattccgtaacctctcccttgtagttaagaatcataggcctagttttctttttgttatggagtctaagttgttagctggacagtgtgatacttttagaactagactctcttttgactgtgcttttgaagtcccacgaaatggtcttagtggtggacttttgttattttggaacaatgatgtaattgttaatattttgaactactcttctaatcatatagactgtattgttactttcaatgataatgttactactcatgtctcttgcttttatggctctccttatgttagtgataaaattcacacttgggttcttttggatagactttttgataatgcccctcaacttccttggcttattctaggggatttcaatgattatctttcgattgctgatagaagtagtagggcctctttgcctcattatgctacgattaattttcaagcttttgttaataaatattctttaactcctatacattttgttggtaataagtttacttggaaacatggtgatacttttgagcgccttgattggggaattgccaatgagaaatggttccaccagtatcctcatgcaatcctccaccaccttgggttttatggttctgatcatagagttttaaaattagtcttaactgatagtagtgagtgtaggattaggaataaaaggttccttttcgagaatcactggctgactgaaccctcctttttcaccactgtaaatagttcttggtcctctcctaattctggggctaacttttctcccttgtccagctttcttcataagcaaaatacttgtattcaggatattcagacctggaataggtcctttaatagtttgtcgtttaggattagggatatagatagacaacttaatagtatctcttccctccttccagcttctcctgagcaattagctgaaacttccaatctgcaatcccaacttgatagcctgttgtataaacaagagcttttctggaagcaaagatctaaagttcattggcttcgggctggggataaaaatacaaaattcttccatcacaaagcctcttctcgaaagaaaactaatttcattaggaagctcactcttgatgatggtagggtaatttcaaacactgctgctattgaagctgaaatttgcaggttttactctaccctgttccattctcaaggaagtagcagggatgctgtcaatatgatcctttctgctgtcaattccaggctaactgcccagcagtttgcctctcttgaagctccctttacttctgaggaaattaagacggctttgtttcaactttctggggataaagccccgggctctgatggcctcaatgcctatttttatcaaaagaactggagcacgttagggggtgatttatgtgctgctctcttggatatcttaaacaataatgctagtatggcctccataaacaagaccttaattgtgcttatccctaaaaaatccaatgcctcttctctgaaagactttagacccattagcttatgctcgaccctgtataaaatcgtctccaaagccatagctaatagaataaaacccaccatggagaatatcatttctcctactcaaagtgctttcttagctgataggcttatctttgataatattcttattgctcaagaaatggttcatgccatcaatcataggaaaactggtaaagttggatgggtggggttgaagttggatatggaaaaagcttttgaccgtgtggagtgggatttcctccttgccatccttcaccatatcaacttccctagtaaacttgtttcccttattcaccagtgtctttcctcggtttccactaagtttagtgtcaatgggaatttcactaaggaaatctctccctctcgtggattaaggcaaggagatcctctttctccttatcttttccttctctgctctgaaggtctggctgctgctcttcgtatccaagagcagcatggtaactttggtggtatctctatagccagatccgcacctgctgtttctcacttgctttttgctgatgatacccttatctttgccaaagctac

SEQ ID NO: 234244 - DNA, 931 bp, Cannabis indica
tactattccaaagcttattccagagcgacggaacaacttcacagtgaggagccctttccatggcttgggtaaggtaggcagatttacacgagaatcgaccattactttccagagtctaaacccacctatctttgccttggccaaagggattgccaccttttaagattgcagagatagtctcttgatcaaagaggttgtttaacttactgatatcccaatcactagtgtttaacaaaaggttagcaactttgctcaaaccattagcaaatgtaccatttggtttcggggaaaaatctttgctatgagggatccaagggtccccccaaatactagtatccctaccatcaaccaccaatacgcaggccccttttcttaagatagagttggcttttactacattttcccaaaactaagaatctgaatctttatatctacaattaaggaactccttccctttaagatatttaacttccagaatctagcaacacaaagattggcaaccattcagaagattccacccctattttgccaaaaaaagcttggttcatttctctagttttccaaaaaccaagacccctaaaagatttgggaaggcataacttgtcccaagctttaaggtgaagtccatggttacctttttcaaaaccccaccaaaaatcacgcaccaaaccatcaattttgttaacaaggcgatttgagagcttggtggattgcatagtatacataggcaaagataggcccacaaatttaatgagggtaacacgaccagcctttgataatattttcactttctagctctgcaacttagtagtgagattatccatgatgaagttgaaatcagcatcattttatcttgatctaaacaggggaagccccaagtacttgatataaccctctggagaaccaatcccctgttggaaattattttacc

SEQ ID NO: 234245 - DNA, 595 bp, Cannabis indica
tatatatatatatatttaggaaagtaagaaagtagaaatacttatggccctgttctctttaatttaattatctctgctctatattatatgtatttacagctactatacagaaccacaatgtataaatgacattattaaatttataagtaactgatgaaagtgcttacctaagcaaacaataattatgagaaataaaatgtataaaataaaatgatattgtatgtgtcacattttgtgtcgcccacatagttatattattgtttgattaaattaactacttaaaaaaaacctaattattgtgatcaaggaaagtcttcacgaaacttttacttattaaacaattaaatatggagaaattcgatgtgtacctaatttgttttttcttctacgtaaataattagaataaactttttcttttggttttaataatttgctgcatatctgaaacaatttgtttttattatagattttcggcaaccaatataataatagtatttaaaaaagttgtaaggagttaatgcacaagatttttacgtggttggggcattaatgaaccttagtccacgagtctgtatatttatgagagtatttatta

SEQ ID NO: 234246 - DNA, 1394 bp, Cannabis indica
taatttttgcaaaaaatgagcacactcagggctcgccaatttgcaaatagaaatacactagcgaatttaataatgaaaaaaatgagcactatattaggctcgcccatttgcaatatgtataaacacaatagtaaatttattaagtaattatgcgagaatgagcacacatcgggctcgccaatttcgcaattacaataaattttagtctcgatgtataatagccttatcaattatttttagattcacataaatatatgcataaaaaataaataagataggtgcacctgggagtgatcaacatacgcgagaaggcttcgagtcgccgtactcggcacattccactgggcccacatacatatacttgaaaatacaataagcggggctttttatgctgtgttgatgcttatattacaaggattgggccaatcatatttaatgactttggattattctaaggataaactcaaagtataaatgggcctaaaattctcagtattaaggcccaacaaactttaatagggttaccgcactttatcataactcttgtatacacagcagtgtcggcacagaacgaaaggtggtgttttggccttttggtacctctttctccatccgttgaactacctcctttatgaatttaatgtattgatttcatcaagccgttttagcgtttggttacgatgcgtgatgaaatttgttgagtcgtttctgatggagatgtcgcttgggttcaccgattagattctcttccagcaatgagaacgacaacatggtgagtgagaatgatttgttctttctttgttgagcacccttatcactgcttatttcttagtgcgattttctttactatgccaccatttatattgccaccgttgtaatgatttcttcaatggtgcgaggtcgtcatttccagaatgttcggtatgtgtttcatacgacttcttatctgacctttgagattctccaaggttgcgattctcctcgcggcgatgacttttgaccatcttgttatggttgctttgggccattttggtaagaactctttgccattgcttctgcccctggtattgctataataaagacttgttgtgaaagtaggatttatatcctgttcttcgctatttgcggtctcttcgaaggagatcgaaagtcgaagtgcatctatgcttgagcggctccaaaataagagcgtcttcagaatctgggcaactccgtaacccgagatagcagtaagattcattccttattggcaatatattatatatatctggttctctctgattgctgatatgaaatttttctcaggtcgggatgtttgtctctttacgggagtttgtgaataatctcaaacggagatgtttatttgattttgttgatgtgaattttcctcaggg

SEQ ID NO: 234247 - DNA, 723 bp, Cannabis indica
ttttgtctgcatatcatcaccccatgacccaattttgggtctgtattaaattaatatgtaaattatttaaatcctgtattaaaatgcataaatgcatggtctgcatatcatgaatgagtgcacctttaaaccaaccaacaactatttgttcacctcaaaggctgacagagttgagtacagcaacaccaaccaacaactatcatgttgaattcatgatacagcataatgacaaaccagaagctatcaacaacagcatttacttgattaattaacatgaaacaactaaatttactatcaacaccaacatttacttgatcaaatacagcataataacaaagagtgggatttacacagcttttaaagaatggaggataccacaaagacagtggtcatttgtcctattcttaaacgagggatccaacaataaatattgtacaaattttgctcacaacttcagataacccaaaaccaagacacaactgaaccagcagccataccaataaccaagaacaatacactgacaatacctgcagtttctgaatgcaaccatagaagagtgggaaaaacagcaatctcacaacagtaatcaacacaccaaaatcaagacaatatataaagctaatattgaaaatagtttccaaatacatgacaaacatcttgctgaattcattacaactttagtttccaacttcaaaaaaccagaagctatcacttgaaaacacc

SEQ ID NO: 234248 - DNA, 551 bp, Cannabis indica
acttaaagacctagagccatgcgagtaactaatgtatggcttcaatggagcaggcatagatccatgtggtaagatcaaactaccactcacttttgacactaccctaaggtagagcaccagtatggccacgttcatagtggtgaacgtaaagtcttcgtacaacgtgatgcttggaaggccagctttatacgacattcaagctatctcgtcaatataccatttatgcttgcgagtgttataacacttcgtcaactcttaccaagaagacctcctctattgttttgacactagggggatgaacaaggcctctctcgtgatagctagagagacaaagaagacctccggagttgaaactacgaagaagatggagatgatatctaaagccacttgaaggtttgtccaagacggggatgacatggagccctattttggagaaataaccttaggagttggtccaactaaggaactcaaagaacttcccttcaacacgatggacccaactaaagttgtcaagattggaacaaacttgatggaggctatgagtgagatgc

SEQ ID NO: 234249 - DNA, 1630 bp, Cannabis indica
aaatgcataaaaaaattgataaggaaatcgttaaattttttctcatgttacattgtaatggtctttccttccatttcaaaataaaatagtcatttcactaaaatagtagaaagaacactccaatactttaaaatgcaactaaacaaataaatgaaatgaaaattgtttcatttccattccattcaatttcattacttccaaccaaatgccaccttaatgcttaactaaacttctaaatatactagataggaaattttatatttttagaaaggccacatgtagaaaagtaaactcaactagaacaaaagcttagtgataactctatggtatagagttatttttagtggattcaaactgaaattattatgaaaagagtaatgaaagtgtgtttaattaattttttagttagatgttgtctttattttctagtaagtgtactaacttttgactgttgtaaattagttatatttagttgtgtttatttaattaaactttgtttgtgttaggaaagaaagttgaagtgccaagggaaatggaaatgatgcaaggctaaaagggaaattaaagctgaattcgggaagaattgctgaatagaatgttataacaactcaacattctggactgacgtggtcaaagttacaaagagaattttgtccatccacatcagcacccatgtggcagtcacttaaattgattccagctgctgttgtggagagaagagatcaaggctagtgggccaataattgaaagaaatggatttctattttagggtattgtattgtaccctaacaacctaagaactaaacaagggacaaccaccatcatcaagaacattaactcaattgccatttttgggagaaaaattaattgcaaaaaaaaagtacaaaaaaggaaggaggaaaagaaggaagatctgaagtgaacatatagaaggacagaagatccctatcactcacatttataggatttgtcttctttattcatttctactcttcttattcttctaaattttagaaaaactgatttgtagccatggattattatactctgttttggattattgtagttaaagtaagtatgagctaattttattaaagcttgagtgactataaacccctacgtttgggtatgattaattttaagcacgattttggcaatgtagccttttttttttattcaagtgagtttattgtcatttaattatacttatcggttgtaagtatagatttgattctggaaaggctaaatctagtagttacaacttgaatgatgcaagtgaattaccatgtttaggttgttcttagttagtaagataggaatattttgctaccttgcataacttgagaattggtatgtaaatgatgttccacaacttgatttaatataggaatatattgaatcaagtggtagaactgaattagtgagttttggaaaaacctcactaacatattgtgaattctattaactctgtgcaactttgctgaagtaagtaatgctgtaaaaactggacaaatttaacatagggggaatcagctattcaagtctaccattccatcgatactttcccttgcagttaatttttcagtagttgtcgtcttattccgagcatattttcattgttaccaattta

SEQ ID NO: 234250 - DNA, 1049 bp, Cannabis indica
atcctggtaaaatatttccaactgtagggtattgttatgaccctgtatgagtccgagagcgtcacggagattttgtaactcagtggcatctctgatggtcgtttgcgggttggttccaggtggaacgtttgtgttatgagtgccctggttgggtgcggaactgttattccgagtctcttgcacaccaggcgcgattccatctataggagttgatacaccattcccgacattccccggctgtccaggattaacagctggcggaaccattgtgtttctgggttctgcaatgcaggatccactgtctgtgaatttgttggatcaatcaggcctttacgagtttgcaccatcgtatttgttgttagatgttgaataaagagcgattcgtgatccttctctcaatgatagcaccaaaatgttgacctcgattttagccaacgacaacgagtcaaatttagtaagcgataagtgatttatagtaattgatatataataaagcaatgtaaagacacagaaatttttatagaggttcagccccgagcaattcggtaatagcctaatcctcgttatttgtattgacttaagatcaaggagaaaggttccttcttttatagctcttacaacagtatctctgaatgcataattcttagataatatatttagggtatagtctctgctaagctatttttcgacctcttgccaagtgaacatgcatcactatttatagggctagtaagcttagagaggaagagtttcccctctcatcacaacgcgtataaacagaaagatcgtgggatcaatgctgaatacaaagatcaaggaattgatgctggatacactgatagtgggatcctgtgtatgccatatccctgtaatctaatcccttagttatagtgatttcatggatgactcacaatttgaaagttgaattcgctaagtgttggtttctctgcgtagattaatgattgctttactctgggcatgccagcgaggcatcctgctcgaactatgcttcccgagcagatgctttgagtggattccacgtgtcacca

SEQ ID NO: 234251 - DNA, 1085 bp, Cannabis indica
ctcttcattgttaatccccaatcggaactttggagtcagtggattccattgtagccaaatcggtggatttcaacgacagttattgacggaaacgacaacagttcggagacgaaaggagatattctagatgttgaagatggcttatattgtcgttttcagaaataaatatataaaacgacaataatcgtaacaaacgacaacaatcgtaaaaacgacaattaacttaaaaaacgacaacaatcataaaacgacaataatcacaaaaacgacagtaatcttaaaaacgataataatcgtaaaaaaacgacagcaatcgtaaaaacgacaataatcataaaaaacgacaataatcgtaaaaaaaacgacaacaatcgtaaaaaccgacaacaatcgaaaaaacgacaatgattagaaagaatggcagcaattaaatgaaacgacattaaactcatgaaaacgacaataattaaagaaaacagtgatttatgaaacgacaataatttaaagaaacgacagtcatttttgaagaacagataaaaaaatttattaaacgacaaaatttgcaaatcagcaatagttaaaggcatacgacaacatttgcaacaaatgacaaccttgctcatttaatatacttgttataagaaattgagattcaacctttgttaaaaactaatgaaaagtgcacgaacctttttttcaccaatattacttaacactaaaataagatgatattttctgaataattaacgatttttattataattattagactaaaatatgtgtgatgcagtatgacattttataataatacctgtaaatattttcttgctttgttttgtggtggatgtataaaatattttaaattatatataaaaaattaaattatgtattttaattaataataattatttaataaaattatattaaaattttaactttactattaaaaaaattgtgactaaaatacttaacatattaaatttattgctaataaatacagaattcgaaaaatagtagcataaattttcaaatttctaaacttaacagtttcataattttattggtacctaatttaatggtcttga

SEQ ID NO: 234252 - DNA, 1831 bp, Cannabis indica
acgagaattccttcctgatttgctaatttctttttggttttagcaagttctttgaccattcgaataacttcgagacctagctcgtagtaataaccttcctcttccttattgtcaccattacctttaggatctttgtcctcatgattatcatcttgatcttttaattcaccatcttcatcgatgggattctcatcaacatacttctcattatgttgatttttcttgataagatgattagtcacttttgatgtatctcctacaacatatgctttcacatgtactgtaagaggatcacgtcatccatgggagtgtccccattacgagcaccaggttttcgacaggggttctcatggctaccattattgtagtgtaaaactatggtatccattatttctttagctcttaatgaaagtatcaaaatatttatcgagacttttgcaagccgatataaaatataataaagctaacgaaatagatcaaaaatgaagagtgagagcagagtttttatgaggttcaaggattaaagacctctagtccacgagttaatattattatatggttagaaaagcctatttgatttacataagtgttttgccaagactctaaactcaagaatttgctctcccgtattcatatataaccctttgcatgagtgagttttcttatatttatagagctagaattctagtacgtaaaaccttgcccactgatgaagtaaatacaaaaaacatattgactttgggttcatctagtgaagcctgacccatgagatattgtttttctaatgacgtggatgccatatcatgttaatacctactattgtggataataaagacacataaatgcttgattggtgactagttcatttccttatttggaatatttgattttcggacatgatcttggaaattccagatattgtagggtttagtaataaatgagtgagatacagagctagatactcagatatttattaaccattctcctagaagcactgcttgatgctatttgaagagttgtcgtgctggatgcttatctcgcctggacgagacatctatccatcatccagatggcttgtcctctctacggatcaggtccaatatcttggttgggcctataattgggtatgttgtagctgaattgaaccatctttgaattacacatgtcttctatccaaaaatacagataatagtaacaatggcttctattattttggatttcacgatatgaatgagtcgaagagggtagagagttctacaagtatgtcttatatttatatgttagaaagttagattgtataaatattgaaaaacttgtgtatacatataaatattgtaaatgagctttttatgcttatttataaaaaagctcattaattaatgttgtctaacactataatacataaatggttagtgatattttatatataattattaaattaaaataaataagatttgatatacttaattgcacttaatgtatgtaagacaccttgtggtaatattagacattaataatgtgttagtatttctcataattatctttttattcataaaacatatatgtataattaatatttttattaatcatatttatttattaaaaaaaaatatttttaagggtgcttctatattgcactccaaaatagtggtacaccagtgcacaatttttgtgttttgaatattcaaatagtttcaataataattttttagatcacagttcgcaatatatctacttaagtcatcttacaaagttttgagaaatgtaaaataatttacaatttagagagtaaaattcaaatatatattttacactcgtataaaataaaaga

SEQ ID NO: 234253 - DNA, 1562 bp, Cannabis indica
accccgattaacgggattagtatgttgtaatcatgacacatggcgttcctttgagaaggacgttacacgatcaaaggccaaaaatatcacaatgagtttacttagtgatcttaataagattattgaggtaagttggtgttagaaataccaggatattttggaatatttggggttgaccaaatgccctagggttagagatttctttgtggctaagaaatattaaaataatcttttcttaattaaatttaattattttatttattttctttattcttttttctttcttttcttttagtttctttgtttttatgctaaaaaatatgtatgtatatattgataagcttaaacataaaagtcaaaagcaaaaacataaaccctcccccttcttcttcttttctctcgagcaagtcaaaaacccaaacaacaaactttttttgatttgttctctgtcccagaagctcctcaacaccttaggcaacaactagggtaagcctcttgtagtggaagctaaggtaaggatttagttcttttttttcatgaaaagtttaggttctaaaagttaaattttggttttatagttgctgggatataagtaagcttatggctttatttttggggagttttggactacttttgatgctcatttgataggtttgtagttgtggggaggtgagagtgaagtttgagtttttaagctctcatggaaatttttgattaaaggcatgattttgatttctgtcatgtaaagattattataatgatgttatatgattgttctgtgaagtttggaatcatttggttaggttttggtgggattttgagaagttaaaacttgaggtttctcgttcctgtagaaaacggcaaactattttttttcaggaaacattgaaaacagcttgctgttttctaatcaactgattgcttttggttatgtttggaacccccatttatcatgttttcttgatgttgagggtattggtgccctagtgacctataggagaacttacggtggtggattaaagacctaaaacaaattaggttaagttgattaattagttcctttttttgttgtgacatagggctcgggatcgttgatctttctctatttgggtcgatcaacatacttgattgggcgatacctgatatgtattttgacttacttctgtatattagcccttttgtaaaacttttgtaacatgagatcctcgaaacaaatttttagcgagttatcctattcattgctatagttttattatagtgaagtttttattattatcatgaattttattaattaattaatctactattataaaactatgtttcaaaaacacatgtgtggcgtccttagtgattagggcgttacacaaagtgttgctcttgatcaggacaagtagtgaatttttagaagtctacggtgtacttctcaaaaggtgtagcccccaagaatgcgactaaaatatcggagcttcttggaatgaaaaaaatgaaaagagatgcaatctacctagatctctcactttttagatctctcaatagaataaatgaccattaattcttggtcg

SEQ ID NO: 234254 - DNA, 745 bp, Cannabis indica
ttggtgactagttcatttccttatttggaatatttgattttcggacatgatcttggaaattcctgatattgtagggtttagtaataaatgagtgagatacagagctagatactcagatatttattaaccattctcctagaagcactgcttggtgctatttgaagagttgtcgtgctggatgcttatctcgcctggacgagacatctatccatcatccagatggcttgtcctctctacggatcaggtccaatatcttggttgggcctataattgggtatgttgtagctgaattgaaccatctttgaattacacatgtcttctatccaaaaatacagataatagtaacaatggcttctattattttggatttcacgatatgaatgagtcgaagagggtagagagttctacaagtatgtcttatatttatatgttagaaagttagattgtataaatattgaaaaacttgtgtatacatataaatattgtaaatgagctttttatgcttatttataaaaaagctcattaattaatgttgtctaacactataatacataaaaagttagtgatattctatatataattattaaattaaaataaataagatttgatatacttaattgcaataatgtatgtaagacaccttgtggtaatattagacattaataatgtgttagcatttctcacataattatctttttattcataaaagatatatgtataattcatatttttattaatcatattt

SEQ ID NO: 234255 - DNA, 1400 bp, Cannabis indica
ccaccatccctaccataaacaggagtagaaagagtgggggtcccaccaacactcggagtcactcgaggctcctgaaggaattttaccacaccctcggctctcagagctttttcagccgtttccgcataagttgttgcttcattggtagtgatcaccagatcatgtctaatcttcacattcaaaccgaccaggtacttttctttcttgttgaaatctgttggcacaatacccagggtgagcttggccaatcgataaaactttgtagtatattctgtaactgtcatcccctcactttgtactagtttagtgaactctttccgcttagaactgcacacaacttcattataatatttggagttgaatagctttcggaactcttccccagtcataacagtgacaacctgggtgagggacaccaattcccaccacacaagggcgtcttcctggaactgaaatgtagcgcaggtcacccgatcattaccaaccacacccatgaaattcaaaattcgttcaatcatagtgagctaatgctcgaccttcatcacatcaggacctcccagaaacactggaggtgcttgcttatggaacctttcgtataacgacggcatacggttgccagcaacaggttgttcttctggcaccgttggagctgcaatggcctgagcttgttgtggaggcacgacaggaagaccttgctgccttagccccaaaatttcctcatcttgttggcggattcgatcttgcatctctgaaaacctttgctcctaatctagatgagcttgtggtggatttacaggacaaccaccctgaacttgccatggccacggccgcgaccactaggattctggggaattggatttccctgaccgcctccggtctcaaccaaattaccctgatttcttgtatttcactgggcatccattttataggacttagcctgcgaacccataagccagacaggttagacagcgatcataaagcttaatacaactcatatggacttaaaggcaacacacttaaaataaataattatcgtctaatatgcttcctaacatgctataataatcacacacatactaaacaagtacgggaaactgaaccgtgagccgagctttctttgatgaagattgtacatgtcttggcaagcaacggtagacaaacctggcgactttgataccaaaattgtaacaccctaatgctaaggcacgctacagtgcttttacaattacagtgctgtcattgctaatcaaagatttttctcgaaaaacgtgtcaaactaaaacttttataataaatattaaactttataatttgcataataatttacaaacaccgggatcctgattctaaactttatacaaatatgccaaaatacaataaccagatcgcacaacgactac

SEQ ID NO: 234256 - DNA, 766 bp, Cannabis indica
taattgatatttataacttccttgaaaaactatagaggatggttaaaaataactgctaaaaatatgcaacaaaattatgaaatttaaataataataataataaataaataaataaataattaaaaataaaataactacagagatcaatgttacccgacgataaacgcaaccaccacatcaccatagcctccgtcaaccaccatcaccgcaccagatttaaaaccaacacaccaccacaatatgtgtttgaatcttacatgaatcaaaatacctacgtgccacacacacgtacacataaacataattgtttggactcgtccttataacccatattccttcaccttcttctgcttctgatcttctttatcatcacccctcaaaaggggcaaactcaatgacacaacttcatctgatgatgaccctctctacttaaattccattcccaatttccaacacacacttaaacagagtcttaattattatatttataattatataaacttaatttattttttgaatggttaactttttaattttgagaatagtgtttaatttttatttaaaaaaatacatatacgcaattcatcgtacaattaaaaataaatataatatagtatttcttttttgttcttttatttcacatttgtacaggataagtgttgaatggaaggggaagcagagaaagcgttgaaggaaactccaaattctgaatcagtaaggagagaaagcgttattctaagccattagagcatctccaatgctaaaa

SEQ ID NO: 234257 - DNA, 1644 bp, Cannabis indica
ctacctactgatgaggagctgtttggaatggcaatgcctcaaatttctggaggagggtctgctcatcttcacagccttggacttcacaatatcaccaagcctagcagtcgcctccttttatgtatcctttgtcatcaccttcgcaactgtccctttttccttggatgtcatcaccaatgtcgcaaatgcaagtgatgaacatgcagcagacaccgcaaacacaacagatgcaacaatatccactacaaatgcagcagattccatcgatgcagcatacatcacaaatgtagcagcatccactacaaatgcagcaaaggccatcgatgcagcaaacatcataaatgcagcagccttccatgcaacagatggcatcgatgcagcagactccacagatgcagcaggcttccatgcaacatatgtcatcgatgcagcaaacaccataaatccaacaaccttccatgtagacaccacatatgcaaccatcttccatgcaacacacacaacatgtgcagtagttgcagtagatgcagcagatgacacatatgcatcatatgtcacatttgcagcaaatgccttctatgcatcaaacaccacatacacttttgacgcctttgatgcagcatatggcaccaacatctaagatgcaaccattgtcaccgatgcagcaaatgtctcacatacagcaaccatactatccgcaaataccagaagtatcacagcagccttactatccccaaataccgaatattccagatcaacagtctagagagaatgatgataatgactatgaggagtctacacaattgagattatagtattataatttgtaatggtatgaatatgacgttataagtattgtttatttgaatgtttattttagttattgttattttaatacttttattgaagtgtggattttaatttatgaagtagaaaatacttttattaattaattttattaatttcataatttatatttaaatttatatatatatttgttttgaattttttttttttcttttacataaaatctaattggcacgactttgtagtgcctacatgtatttataataaagtttacgtttctaattaacttggcaccgcattagttgtgccattagatcagtcaattggcatgtcgatatttgttgtgcctgttgcttgttttaggcacgaacctattggcacgactaggggtgtacattaaaccgctcaaaccgcccgcaccgcaccataccgcaaaaaatgcggtttgaaattcttcccaagccgcagggtgcggtgcgtttttcggctttgaattattaaaccgcggttcaaacctcaccgcaccgcatgttttaaaatttcaatttttatatttatttaattaagcccatagatatgagcccaacccaagcctataaatcttagagaaaaatccataaatcttcacaaaccctctcttcttaccaacaaacccaagcccatacatgtgtattgaaattttgagttggaagtttgtgtttgttttatttttaatctattgctgaaagtatgttagttgtatatttatattgttgttggaatttaattagtttcaagtttcttattttgatttaggtgtgttgttcaaactttaaaagattattgacttattgttgt

SEQ ID NO: 234258 - DNA, 1541 bp, Cannabis indica
atatttgcctcctgcttgtttcactttgtccaaaaaaggaaaaacaaatagtttgtaaatcatttacaaatatgaaagtacctgatggttactcgtctaacatcaaaaacatgggaaatgaggctgaattaaaactaatgggtctgaaatcacatgattgtcatgcgttaatgcaacattttcttctaattgccattagatcagtcttgccgaaaaatattcgagtctttgacacatgttagcattttctttaataagttgtgcgggaaagaattagaactggataagttagatgcattacatgaacatgtagtaaaaacattatgcaacgtggaaaagttttttctgtcatctttttttgacatcatgatacaattaatggttcatctagtgagagaagcaaggttgtgtaggtcggtttgggcgagatggatgtatccatttgaaagaaatatgaaggtacttaaaagttatgtgcataaccaccatcggccaaaattatctatggttgagtgctacatatctgaagaggctgtggaattttgttcagagtacatggccagagttgaggcaataggaattagcaaacgaagaactgaccgagatgaggttgatagaggattaagggggaaagggacactggtgacagtgtccaagcttaaactagatcaagcccaattagttgtgatgaacaataatgcagaggttcagccatatataacgtaagtagcttttcctttgattaacatttcttaagacacgataaacaataacttgattcaccttacttgttttaccgtgaccgtatggagtcgttacaatcaatggttccaagaaatcataaaaataaagaaaaatgggttgtaaaccagcatcgtcaaactttcattgggtggttaaggaataccattatagcaaagttgaacgaaccgaatcatggagtatctgatgttttgagtcgtattgtacttggacaaacttttgcggtagcaaagcatgaagcgtacattatgatgggtaaacatttttgtacaaagtcaggagatattgctcgagaggttcaaaatattggcatacgtatcgtggtagaaaccatgcattttgcaagttcaaaagatagaaaccctgttttaggtactatgacgtattatgggattattgaagaaatatgggagctcaattattttgcgttatgaattccacattttaaatgtttttgggtagacaacaatgttggagtaaaaactgacaagcttggttttactttggttgatttaaggaagagaggaagcaagaatgatccattcatcatggctagcaaagcagttccagttttttacatttctgatccagctaataataaatagtttgctgttttatcgacaccagagaggagggtcttagataatgaagaggatgaggagaatgctaatctatgttatgatgacttccttgttgggcaaccaattcatgaacaagttatgggaattgatcgtaaccttgaggaagacgatgttgaatacattagaaacgatatcaat

SEQ ID NO: 234259 - DNA, 879 bp, Cannabis indica
gtcaaccttaaatgcattagttggctagtgcatttaaggatgtcaacagtaaatctatcaggattccaagcgatgacgatcttaccaccagtatttttttatttttaaaaactaatatttttaccccttaagctttgaccaatacaaaattttgcctccttttactaataaaaattaattttaaaaattataatgttctatttttttaaaagcaattattgaaaattattaaaaaaaaaataaataattttttaaataacttaattaattttaaaatttaatttttttaatcattaaaaatgattatttttaatatctaaattaattttttaagatttaccaaaaaacaaaattcgaatctttttcattttcattctaaaaaggtacaatttaatagttgtcaaaatttaaagagtaaagttattaatttacaaagacatgtcattaaattataagatagaacttactaaatttctataattgaaaattttagaaaaaaaaaaaaaatttaacaagtcgtatattttaaaagtcaaaatcaatattgttaaaaattcaagaaacgaaaattgctaattattctaaaaaaaaaaaagaaaaataatatactatcttgcctctaaaaaaaaataatatactatcttgcctcagtttcttaaattaatcaacttcacttcgtacttataaaaattgtaactcttagtttgcggttttttgacatgaggataaatatttttttggaacatcaaaatattaaactgttaattttgaaatctcattcaaaaattggtttttagaaaaatgtgttctgaaaaaaactatatatgtgaaaaattgtttccaaaaacgttatatgttattgtataatttaatgttttt

SEQ ID NO: 234260 - DNA, 979 bp, Cannabis indica
gattcaacagatgaagaaagtagagcacaacttcaaaatcattagcaaacttgtgagctatgacactgatatcaatggctttgttggaccaaagaatatcaagaagctcaagggtgttaaggcgaaagagctcatgttatggccaccggttagtgagatcgtcgtcgatgatcccgccacgggcaaaattcactttaagagctttgctgggatcaccaaaaccttccccgttgaggcttttgctgctggacagtaaattatgcatgcaagcatgcatatatataaatgagtataataagttctaatacttatataatataaccaccacatgatgccctaaaagtaatattttcttcatttgtagtcttagttttggtttatttgcattatcggatttctagttcttttttcttttctttcaaacattataagggggtttggaagttctcatggtgatctatgtttcaaaataaagtaatatgatttattatgccataaggttttagtggtgaccatatataagattttaaataagcacatttcaagtacatttaaacttactagtatttggttttgtggaaaagtgagatcaaataatatatatatatatagaatactttttaatgagtattacctatattgttagtaaacaatttaactataaatattaattttaaaatattaaactattaaattttgatccaacaacgaataatatataaaaagagaaatttaaattttatgcgtaatttaactacttaatttaaaaatatatatataaaaaatattacttttcacactatattaaaaatatgtttatatacaatatacttaagtcaaatttaactttttttcttaatttttttttcagctgatggaacaatctcaactcatataatgtaaaaatgagagattatttaatttagatagaaaaattgaacataaaaactcaaattttcataatactacccatgaatgg

SEQ ID NO: 234261 - DNA, 1381 bp, Cannabis indica
ttttttaaaaaaaaaaaaaaggcttcattatctttgagatatctaattaataaaaaaaattaccttttaaaaattgaatattgggtcaacttttgagaaatccaaagagcccaagcatttagaaaaaatggtctgcagtaatgttttaattctttttcttttggagtacatagaaaactttggtatagagagaagaaaaataattttagaaagataggttagtggtgatattattagtgtttgttgagatttatagataatagttagcacaaaacgttacaacaaataaaacttttcaaatgactttgtaacttctaaaatgatttttgttaaaaataacttaatactccaaaacgtatcactacaaaactattttaatataataataactatattatatatattgaatgtgtctaatgaatgggaaaatgttttcatcataaactccataataatgaagattacaataatatcctcatatatataggcaaataaaaagctaaataaataaggaaaatagaataaaaaattaattaataaataataaagtataattacatatattaaataataaataataattaatatattaaaattcataatagttactatatgtttttaaactgatgctttgaagtttctataataaagtgtgacgttaggttctataaaaaagttgatctataaattattatttttattaattagaatgtactaaaaatatcatttattatgataatgtgagaaggtgaatagtttttaaaattaattattatttttattaattagaatgtactaaaaatatcatttattatgataacgtttatgataacgtgagaaggtgaatagtttttaaaattaaaaactaataaaatacttattaattattattagtttgttagatagattatagatccttttattattattacataagaaaaattagaaaaaaccacaaattttgaaaattagaatcctaaaatattaaactgccacatcattgtgcttaacaacagaattatatagatatatagatgggcttctccatcaattacaaattactaagaagcccttataatattttatagtctaacatgtattgatggtaaaggaggtcgtgtgttaaggaagttgtcccgagcaattacttttaacactaaaatgtgaaaataatattctgtgactgttgtagctttgaatgatggtgccaacaaccataactgttttgagttaggatttttaagcactgaaaaatcgctcttgggctcttgaacatggtccttggtgtgtacgtggatacacttttatcttgaaagcatgggcaccaaagaaggagcattttgacatgtttgaacatgttagaatctggttacacattttt

SEQ ID NO: 234262 - DNA, 1511 bp, Cannabis indica
tgattttagtattcataactctatttcgaatttcattttttctttttcttacactgaatttgaatttgcaggttctgattgcggcaggcagtgtttcaaaggagaaaacacaggtattaattttattagagagaacgcaaatttgaaaacttagaatatagtttgattgattgtgctgttacttttttgtgccatttatttatgtaattttctgtttgttgaataagatttttctaactttggttttgactaaatgtgtgcttacttcgttgagttttcagttatttgacttaacagttcgaacttgaaatacttcagtttgttatttaaataaattataagtgtatttatttcaaataggctcacattcgagagctggaagaagaagtgaatcttctgaagaatctttcacacccaaatatagtcgtgagtatactttgcttttcttgtttttgtgggaatggtggttgattgcttaatttcttatggggtttaatgttttgatttaaagaggtacttgggaactgctagggaggatgagtccttgaatatcttgttggaattcgttcctggtggatccatatcttcgttgttagggaagtttggatcatttcctgagtctgtaagtcatttattgatactgtttatttttactttatatatatctgttgaacttgatggttatactggtacattagctataagtttttgattggacaggtcataagaatgtatacaaaacaattactattgggtcttgagtaccttcacaagaacggaattatgcacagggatatcaaggtgactctcccttaagttactcgtttttgtaaagttctactagatctttatctgattcaatagtggacatgttcgtatatagggtgcgaacatcctagttgataacaaagggtgcatcaaacttgcggattttggagcatccaagaaagttgttgagctggtatattttcattttaaagtttgattcacccaacactaattaaacatttcatatcctttaataagtttttccttttgatacaggctactataactggtgccaaatcaatgaagggtactccatattggatggctcctgaagttattctacaaacaggacatagtttgtaagttttttcatttttgagctaagataacatcgtttaatgaagtttataacaggacatagtttgtaagttttttcatttttgagctaagataacatcgtttgatgaagtttataacttgcacttcaagctcaataaactccaaaataaggaaagaagatgaataaattttaagtctcaacgaaaaaattaattacgctcaagactactacttcaactatgttttttaaacttctcctacgtttatgctctaaataatgtgaaattctctatgttttcttcttctccacatcgtatgattcttatccgagtatattagattctggatagagtcccttctagtctattgtattgaagcttcgtttgacagattttcattccact

SEQ ID NO: 234263 - DNA, 2876 bp, Cannabis indica
ttcacccaaatgttttcttgtttttctactgcatatacaattacatcattctagagatcatcgtagccaccgtggcggctttggttcgagccgcgctgggtgtggagctggagccaaattttgaagagccgtacctttccacatcgctacaagacttctggggaaggagatggaatctcattgccagcgacagcctacgttccacagtgtatattccagttcggaccatgatgagccgttggatcgggaggaagtgggccccagtccccgcggtgatcccgacttttatggtgtctgggatcatacacgagtttattttctacaatatgagaagatcaaagccgcctacgtgggaagtgacgttgtttttcgttgtccacggaatgtgtttggctgctgagattgccgttaagaaggccgttaacaggaaatggcggctgcctccggtggtctcggggtccttggcggtggcgtttgtgatgactactaagttgtggctcttcatgccggctcttatggcattagaagccgatgtaaacgcccatagagagatgatagagtttgttaaatcaatcaaaagtagcttttttaggcctatcatttcataaaatatttgaagaaaaaaattttataattatgctctatcatgaaaatcatgtattttaatttaagaatcattgttatgttttttcaagatgcatgcatgtatgcactatttctcattttcaaaattttttaataatgtttaaagggaacttatgtaaaacctcagttcaattttgagatccttcaaatggcacaaaaatatatgttatacctaaaattgacttttaaatctagatggtacacaattttctatgagataaataatttttcaatatcttttttatttttgtgtaaattagtacattaacaaggctaaacgtgtaacttaatttattagatagatttaccctttaacatatagtattttcaatgaataaatttgtatttcaaaacatcatagtattagtagagaaaaccaataacaaacccatttgaattgaagttgcccgagatgccaacatgtgaacagcaagtggaaccacatttgaaaaattatcaagagcagagaataattactgttttggatcctgtattttgcaaaaattactaattggatcatctgtattgttagtattaaccatatgtttactattgacttgtattaatatattgtgtaaagttataatatatttttaataaactcgaccccaacactaattatgggttcgggtcctggtctggattccagtacgggtttgaatcttggtcacgggtcggggtccgggttcgaatttagatcccaggtcgaggttagagtctcaggtcgggtccaaatcttggtcccggtctgggtctgggttcgggtacgggtctgagttgaggtttgggttccgggtctaggttcaaatcctggttcgggtcccgatcacagtctcggtctggatcccagtcccgatcttattggttcgaatttgagtcccggtctgggttcaggtcccagtttgggtttggattcgggtctcggtctaggtctcgatcccagtctcagttcgagtctcgagttcggtcccgggtctgggtttgggtcagggtgtttgagtcggggtctagatcccatgtcctaggctcgggtttgggtcctcggtaggttcaggttcaggtccaggtctcaagtttggttctggatcctgagtatcgggttcgggtctagttcttagtccaatccaagccccgagtttggatcccaatttgggtccaagtcttgggtcttaggtccggtcctgggttcgggtaaggattcgagtctgtgtccaagtccgagtccgggttccaagggtccaaggtcaagtgtttgggtttaggtccagatgttcgggttttggtctagatctaggtccgagcccaagtcccgggttcgagtccaatgtcctaggtctgggtttgggttcggttttggctccctgacaggctcggtctaggtttgggtccgggtccaagaggttcccggtttggttcaaggtccgagtcttgaattaagaattttttaatatattaaaacgagatcgtatcaaattcaatttggaaaataattaggcagcgaagcaaatctgatccgagatccaataagtatctgaatatttcgaattagaaattattcgtcggatctaaactctaacccaatccaactatatggatctttttaacatgctaatttcagctcaacaaaatggtggagctagatcaccaaggacaagtagcttctatctactcctaagttatgaactaaatcaaattttgaaactatatcaaagttaattgcaatactgtcattttttgtgcagatagtaagtttacttttggttggatagcacgtgatatgagggtcgtctggtggaagttgtagctaactgcaaatcagatagtgtttgagcttcacatagctaaagcgattgggttgaaagaagttctcaactagattaaatggaagacagatgatcaaactctctacaatagcctgttatggctctcgagcaatagtctcctattccttttgtggtagagtcaatttgtcttttccttgttcaagctatttcaagcacaactgattttttgaaaaatattttcactttttcaattttaaaaacataaaattgattaaaaaagtgttaccaaacgccaccaaagtgtttgaaaaaattttaaaacatgcaatatatataattatcaaaatatatatatcattttaaaatattttttttttattttttcagtcatcaaaacaagatttgtcacattttgttttaaaaaaaatactttaatggttgataact

SEQ ID NO: 234264 - DNA, 2945 bp, Cannabis indica
tagagcatttgtattgtcagttttgacgatttggttaacgattacatataagagaaattctaaagcacccatacgtatctttttagcgttcctcatctatctaatatacatagctgagacaattacatattctctctttaatctcttatttgtttaattacggaattaagtcgtgttttgcgtcgtatttttttttaaaatttttctcaattctttatatatatattgtacttataataagtgatataatctaaaacataatatttttcatgtgtgtattattattaactactaaaacgaaattgattataaatttattaatttaactatataattagattctatttaatcattatttataatttattgtttatataatttttttttgtaagtgttgacctcagaaattgatcaactgacagcggagtcgtattacactaatgcttatcacatgttacacaattagattagataataaaagaacacaaggatttttatagagattcaacccttgagttaacgggtaatgacctactccccttttagttgtattgatactgagagataatactattcagatcactataggtgggatctgatatagctctcttcagattacaatgtatgaatcagtaggcatatctctaatgagagagatagggctttggaggcgtgtgagagaaagggagagaaagccctttgggcatgtagaagagagagaaaagagagggttagggtttcagacttagagttgagagctattgacttagggttttagagataggctaatgctctttatatagtagagcttacatgcctaatatccttaggaatatgttaaataaagctattatttatatatttaattaataaatacaaatgactaaattgccccttgaaagtagatattttcgtagcatcttagtgggttgtcaaggcccaactcgcagcttggctttctgtcgacgaatgaaggttgcgcatcaataatagcaagggaaaagttggtcggccatgcacctgcaggatgcaagctggtcgggcatacaaggtctgcaagctgaggtctggccaaccatactcttgccaaggtctggcatgtcctattcctgccagggtttggcaggtcatgttcctgccaggctctggcaggtcatgttcctgccaactttgtcaagagttggctaggtttttgcatgtgttggccagccttggtgatggccagccttggtaatggccagcctctgtagatggaggtcaacctttaaaggtggaagccagcctttaaaggtggaggtcagccttaagagatggaggccagcctttgtacaccttttccttgtataggtcaggcttgctttgttgaatggaccctcccttggtctgaaagtcaccttttggccggccagcttgtgctcaaaccttggccggccaacttgtgctcaaaccctggccggccatacaagctcatcctggtcgaccctatagactccccttagccagccagacatgttggtacaactacttgatggctctctttattccttttgcttgctgcttgatggttttgccataccttataaggaggctttgttccgttattggcaaggttgtattccacatgtactctgtcttggcttacgtggacaacccatgtcaggtggacaaaattttggataacattttcccacaagtccttgttcaaacatctggtcgaatagggactttctagctctcatcttgtttgtattggtctctgtcgagtagccttgtctagccaagtgttggctttttgcatgacatacttttagatatttgatcttctttctctatatacgtctcatcttctcttctttaaaattctcttctttgtacctgccattgataagtttcaagctttttaagcttatagaaacttttttgttatcatgttagattgtaatctttttggtatattgatccacatgatagttttagaatgtataatgtgtgaatttctgatgaaaaagatttgattttggccttcgttgtaattcttgactctttgagccataagaacatgaggcacatattcgagttttgaaaaaaaacacacatttagattcaaaactaaccttggctggccttggaggtcttgcttgagacctggctggtcctaagacttaatcatgggagttggccagccctaaggtttcaccctataaagttagcatgtttatgcctaggtttggtgaccctagccggttcttggctgagtcatgggaccctagccgaccttctcaaggcttggaaaccctggctagcttgggccttggttccaagcgagtggctagctttttgtcctcttttgactttggcaagagtcctatcatggccctgtaggcatatacaatcttagtctcattcatggttcccttagaaactttgtatgaaacttaatggtgagtctattatagtcgaatactcaacttaagacccaacatttgtccaagttgttacacttgagacttgtactttgctgatacccagccttgtacaatgacattgtttggcatgtacccttgagtatgattgtccaaagttttgtctatggcttggaagctgcaaggaactctaccttttggcttggaaccttccaaaaactctgccttagccttagcccgatacgtggttcctataggaactctgtctagttcttctctggctatacggttcttgctaggccttgtccttatgcatgtgaactgattttttattcacattcggtctcaaggctttcatgttcttgcttttggcctataggcacttagtttttgaacactactattatttagccttaaagcctttcactatggacatatgatcgtcctagctatcttcttatggccatgacatgtaagtatccagatttaatttttttatgccaagccaaagtatgcatgcac

SEQ ID NO: 234265 - DNA, 638 bp, Cannabis indica
taaacctccatgtatcctttggcgttaatctattccaggattcacgtagcctctctgtgatttggtgtcactgaggatacttattttattattgttcgaagttgtacttctcttcttatgccacgtgtttctttgtccaggaacatggatagcatttacccccaagttctcgagaactttgcgagttgtgggagcttgcagtcttcctccaaatctttgaggcacatttatgacacgtggatgatcgttgagaacacagatgtgttctttttgttgagttgttcgattgaaatatcaagaatcaagacgccattggcgtgtcacgcatgccatgtctttagtgaatccgttgacaatacgctcgtgtagggggcgcatttccttggaactggttaggtaagacttgggggtgttccttaaaattcctcttacccattgaggatcgaggcaagtttttctgaagtttttttagggaattttttataactggagaagaagactttgatcgagtaatagccatagataatgaacaagcaaagtatttatatgagaaactaacaaataaattggaaaaaatgtagagagaaaattataattttttttaaaaaaacctgcataaatttgatttaagtaaccac

SEQ ID NO: 234266 - DNA, 991 bp, Cannabis indica
agacaatggagtcatatttattattaatgcataccatgttcacacaataagaacaaaaagtaaaagagacacaagattttataaaagttcggttcctttagttagcgggtaatgacctactctcctattagttgtattaataccagagataataccactcagatcacaagggttgtggaatctgaagtggctctcttaagattacaatatgagaatcaagttggtaaattccaagtgacggagaagccttgggcgtttagatgaggagggaagatagagttagggtttcagacttagagcttgagagcttttggggagctagagacctcttacacttcgaggattagggttaggttaatgctcttttataggagagcttacatgaagataataacctaatatcccttaaaaataggaactatcaagcattatttacataattaaataataaatagtaaataggttaattatcccttaggaataggtgagtaactgatatttctcctctatttttgtgggttgatgaagtccaaatcacagcttagcttgttctccctaatgaaggctgcgtgccaagtgcttgccaggtgtagactagggtttggccaaccatgtttctatcagggtctggccggccatgctcctaaaaggtctggccgaccatgctcctaccagggtctggcaggtcaagtgcctgcaagtgttggccagcctttgcatgtgttggcaagccttagtacgtgtatgccaaccttttcacaactttccttgcaaggttcacacttcgtttgtcgaatgagacctctttggtctgacaaccatcctttggtcggccagcttaggctcaaaacctacccgaccatacaagctcctcctagccagcctacgtactccctttggctaacagacatggttctgcagctttttgatggattgcttaactcctctcgcttgttgcttgacggttctgccatgccttgtaaggagactt

SEQ ID NO: 234267 - DNA, 1804 bp, Cannabis indica
aatcacgtaatacgcctatgctagttagggtgttacaaaaatacttatgtaagattactttaaagcttttttatctcgataatattgacctttgtactaaggctcattaacaccccaatcacgtaaaaatcgttgtttcttcttctttaatttatttctttcttaaacttatttatttttaattagtttttaaaaatatcagtaaacactaaaaaggtagaagcatctctttcggagaacttttaatgatcctgaggaggtagcagcgtctcttttggagaaattttgatgactctaggtaggtaaggactcaacttgattatcatatcaatttttttttatgatttattaaatgtttgaaaaattaaaaaattaatttgtatatttttttggactattatggggcactgagtaccaaatatatttttgcataattatttatgcaggttatgattttttagatttcattcaattgcaactattttgctgccaaattttctaaaatatagagaatatacacttttgctattcttgttgcttgtatttggtattactaacgatagtcatattaatcatgacttctgcatattgttgtttcatgatttggtccttgtgtcatcataggtagaccacatgtgcactcacatgtaggtgtaagaatataagacctagaatctgtacaggaaatgaattatttgagccccaatattatggtggctatcaagcacaactaccctattttgaatttcgttttttgtgataggtatcgagagctggaaatctagtggacggtatgatatacacgagtagcttgactcttatgattattgtggtttctctattttgtttatacatgatgatgagataatttatttcagaaaataactattgagggattttttattatactatcggtcttttactagcctttataagctcacccaatatttttccttctaggaatccaatttagaatttgtaaatgtgagataatcgttgacagagaacgaacgatgtgattagtttagtcctattctagttattaaactcttttttaaggattgtttatgtatctaaccttgaatgaatggtctatcatttaaatagctatgtaataattagcaatgattatgaagaatatgatagacattaagtattcttttggtgttttcaacttattaaatctatgggaattttcaaaaatatattttcttatgttttagttacaattttataacttaaaagtttttatttataaaaatacgcttgtaaagttttaaaattacaaaaatacacttttctcattaaaaagtaagaaaataacaaaaaaaaaatagtgagaaatcagtctcacgacaactataaaacaactaaaaataagtagaaaaataaattcatgaaaattataatacaactataaataaaatataaaacaatttgtaaataaaaaagtttaaagtagaaaaaaaaaaaatcgtgttgacatattttttagtttttttttaatttttggtctattatgtcatttttcttaaatctaactatttggtgactaaatagttattggaatattattagggccaagatgcaaaatggccctaaatctaacaattaagttaataaatgtccattttttaaaaaaattaacaaaatgtccttttagttaaaaatttgatgataaaattacaattataatcttgaataattaagtgtttggtatagttattttgcacaatagtataacgtttttatgtgcaataatatattaaaaaaaactgaacggtagtatatatatatattttga

SEQ ID NO: 234268 - DNA, 1751 bp, Cannabis indica
tttgaaggtttttctatgaaatttttagttttcagttttaagcatttcttaatcaatgtacattcctttcgtttgtatagtttcatttgactaattagcttcgaaaagaattctacatcatcgatgtcttcaagaagtggtaagtttaacatccaatatcttgtaagtaatctttatgctatgaatgaatataacataaatattgtcatatttactatttttttattattgcagaagttgtggttcctctactttttgagagcaaatatggcactgaattgaatccaatactccataggcatatatataaaagctctacaacttctgatcattgatattggaaaagaattatactttatttttcttattaaaatacattatttataatatcaatttttattagtttctcatcttttttggatcaatccattgtaataagagtagactcgtgtaaatgtgtatggaacatattatttcttaaacaaaacttctccctattataccttaagttttggagaagtacatatatattaattactactaatagcagtctgttgtatgattttctttctcaattatatgtctccaatttacgattgggtcttttgattttagtctcctacgattatcatattagtttcatttcaaagatggtaataattttcaaatattctaaaatcatcttattattatgatcaagttagttaaaatttcatgattccatgaatcgtttacaattcataaacaaatcgttaatatatgtctattgtcatcgtcataacttatcttgacactaattttataatgtgaagaaaaaaaaaactaaaaattacttattttacaaaatgtaatagataattataattaagattttatgattatgtaacttaagttagtaattaatacttaatcatggtagaaccattgttattggacaccctagggtgtttagcgctactaaaggtgacgctttgtgatattccctaaaagttacttgataattaattgcatcaataatgatatgacaccaaaaaagttgttatatactattggtatcttttaacatttctcatcatggcagtcaagtgaagaactgacctattacactttttctcttaattacactgatgcgttaataattaattaaaaaaattaatgacaaatttatttattcagttaaaaaatatagatgttaaacttaatccttttaaaaaaaaataaaaaaaaaaaaacttaactaatgacaaattcattatttcaataaaaaataatttagaatagactttaattatgtggtttattagtcttaaaataagacaataaacactcctaataattttgtaacgtaatctattgttaaaaaaatgtaaaatacaaaattaattagtaaaaagataaaccatactttaaagttatagtataataatatattaaaaaataacaaaataaaatattaaattcaaattaaatgttgtaccgaatgtcaattaggcacataaagaataatttagcaataattaagaatactcttagaaaatattaatttaacaataattttatttttattttctcattaggcataaatgttcaaatggtattgtacttaacatactatgatgctaaatacattttagtagtcgtctataaaaaccaaattaaggttaagcaagttttagaaaataattattcattttgatgatttaaagaagattaattcatgacccaaaaaacatatatatacattttatata

SEQ ID NO: 234269 - DNA, 1774 bp, Cannabis indica
ttaggagaaaaaagaatagaagatttagaaaaattaatggcctgcccagaagcctttgaatagataataaatacatcctgaagagcaaggcaagaattcctatcagcggtacaaaacaaaaggctatcatcagcaaaaaataaatgagaaatagcaggtgcatgtctagatatagcaataccattgagaacatgagcatcctgtctccttctaagaagagaagataaaccttcagcacagagaataaaaagatagggagacaaaggatccccctgcctaagacctctcgaaggcttaagagaaccaaaaacttcaccattcagaagaaaagaaagattagtagtagtaagacagttcataattaatctaacaaaattgaggggaaaattaaagtgaaacataaggctctccaaaaaatgccattcaacccgatcaaaggccttagccatatcgagtttaagagcagcccagccacacttaccctgccttctattattaatagcatgaactatttcttgagcaataagaatattatcaaagataacacgcccagaaacaaatgcactttgaaaaggagagataatcttatcaaggacaactttaagccgattccctaaaactttagaaataactttatacatagtagttaaaaggcttataggtctaaaatcttttagagagttggcatgctgttttttaggaattaaaacaataagagtagtattaataccagagaaatcaacacccttatttaaacaatctaaaatcgcattaacaaaattggctcccagagtattccaatttttttgatagaaaaaagcatttaaaccatccaaaccaggagctttatccccagaaagactaaaaaccgcttttttcacttcagaagctgtaaaaggcctggccaaaaattcaatatcagactcctctaagggggggtcctaagcaatccaaaaatttgatttgtggcctcagcatcacaaccctcagaagtgaaaagattggtgaaaaaagaagaaactatgccaaacatagctttaggatcattagtgctattacctaaatcatcctttaagtattttatagtattattcttcttcctatgggaagcaaacctatgaaaaaacttagtattcttatcacctgctataagccaattaaccctagacctttgcttccaatagacctcctctttataaagaagagcatctagctgagactgaagattttgaattctaagggtagtctctcgactagaagacacagaattttgaagcctagcgatctctttttgagtatcttgaattcgggattgaaacataatcttagtagatttgttccaagacttaagagtagaaacacaagcatcttggcaaaagagaaactccctaaaagctttgtcatgagaggatactcgagaagaatccttccaagagttattgacagtggagtaaaactcagggctttgaagccaaatattttcaaattggaaacgcttcctacaagattgaactctagacacaacattttcagcaagaacaaccttaagaggacgatgatccgagccataataaggcaaatggtgcaaattagcattaggaaaaaggttcctccaggattcagatcctagagcccaatcaagacgttcataaacaaatctattatgccaagtatacttgtccccctcaaaagaaaggggagagaggcaatatttatcaagaaaatgagtaaacctctccatgtcactatgattataataagtgctccctatttt

SEQ ID NO: 234270 - DNA, 1499 bp, Cannabis indica
ttttttactgctgattctgttgatttgcctgtgttttttcattatttttttcttcttctgtaaaggttcttggaagattagcatctcaaatatcaactgtggttcaaggcaaggataagccaacatatgcaccgaatcgggatgatggggatatgtgcattgtgctcaatgccaaagatgtctgtgttacagggagaaagctaactgataagttttaccgttggcatactgggcaagtattccattcatgttctaaaaagcatttattgcttcactgtttaaatttgggagactgcatcctgatattgatattagtttagttgatatccatttttattagtgcagtgactgtttgaaatatacactccaaaagtaattaggaaataaatatacatacgatcaattcattgtgattatgaatacataattatagtatgtaggatgagcagggggatatagatgatggagggtttataatgaatgattgattctcttaaattggtttagcaagataggctataaattcattcatgcatttgtgtgatatctgtaaataagccgattgtttggttttttcttgatgatttaccatgttcgacttgtaggtatgtgggacacctcaaggaaagaagtttgaaagaccaaatggccaaagacccgacagaagtcattcggaaagctgtgcttcgtatgcttccaaggaacaaattacgtgatgtacgttttgaggatgaaaaatctatgtttccttaaaactttttttcccttgtggattcagcctttgtattttttatttctttttggctataattggtcatgtttttctctggtttatcatacatcagatgcttctgtaattgcaggatagagatagaaagctcagaatatttacaggaagcgaacatccatttggagatagacccattgaaccatatgtcatgcctcctcggacagtaagggaaatgcgtccccgtgctagacgagctttagtacgagctcagaaaaaggctgaaatgcaagaacaaaaagctaatgatacaagaaaagggagcaaggataaagcagctgaagtaagcgcttgaagtgtcattgaagcatacctttcttgagattatccttttgtaacaccttaaatgagtttgtggatcagtccataagtttgattatccgttcggattctggaaagtgtagcattagtccattttactgaaattttttctaggacttccatcataagatgtcaacaattgttttagcaagagaaatgggtcgctgttttatttcgtcttaaaatcgttggaaaaattgcagctcttgtgagcatgttattgaacagtgcttttcagttgaacataatatggcacgaaaaactcagaacatggtttgtatgcttatctgtttacaataatatgaaattcattacagcttagtagccgagtttctttctggtgagacttcattcttttcttccattgattgaaaatgctgttttagtaaac

SEQ ID NO: 234271 - DNA, 1340 bp, Cannabis indica
actctcttttataattaaagtacaaaatataacaccacataacttatcaaaattagaatccttaacacacataatagagatatgacctataaaactgggtataaataaaataataataaaaaataaagagtgaatatacagtataatttcatctttttactttgaggcaatgtataaggttcaccaaattaagctaaccagagagagattcttctctcagatattgtatgaatgttttaagcatgattattattctatcttttattttaacacttttaggctttactttaatatacttacctatttacaaaatatattatgtttgcttactttcttttaatgttactataatacattttttcaaaactaattctctactttatgattattgtatgtaacatcttagtcattcattcaagtagtgtctgattgtttagttttgatttttaatttttctaagcgctctttttttgtaatgacctatgttctttagttgttcttgttcatgtatttagggtatatcggttagtctactatatgtattttttttatagaaatataaaaagataactccacctactctaatttattatgtactgaagtttcttcaatactagatgatattatctgtaatagccatggtgtataatttacttttatgtatatgaaaggtttcttttttaaaggaacaaatctaaagtatccttgatgttatatgttgtagtagtagtaagttagatatgaaatgatgatgattatcaaaatcaagacaagtgggaaataataagttaataaatgatgtaaaggttgaatcaaatgaaacctagattggagtagtactagtaatggtgggaatttcatgtatgtataaatgagtaagaaagattaagagaattagagacaaaagaggggatggtgaaagtgtgaggtgcagtgtgttttggggacaagaagaaaaggggtcttaatcgttggttcttggaattcaaattacccaacattatgtcatgtacaccatgtgccttagacatggtacaatttcaacatctccaattggggccacaccataatccacatatttattaaactccatcctctctccctccatctctaattgtttcctctaattaagttacatgttcaattctacacattttgattactaacgagctatattaatatggtgttagacataataatattgtttaactatctacttctgtatattcacacacacatattatttattctttgttttttcttatgaataataatatgtatacacataattctaagtaggaatatttcatttttataccttaaaacaatttttttttttt

SEQ ID NO: 234272 - DNA, 838 bp, Cannabis indica
aacattcttcaaaccaaaaggctaatatagccccatgttggttacgaaacttgtatgctcttgaccagggacatgcatcttaatctggttatatccagaatatgcgtccatgaacatcatacgctcgtgtcttgcagttgcatccactaactggtttatccttggtagtggaaagaaatcttttggacacaccttgtttaaatctgaaaagtccatacaagttctccaagttccatttagttttgggacaaggaaaggattagatatccacgagggatagaatgcctcgcgtataaagtcgttagtcaacaacttatccacttcctctttgagtgccccttgtctttcagaatctaagggtcgtcttttctgtctcttacctgggtaatttggatcgatatttaaatggtgacaaataattttagggtcagtccctatcatattcgaatggctccaggcgaactgatcttggtttgcctttaaaaaacttattagttgctattctagttttttattcaaaattttcccaatgaataaacactttgtgggattatctagatctaaaataacttcatccaattcctcgattcgttttagtaggttcttttcatcttgaattcaaggatctagatactcatcttgtttcttgcctttctctgttatgactgccattaactgatggccaacttttttattttgtagctctatgcggtagcattcccgagccagtagttggtcacctcgcacaacacttacacctgtcggtgtttgaaactttaaagataggcgtttaattaaactaactgttgggttttgtgccctaaataaaacccattac

SEQ ID NO: 234273 - DNA, 864 bp, Cannabis indica
ttgtacttttattaatttgttgttaattaattgttatttattatgctatattttgttgttgtttggatgttattttcttgtgtatttttgtgttgcttttattattacaccgtaaaaatatagaaaaaaaaattaaacgtaaaaatataaaaatttacaaaaaaaatagtatttatgtaattattacaaaaaaaaataataataataataatattcttatgtgggtggggtaggggacatctttttcttctaatccgatccaatccaaatagttattggatttagaaaatcatcctctggttcaatccaattaaatcttaaaattcaattcaattactaattggattgaatcggttttttttaattggatatccaattacatactcaattttttaatataatttaaaaatatgaaaaaaaaaaaatacctaataattatatataaaattttatttaaatttaatactgtataaatatatcattcttaaaagtttaatgcaactaaaagtttaaaacaacttaaaaacaattttagaaatttcttttatggatattaaagttttattttttaattttttgggacatttctttgttatggtagtcacaatgttaatattgtgactcatagattaaatatttttactttgcctcttggcgttctattctctataacagttacacttacacaaaaacaacaatactaccaacaaaaaaatagatttgttgttggctaataaaatgaaagatagatttgttttttttaaagtttattaaggggtcttcaaacaatggagtgttagataaattaataattaacccaagatctatttgtatataacatagaacacaataataagatataat

SEQ ID NO: 234274 - DNA, 607 bp, Cannabis indica
tccacgtgtcccttttcgactggtccacgtatattgggcgaaatcaggggcaacagagagctatatagctagcatgcatatgtatatgtggttttgtagccatggcatgaatgatgcatgatggggagagacgaaaacaattaatattataactatttattaattcatcacctttatgaaataaactgaagaaaaactttaattaaaaagatttagaaatatttgataagtaagtttagttgacaaatatatcgacttttcacaataaccaaaatatagtaggagatctctagtctagaagaatattgaatccttattccttgtgagttgtgaagatgaacaaaaatgaagaaattctgttggaactttcatgaaattatataaaaattaaaaagtgaagtgtgtgatagtttggagttccacatgggataggaatactttattaaaaatgcattaatagcgcatgtttgagaattgggttttgggtctccaggggtacctagttttgtgcgcatgggggaggactcacacactggttcactacatctgttcgaccaatttgagcagctgggtgaggtgtcacttaaatttttaaagaaaaattatt

SEQ ID NO: 234275 - DNA, 1190 bp, Cannabis indica
acataaaaagagatagtaaaagggaagcaattaaatagtaggagttccaggctctttgtacgggtcaactggatttgaaggagccggaggatcatcattttgggtggaaggagcctcaacattctgatcggtaggagaggtggaagtggttgcctcgggttccccgtaggccgcctgagcagcacagtagtcgagaaacatgtctttggaagtgcccacataatcaaagtttaccttgggattggctttccaaaagtcataaaatatatcgagaccagctgtctctaaggcattcaccttctccccaagcctcgccacctcagacttctggttcttaacctcagactcgagttcctcctccttagccttcttctcatcctccaacctgcggagaagagtccagagaccctctctttcgtcctgaagactagtaacgtcctaatacaaagaagcaatattagcctcgagcttctcggtttatggcgtctcctgcagttccttagtcagctcaacaactttggtctcagccgctaagagtttcttgttgacctctcctagctctatccgcacagacccaagttgaacccgtgcatcctcggcatgctttttggccaagtccacttctgttcgcattgtgttggaaatggcaaggtttttaagagcagccaatttagctcgggaataggcatatgccttcttgagaccagtctgtgtggaaaaaatacattaaaaatccaaactagtcaaagaagaataaaagaaaaatgtcagaaacgacttacccgcgaaagctctttcgagactcctcccatgaccaactttaaagataaatcattatccgccccagccaactgtttgttcacctctgggaccgaccggctcacatagtgattgagcatgtctctgcctcttttggtctccatgtgcaatgtttaaggtggggcaggagccttaacttgttcagacccacttctgatcagctcaggtccacctttcgcctgctcaaatccatttgaactccctcatcggtaacttttggacttagtgacctagggtccacggtaggttgttcctcacaaagatcaatgacctcttcagctggttccttctctttggatggagtctcaccgcccttagacttcttggccggaggcgacaagcccgaaacttccccccactctcttcttcaa

SEQ ID NO: 234276 - DNA, 589 bp, Cannabis indica
atgaaaactcagaaaaatccctcctgtaaacacaatttacaaattcatatttatggcggataataccccccacgaaggaatccatccagaggagactacccattgccctggaaaagaacctcaaggatctcagagaactaacacgattgaaaccccacgttttgggacgaacgatggaaaattttaatcccgctggtgaacatatcccagagaaaagaagtgaagatgcttatgatcctaccaggtatgtcccaatagtggaactacaaaactggaaacttcgacaatgcctagcttaataaaactgacaaaacgctgagttagagcgagatgccgcggtggctagcgcagcacagggaaccattcctcaaagtcaacctgatccatctgtaaggagaccacaaggaagacctcgagattccaggactaggaggcaagagaataacaaagggaatcccataaatgctcaggaagaacaacctaggaatgcgagagatgttccaatggaaagagaaaatccacccaacccaagtaatacaagaaatcgagagcatcgacgtgatgctccaagaatgtaaagcccgcttag

SEQ ID NO: 234277 - DNA, 689 bp, Cannabis indica
atttatacgcgtgtaaaatagactactcgaacgctgttttctatattataattattctcaatttctcaaaattttgtaggatatcttaaattgttataacataattcttctggatgccgaaaatagtaaaggatacatcagtacatcccttttaagaaggtgcattgtagaattaccctaaattttaattgataaactaataatagtaacaagtttactcattttatttatgtatgtgtttgaaaaatatatatattttatttacaattttacaacttaaacctacaatttttatttacaaaaatacgatttaaaaataataaaaaattaaattcacaacaactataaataaatgagaaatgaaactataaaaaaaatataaaataacaagaaaatcaacctcatgaaaattataaatcaactatagataaactaataaaaataaaaaataaaaaaaactaaaagaatattgaacagtattagtaatatgtatttttgtaaataaaaaagttcaaaccgtaacaataaaaaattttctatcatagcatatttttgtaattttttctttaaattttaatcaattatgtaataatcattattacaaaataagcttttaaatgatctttttttttacttaattaataaacaactgatgccatagtgtgtgactaatttttttttaaaaaaaa

SEQ ID NO: 234278 - DNA, 748 bp, Cannabis indica
tgtgcatgttctctctatctatgtgataaggccttcgtggatgtcttagggggcgaccaccgaacctaggttggtttccaggatttcttccatcattacaaggaatttcctagttttatggtcgtggttgcctcgcctctgtattcatgcgagatgtctcaggtatatcactctattcattcccttagttcgtgaatcaatgagaagttcctagagcatcacgtcgatgttcctaatttcttgtattacttgggttgggttaattttctctatctattaggatatcccttgcatttctagattgttcttcttgagcatttatgggattcccctggttattttcttgcctccttgtgttagagtctcgagggatcttcctcgtggtctccttacaattgggtcaggttggttttgaggaactgttctctgtgcagccctggctgccgcggcttctcgctctaactcagcgttttgttggtttgatttagccaggcgttgttgaagtttcctattttctaattatactagtgggacatatctgttagaattataggcatcctcactccttttctagaaatctaaatcaccagcagtattgaaattatcattgttccttctcgaatgtggtatttcagctgtgtgggttctcagagatcccataggttctttccaggtcgaggggttgtttcctctagatgattacttgtgggatgtctcagccattgatatggatgtttataagggaggg

SEQ ID NO: 234279 - DNA, 2224 bp, Cannabis indica
tctatccaaaatggaatagagacaaaaacagttaagagctttcttcagtttgaataactttctagtgcttttcaaaacaactaagttatttagttttctgatggagcttaaattattatagatgggctttacactcttctaaaataattcatccacccccagagtaaccaccatatctaataggtactgagtttgtgtagataaaatgattctaatatacacccctatcatctaacatataggtcactttcagaaatactttcttgatggtctcccaatgttccttctttgattatatctttgatggctcccactcaatggtaggagtctggttaaatccgtacactagtgtacacttaacctcttactattagtgcttagggacctcttgttgtgacatattatcttagtctgaaactataagttccttctagactaagtcatcaacatagcattaacattaaagtaaaatacttgcttaagattaagtaatcacttaagataccataaaacatttcataaggactatgaattgtgcttaagtcattcgaatagacattgcaaaaatctcctatcttatcattataattctgataagtcatttctatccatatgaatggttagatttactttcttagttttattctaaagttgtcatcatgatcataacatagtaggctatcactagtgtcatccaagtaataatgggctaaaaatttaaaattctcccattaagataaggtatggtgatactatgtctaagaacttcattggtgtgaatttctatagtgagaaacattggaacataagtaggatcaagaataagttctattagtttgctagttcgtttattatattatatccatgtctaatcaaaatatgtgtgccatagagatactgtggtatattgagaatagtctagagtttaaagttaaaagtgtttgaactacatatatcaataacttcttccacccctaagtgttataaagatcccatggatttatgaatatactctagagttcgaaagatataaaagatctttgaactgcatatgttgtttcttaacttcttctacccctattagatcaaaagatatttttattaaacaaaatcttaataattgcttaagaattaacaattattcatcaatatttaatttaaattctaagtatttatgtggtataatctctttacagagattaacataccatagattttgtatcattaatcaatacaaactacataaaatatgataaacatataaacataatatggtattggcgtacaagttaaagtaaatatgaagctcaatttaataaaagaaatccataataaaaacgtcttaaagagaaaaatttattaatactcttaaaaatgtcataatgaattgtctgcataaatatgtaataggaaataaattttcaaaattaataattgaaactaaattgtttgataactaaaacaattaattcaaaaaaattaaaaaaagataacgagcttcatcttcaacttggacaatctccacccttctatccaattatttgactcaacttgctaggatagcaatccaagtttaagtagctagagctgaaataaaagaaaataaacatggtttgtagacccagaattaataattcaaggggataataattctctaaaacacatgaatttataacaaagttagaaataccttgtttctttgccaaaaacataggacactggggttcccagtggcccttttcgttcctatagaagcactttcccttttcctttgcctttggattagcagcccttttcttattagtcgtgttactttaacaggcttcttgctattcttccatttattctttttgccaggtttcgaagtggaggcaatgtttgcctcaggcttggtcgtaccatttgtagcagtgctagaactaggagctttgtttcctcctttcagcagtcctccaatcaaattctcaaatgtctgaaggttgttgattaactcgtggaagtcaaaagtcaacttgttcatgaaataatttgaggtgaaggacagaaaatctggagtcaaactatttaagatcaaactcacttgagtttcttgatctataatagatccatgattctcagcttcctggtgatcacaaatgttctgatgaggcttcatccgtgcattgatgaaattcttagtcacctcaaaaacgagcttgattttgatgccatcccgaacagttca

SEQ ID NO: 234280 - DNA, 756 bp, Cannabis indica
cttcgaattatttttgtgtttttgcatttagaggagaaagattatagttgtggagaaataaacttaggatttttaagtatgagttttggggctgagattttgtgtatatatatatgtatatgtgtgtgtttatttatttgttggattcggatttgtttgaattggtttgagttttgttttgttgttttttttttgtgtgatttggatttgaaaaataggttgtgtggtgatttcggtagtggtgggtggtgttttgttttgatttttttgtttgtgatttggatgtgaaaatgggcagcagtggtggtttcggcaccagtagatggtggtgattttagaagtggtgggtggtggtttcggtggctgtggatggtggcggtggtggtgataatttgtgactgacagaagaagaaggaagaagaagaaaatgaaaaactaaaaaaaaaaatgtatgaaaaatatgatatttagggaaaaatatttttatttggtaatgatttttataaaaaaaaagtttatatatttgtgtggaccaataaaattatgccatgcgtacactgtgtccacatggacaatccaacatgacacttaacagctaaatttggacagaaagtttaaattgctaacggtattgtggttttgggggttttatagccaaaaaattagtattgggggttaagtgcaagtaaaatgaaagtattgagggttttgacgcaattaaccctaaattaaatttgaatgacatgggggtttgtg

SEQ ID NO: 234281 - DNA, 3597 bp, Cannabis indica
gtacacatacctaattattatatcttattattgtgttctatgttatatacaaatagatcttggatttattattaattttttttaacaatatattcttaggaattagtttggctatttccatatacatgaacttttcatggaagactcgtataagatttttgttgaaccaaaatgaattaactccaaaaactcacttaaccaccagatagagtgttggaatttggatagtatcttttgagactatagtggtggagccgctattgatggcagtaatacaacaatagacctttagtcctaactgctctaatttgttttcaaacccttaattttattgcatagttgagaatattgtttattttaagtttgggagaagacaatttttataattttaattttgatttttatggatagtttttagcttttttagtattattggatgattgtactactaaagttaatttatgacctatgcgattaaatgatgaactaacgttgaaatcccttaatgttattaagtatgtttgaaaatctatggattgtgtgcttgaatttttatgcccggttgtcatattgttataagaattatattgacgctaaaaaatggtcacattcatattatctgataagcgatagcggcaaacaaaaaaaaatcaaaactaaagatagaacaccacaatttagagtagttcactccttatattgcgatagtaatagagctacgtctacttaatacttttattgagaacttaggaaaaaataactaagtctagcttcaatttataagttttagagagagaaaatatgaagagagtaacaaatatgctatagaagcttttctctctctttaccttgcagctctgtgagctggtgccatggctaagacaagatctaagcagcagggtaagctgaaatcaatcgagaaggtgactgtgaagaagaagaaacgaggcccttcctcctctgatgcgaagaaaacgaaattgatggacgaagttctgggtgtggaaccgttcgaactttctgatgaagaagaggatcgtcaaatcgcacatcagggagccactttgaatgaattttttccagaacccctaactcccaagtcttcattgaatgcgattctgagacaagaagaggtacaacgtgatttcaatttttttctagctgctaatcatgaatgttcgaaagatgttgcaactggttctcatgctacccctccatttttaaggtctggaagtgtagtacgaaatctatcaaattcatttgagaattcaaaaaagccaggtcaggttaaagttacgattgatgacatagcagaggagatatcgtattggaattcttcattggtctgctatattatgggagcaaatccaccattgaatgtgctggatgggtttgttcgaagactgtggaaggataagattgataaggtaggattgctatcctatggtattttcttgattagattccatgaggctgttgacagagatgctattcttcaaggtggatacatatttttcaataaacaaccagtcataatgaaagcttgggatccaaatgtggatttcaagaaggaggatgtgagtagagtaccaatttgggttacattggatgatttagaattgaagtattggggtgagaagtccctcttcaaaattattgggcagattggagacccgataatggtggatgcggtgacaaaggaacgggataaacttagctacctagagtgctcattgaggtgtcgatacaccaggaatttccaagtaccatttattttgagaatgagcatggagtgaatgtaccagttgcagtttctttcgagtggaaaccagttctttgcaagaattgtaaaggaatgggccatgagacaagtgattgcaggaagaaagagaagtttcagcaacaatgggtgattaaaaatgatgcaaggaaaccagctgagagtactgtttgtgagcaggggaaaaaggatgaattccaaacagttactaaaggttgtaaagttaagggtaaagagccaccgaaacagacagtaatcaccaattcgtttaatgctcttaagcaagaagaataagggtatgagaacatggtagctgatagaggcaagtcagatggtttacaagagcgtaatacaagagaggggggagaaccctctcttgccaatggatagaatcatttgttggaacgtccgggggattaacaaccagcaaaagcaaatgagtgtgaagcaatttattgcaatccagaaggctggtttagttggtctcatcgagacgagggttaagcctccaaaacttggagacttataccaaagaatgtttttagggtggtgttttacaacaaattcagcttagcacaaaggagggagaataatcattgcttggaatccgcttcttttcaatactagtatcatcaaatgtactagtcaattgatacatcttcatattgaaacggtaaataaaaggtataagttttttaccacttttgtttatggtttcaatgatgaaaatgggaggaagattctttggaatgatttgcgtagtattgctagtccggatccgtggatagtatttggtgatttcaacgatattctctttaaagaagaaagaattggggataaagctaagataggaaactccacggctttcattgattgtgtgagtgattgccaactgacagatataaagagtagtggttgcttttttacttggaacaacaaacaacaatctaaagatagaatctattctaagattgatagagttatggctaatcaatcttggatggatatgttttagagggctgaagcagtgtttctcgcagaaggggcatttgatcatactcctgcagtattgaacacttacacggatttcccaagtggcaaaaaaccattcaaatactttcgcatgtggacttcttatccgagttataatgtggaagtaaagaagatcagggatcaaaaaataacaggcacgaatatgtaccaggtagtatcaaaacttaaagctctgaaggttttctttagaaatttgaacaaggaacactactcggacatccatatagcagagaaaaaagcaaggatggatcttgaaaatgcacaaaccttgttacaccaaaacccgatgaatgagcagctgcaataccaggaaaaagaagtaagagatcgatttatctaggtacacaaagattactgttcgtttttacaacagaaatctaggctgcattggctcaaagatggtgatgagaattcagcccttttccattcgagcatcagagaaagaagacagcataataacattctctctatcgaggatgtgaatggattcagacatgaagagccagagaacattacaaaagctttcttagatttctatcaagaattattgggatctaagatggtgaatagagtgactgtgaatataagtttagtcaaaaaaggagcttgtgttactgaatatcatagccagatcctgactgttgcatacacattggaggagctgaaagaagctgtctttggcatactagcagtaaaggccccagggctagatgggtacaacagctcgtttatcaggataattgggacttagtcaaacaagatgt

SEQ ID NO: 234282 - DNA, 2235 bp, Cannabis indica
ttgcaccaaaccctccaccttgactgtaccctttttgactcccactaggaacaggagtttggaaaccttgtgagtaccccatgtggaaccctaaaccttgtagcctaaattgttgttgatactgagactgctggcccaattggggtgtgaaaccacaggatgaaaactcagactggtttgttttgggctatccatgaaaaggagtagactctacatagctccctatgggtcttctgtgagatgcttgaaatctttgttgtcgttgtgggcaatctttcgacttatgaccttgttgaccacaactgaaacacatgtatggtccactacaagtctttccagatgaaccacaactattgctacccccaataaattgttgcccttgggaccactgtcgttgaatcatttcctctgcttgtgttcttttcctcattcccttctacatgagcctcagttcgcaaggttgctatcacacactcagtcaggttgttaaaggttaaaggggctattcgaccatgtatcgcaggcctcaaactacacatgaactgttcaatcaccaagggctggacaatgacaccaggatatgcataagaggatagctctacaaacttcatgtaaaattcattcacagtcatttccccttgtcttagaccatcaaatactccaatcagagccctcctgtgagatggactataatattgctccctaaaaactccctcaaaatcactccaagtcatcccatcagtttccattgtccttgacaaggtctcccaccaatctgtcgcaccaccctctaacttggacacaacaaaagtaacttgatattcctcaagtattcctattgtgttgaaattttctttatctgtcttaaccacctttcaactaccatgggatcttgtccaccctcaaactcaggcacttggatctgatgaaagatttgaaaatggtgactctgtcgagtggatggatccacctattgagcgggaattgctcttaaggcttcgagaagggcgttcatagggaattcaacttctggaggttggtcattagcttgagggacatcttctccaaccattctccttgtcttccttccttttagaggcattttcttaggtttgagaaccaaaagctaatcagttagtgaggattggatgctaataatataaatatgccttatacatataaataccaagatacttattactgttattatttaaaataaatctaaattatttggtgacacactccgaggtaattaaacccgatgctctgataccatttttctggcacgacccgagccctaggccatgacaaatatgtaatatccataacttgggtggtcaaaggtcacactttgacccttgtaggaagataaagcttataaataatcatttaatttatattacaaaatattaatttaaaagtaatggattaatattaatataaaaatattagtaacaaaataaggaccactcatcaatataaaagaacaataatatccccatagttagtaattaccaaatagatagatttaataagtcaataaaataccaaaaataatacttagcatccatcattcctcatttctaactagtacataactaatttaagtcatccagactgtccatttcagcttaaatacaaaattaattccattagaaaattaaagagaagaataagactaaactaataacgactttcttcctcaacggtacaatcctcatccactagcatcaaactaagttcctgggatgggagaaaatagggggtgagcttataaagctcagtaggaaaacaactaatatcaaaagacccttggtttagtaaaattcctgcatggttagctttgtaaaaataaaatatctcatcactagtatcaatatgtataaataaagtagagagaccatatataatcacaaatcaaacgtcaaatgcatatcacaccgtccactaggcctctatctcttaataccaatcatagaaaacgacatcaaaaaccgggtagtcacacctgatatccaccataacaccagggctcagattttattcactccctgtacagattctaggtctttcagctacaggtgagtgcacacatgatctacctatgatgatatagagactaggtcgtgaaacaacaatatgcaccgaacatgattaacatggctctcatcagtataaccaaagcaggcaatcaataagaataacaaaagaacatattcctttttattttctaga

SEQ ID NO: 234283 - DNA, 883 bp, Cannabis indica
tttcacaataccagttgtgacaaccccagtttaggatattaagataatttataattttaatttgtttataaaaaactgtcatattgtagttagaacgaactttcaacacaattttaaaaaattataaataatttagtgtgttttaaaatcagaactcaaacaataagttgcaccacttgaaaacaaattgtttaaatgctgaaataattcaacacagtaaattattcataatttcttaaaaagttaaataaaaattccctataactataacttacacgtatatagaaacaaaattaagattatagtttatccaaatgtataccctaaataggaacaaaaaagaaaatacattttattaccacagcagctccgcatatattctccattattatttgtacaaagaagtttaaatcaatgggtaataaacggtaaggaataatgtagttggttaactttaccttccataaccagcattcaatcattcatgtccattacatttctcacacttgaccaacttataggaaggtcaaccaaataaacctctgttacaagtccagaccaaaccatagtatcctcctcaaacttttgggcagtatcttgctcacttgataagcttacgttaacagatttttcacttaatctacacccaacattccatcaaaagacaagaaaaagcaacagcagagattcgttcttcagcccgaaccatggttgagatcagtaaacgaaaaaatcaagtgaattagtacacaaaagaaagccaaaaagagagccaaaaaatcaagtctggcttgtattcgttctcattgacaccaacaacgaacatgggtgcatcttcacttggggcagagatgataactttcttagctccaccctgcaatag

SEQ ID NO: 234284 - DNA, 808 bp, Cannabis indica
actttctttgggaaggtggagatgtgtcagaaggtgatcacttgttggcttgggaggagtgtagaccacgagatgaggggggattgggattgggagattggacatgagaaataaagcaatacttatgaaatggttgtggaggttcccatgagagttgaacaccttatgagataaggtgattgctagtcgctacgggagggcagataacttgtgggactctagaaaaggtgaacggttatctcgaaaagggctatggagagatatttcagatttatatgatgaattcatgtcactggtcaaatttaaagttggagaagggaattaaatcagtttttgggaagatgtgtggcttggggatgcttcgttattgtgctcattctcgaatttagttgtgattttcatagctaagaatgagtgttaagtgagttaggcttcgtagtaggggctggaagtggcagagtttcgagttggaacttcaaatttagaaggaatcttacgaatagggaggttcctagtctcattgagttgttaaaacaactggaatatgtaagcttgatcagtatggtggacgattgtagactttggaggccatatgcggagggtatattctcttgtaaatcaacttttagttggtttacgtcaaaccataaccacagtggctaagacgttgtggaaatgttgcatttctacaaaggtcaaagtctttgggtggttggtggtgctagggaaagtgaatgtccatgataaaatgcaagcaaggcgtccttatctagctatttctcttagctggtgtgtttgttgtaatgct

SEQ ID NO: 234285 - DNA, 1863 bp, Cannabis indica
aaatatcgctaactaatcgtaaatgacacctacatacacacatattctgttttgttgagcttctattttttgtttttagcttctcgaaaagttctttctaagaaaactactaataaaattagtttttattgaaagaactttttagactttagacttaaaaattgtaattcattagctatcaaacaaataataaaattatttttgaaatttcaaaaacttaaaagtaacttttaaaagtcaaaccatatatgattcccatttgtaaaagtatatacaaacataattagtaaccttgaatttgtattcaatatatgtaaggttgtattttgtgtactatttggttgccctattttcggtaaatgtcctaaaagatgtgttgtatgttagtcgtaaaaaaggaatattaaatataccgtcaattaaagtatcatctttatgtactacgtaaaacgaagtattaaattttcattaaattgaagtatcatctttctgtactacgtaaagtgaagtattaaatttacagttaatcgaaatattatctttatgtactacgtggaacagaaatattaaatgtaattaatcaaaattttatctttacatactatatatgttgttgattgataattataataatattcgactttaaaaaaaagtactatatttacatactatgtctatgtatgattggtctgtatattcagctttaataaacatattgtatttaagccactaaggctagcttagtggtgagggaaggatggaaaaaaggataggtcatggattcgaacccaggacctttaaactattaagctaatatatgattgtaaaataccattacgctacactcaaattgaaaaaaaaaaaaacatattgtatttacgtcctacatattgttgactaatactatatattcaatttgagaagtattatctttacgtgatatgtacaattgacggatcaggcacaaagtattgaaaggggaccaaagtgtaaaaaataaattgagggggtttattaaataaatttttaatagaaagattacaaaattatatataactaaaaattgaaaaagaaaaaaaaattaatatttgggaccccatagctccgtccctgagttgacctagaatattcagcttaagaagtattatttatacatactaataattaatatatattcattttaagaagtataattgatctttacgtgcatacaatttgacctaatattggacatatgaagtattatcttcatgtactatgtactacatccggttattaatttgtagtattcaggttattaagaaatattatccttacatactacgtattattaactaataattcttaagaagtatatataattgatcttaatttatatgtatgtaaagtttgagctataatattaattcgatcgacataagaagtattatcttcacatactacgtacggttaacttattgaattcggcttattaaaaagtattatctgtacatactacgtattgttgactaataatattcatcatgcagtatataattgatcttaatttacgtacgtatggtttgacatataatattcgatcgacataagaagtattatcttcacatactatgtacggttaacctgtagtatttttacatatactacgtattgttgactaatatataatatccatcttaagaagtataataatatctggggtatttgaaaagctcgaaatgagcttctatagcagggtcgttcttctcagactgtggatgtggttcggctggcaaggtcgtgtctttctagttggttgttggctcaagagaacaggtttgaaccgctgttgttggtataacagtgtttgttgggtaaggccgc

SEQ ID NO: 234286 - DNA, 739 bp, Cannabis indica
ccattaagaagtgttttatatatatatattttgacgtaaaccaaatacaatattaagtgtgatctaacgatgaagtcatttgagtaagtggatagtattaatttaacaatctcaaattaataatgcaattataaaaagactttagggagttgagagtttagatttgagaagaccaagaacaagcataaaaaagctactccattaataaagaaagtggtttcatttggttagaagagagggaagttacaaagccaaataatatacccataaagattttattttggatgccttaaacagaaatattcttatataatttattttgttaggggtttcatttgattagaagagagggaagttacaacccaaatataccgacaaagacttcattttagaggccataatcactttccaatgggaaattttgggacaaattttcttatatagtttattttgttgccttttaattgttatatgtaaatattttgtgacaaaaattcttatataatattttttgtcgatataaatttacataaatatttaagtataacaaaatgaacaatataagaaattttgccactatataatttacataaaaatttaaatgcaactaagtgaactatataaagattttgccaatatctcttttctaaataatgactaacaattacttaccaaattcacatttctcattgaccatatggataatttttacacataattattcatatcaagtattcat

SEQ ID NO: 234287 - DNA, 767 bp, Cannabis indica
agaaaaatctcactataacagtgctttttaactctcaattacatcatatatatatatgtgttatcccaatttttgtattatgacgtgtcaacgcatactggtgacacgtgtctgctattctctacatttggctagagagatattccgaacaaacctcagccatgcatttgcacggacaaagtcttcctaactgggcagtagatattgtaagcaaaagggaaaccttccttcatgcatttaaccctataaatagtgatccatcctcactgtaaaagggatcgaaagaattacttcagagagatttaagataaaatactcagagaggaaacacttttttgttctcaagttaatacaatccaatgggagtaggctattaccgaactaaaggggccgaacctctttaaaatcttgtgttctttattgcttactagtttttgctctatcttaattacatttcttatcgcttattaattgactcattgtcgttggctaaaagcgaggtcaacattttggtactttcattgagagcagaaatcgaagtttgctctttgtcttaagtttcatcaaacacacaaaatggtggtgcaaactcgcagaggtgtggttgatcaaagtgacccactgttagcagatcctacattgcagactcccgggaatacaaggttcccaccacaatcctgaataactaaacatgcagccaccaactgtgggccaaggtgtgacatcttctctaactgggatcatcacgattttctatttatcatctt

SEQ ID NO: 234288 - DNA, 1396 bp, Cannabis indica
ataagaaagtggtagagagagcattgattgccaaagaggttgaacaacaaattaagaagcatactactaaggatgccagtacgacatcaattccaagtgctggtggtaattttagtaaggggactggtggttgtaattttgattagaagagaaaaactaagactttcagatcatccagaccaaacaagaggttttagggaagtaaaggcagccgtcaaggctgtggtaatccattcaaatcttacccagagtgtccaaaatataagaagaaccatcaaggtgagtgtcgaacaaaaacatgcttccagtgtggtatggtgggccactttatcagggactgtcctcatgctaagaaagaggaaccaaagaaaagcaacaatcagaatataggatgcttgttcacggtaactcaagctaacgctgatgctagtccatctgttgtgataggttagttaattattaatggctttctctatacaatgttatttaattctggagcaacacactcttatgtgtcaagtagagtgatagaaagttttcttaaacctcatgatgtttatacttcgggattcagaatcctattaccatttaaggaactaatgatctccactaggtggattagatccttatatttttagattgacagttgtgaactaaccactaacctggttgaattacaactatctgattttgatataattctgggaatgaattttttatctaagtatgggacaacaattgattgtaaatggaagatggtagtgtttgagcctaatagtgccaacccagctgtgtttgtgggaaacttaaaaggatcacacatacacaatgtgtagggccaaatttgacacccttgtcgctttgggaaagggtatcactattctgaagccaactgagtatggattcaatcgagatcagttttctcctctctcagatcgaatcaaggctttagagatctcctcaaagttcagaaatctagtatggcatccatacaatgggaaagaagaccctctctctcacatacacaacttcaaagtacaaactgacctgcaaggcattcgagacgattcttgttgtcgattctttctagccacgctattagaaacaacatagtagtggtatctcaagctttccctgggatatatcatttcctaggagatgctcaaataagcgttctatgaccaattctccccatcaaggcacagaccaatcgagcccaatgatttggtctacatcaagcaacaagaagacaaacctctaaaggattactcagaataattcttagaagcaactgcacagatgaagatattcagtgaagatgccaaggtcatggcaatgacagctagactaacagtaatgagttcattctagaaatacttgaagctcaaattagtgt

SEQ ID NO: 234289 - DNA, 1144 bp, Cannabis indica
ccaaatgttcatataatatccaatatctttgtttactgttgacgatggtagttgaagtccttgaagatgtgattggttcctaatgaattatctatgtttatgaaatttctagtaaatatctctgatggcatttatctatagtctattgtgataaattaattggtttaattagctacaaaatatcactttgttgattatattatactaggtatactacatatttttggctctctctctactatctgtgaaaaaattattttgatcagaggcctataatgaaaattctcatgttatactattaatgaccagaaattattataaggctttactattgcattatcatgccatttcagttttgattgccattttattataattgtctctgattattgtagagattgaatatttgttttattatcattttcttttggatatttgtatcttttgagtaaagatgttgatgcttgaatattcattcagtgaatccgagcttaacttttgtgaactatttgtcctaatggtcacaatgcctaatgaatgatttacaggtcattgaatataggtatcaagattagttagtttcgtggtaagctattctgattttctctcctttgcatgattgaaagtcatctggttttgacacttgttcattttatgtcatatgaaattgttggtttaactttcatgttacttgcactcatatggaagtttgattttccactttcatgattctgaatattgctatccttaatgatggttcgtaccttcttgtccatccaatgaacaacttacttctagttttaaagaaataacactgcatgatataatatggcattaacaggtaccatcatacaatatcaaaggatagggtgaaactttctcctcttttggatagttagaagctagcagaaatctttactattggaaccatacttggtggttacttggcaatgatggcagttattttcttttggacaacatacaagacagacttctttgctgtgagtaatttgtccattgtaccttcatttgtttggaattttctttgccaacctttcattattataactcattcctttttctttttttagcatatatttggggtttctagcattactatgactcattcctttttctttttttt

SEQ ID NO: 234290 - DNA, 1343 bp, Cannabis indica
ttttttgtggaagtttggaaatggcatatccatctcctctatttaattcatattggatccctggatggaaattttatatctttttaaaaatatgttgccccctttgatcctacttgttttcttttttttatcaacgctgatggtttgctggaataaagatagattatctacctacttttgatgaggaggtgattcaggccatttctagctgtgcctatttagcgatgttttctgtggaggatactctcattttgggagcatcactcctctggtttttctcactatgagttcagcttatcatctagccaactctattaattccttaccaacatctactagtaatgctacccttattaaatggtggaaaacctttttggaacttaaaactgcccccaaaataaaacattttatctggagaacctctcatcatagtcttcctacaaccttaaatcttttccacaaaaaattatgtcaagacctttgtgttcttgttgctctaggtgtcctgaatctgttacccatgctctaatagagtgtttgaagagcttcaagagagtggaaggtttctagatttaaaaaaatttatttacttaataggagtggtaatatttgtgagttccttttgaggggctttcaagatttatccaaggaagaactttgtctcttttttggaattacatgggaaatttggaaccatcgtaatatcagtttgtttaataaaagcaagtattctttatcttctgctgattttcaggtttcaggtttgctgcaagactttgatgatgcccagaattttcatgctcacactggtcctcaagttttctcttgttgtagcattggtaattctacaccgattatgcctaagcctggtttctataaatcaaatgtagatgttgccttgagtgatcaaaagcacaaagttggaattggagcagcagttactaacagcaagggagatattgtggctgctatgtcctcttttttttatggcaatttgtcccccttattggcggaagcaaaagccttgctttgggctgtacattggtgcatgtcagtaaggtttcctctagattgcattgcaagtgattgtttacttctagtgcgaagagtgaagcatcgttggaaggataactctattttctcagatttagttgatcaaatattatcctgtctctctttttttccttttgcagcggttattcgtgagtcaagggatcataatgttatatctcacaatttggcaaaagctgccttaaggctttagagagaggttttttggaatggcaaagttccagagtttttatgacattattgtaacctgtattctactttgtatcttttct

SEQ ID NO: 234291 - DNA, 761 bp, Cannabis indica
atttagtagatattaaaattcaggggcataatttagcacatgtacaatcgccacattagacagaaatccttaaatctaatattttcaataattgaagagaaatttttaacggcttgaaaaatttagaaagcatgatttattacatgttaaaatttaaagacaaaaatcataattagtttttaaaataaaaataaacaaatcaataatcgtttaaagtatatatgataaaaaaaaacttgaatcggtaaatataatcgcacctgacctaggcacccagacagaattaagaatcccgtgatgaattttaaggggtttatgttaataatgtagtattgagaagaactttaattaaggtgatgctaactgatgagtttacatggcttaataatatatggattctatttcaaaatctaatccaacggtgggaagtgtttgtgactgatgactaccatgattatgttgggacctttgaaaactggttgccccatggtttgatctctaattctacctatcgaaatgttgccaaaggaaatatgattttggatcctctcaacattctttggtagaaattaatatgattggatctattttatgaaaaaacttaaaaagaaagccatcagtgatgttgagaacttaaccttagtggtaaaggcccgagaataaatataagaaatagatatataataaatgaattgaactgcttggagtcctatatatgcttgtggacttggttgtgaaataattgtaattatgatgataac

SEQ ID NO: 234292 - DNA, 1347 bp, Cannabis indica
taacaaaacagaaaatccaattgataacaaggaatctaaaatagtatttacccgtctatataattgtgttaataaattaataattacacaattagtttttctaaatgcatcctataaattttgtttttttattttttatttttcgttggacagttactggtttatttaagaaacatgatgtagatgtttagaaacatttaattatttactttttcaaagggttggtggttaaattttaacaatgtacataattattttgaaaaaaaaaaagaaaacaaaataataagaataaaactaattcatttatacataaaaaagaatataataatcaaactaatttatttcaatttgattaataaagcttgcaaaagtctcaaccataagtggttatgttatgtggatcctattctcaccaatcataattagccattcaatatggagagtccacagattcaatgtatattcatgccttggtgtctaaacacactactctttcaccaaaataataaataaatatatataatacggtacaattattggtttattacaaatattttactcttacgcataatcaaataaaaaaaaaagaagttataaaaccctctcttcaactattattaaaataccctaaactaaatttgtaatattatttcatctaagattatatcataaaataattcgattttaataaataattttttttggatggaacaaaagttcttttaaataaataaactaatggatcattctagagtctctctttggaattatgctaagaacataatcccatatatattaccacaacgaccacgcgtaaatattattattattattattctgaatagtaaagaaaaatataccattttattacacgttgttgtattaataattttaattacaaactccatagaatctaaatatttaaaattttttaaaaaataaaatagaaatactagtgatgcaatttagacgggttcaatccaatcatcatagcccatagtaaagtaagaggaattttctttctttttttttttctgacaaaaataaataaaaaaaaaacccagctaagcagataagcagaggcattaaacgacaggtacaatcatcaacaactaaaatttaaaattataaagaaataattttctaaaaaaagaataaataaaataaataacacgcctaacctcgtaaaacaggaccactacattttgtcaaaacccattaccattcacaaactgccacgtgttactaaaaccaacgccaccatcatcatatttcttttccttttttatttatttccttaaattttcttctaaaatataaaaaaaacgtcccctgagtcctgattct

SEQ ID NO: 234293 - DNA, 1804 bp, Cannabis indica
ccaagatatatactggttcaaattcgatagatcgatgtaatctatggctctactctagttctcgaacactaccttaatccttctttattgattgagcaagaataggtacaatacggtcgagaagagattctctgttgagtcctcataaagtgtttcaactcttacactttacacccaagaatcttcttcatctacggaagattcttcttacaaaactcaaacccaatctctctcttttctctgtacttctcgctctacctctcaatcttttctctctcaaactctcaatctcatctttatttcgtaagttgtgtcttacttctaatctcttccaaaatgataagtgaagttagtatttataggcttaggatcaagatcctaaagtcggtggctgcaagaaacgatgttgtgttaagttagttagaaataattaacttaactaactcctcttagaacgaattctccatgtcagcttaagtaccagagtgtaatgaccgatttagtaatttggattagtaaaggcaattagcactaatttctgttaattttataattatttatgaatttatttatttgtggaccccaatattagaaatgagtattagagttataatttctcaattccagagattttattaaattctaggggtattatttgtcctatatgtgaaatatgttctttttgtaatttttgctcggcgacaacagaaaatgcgatggatggctagtttgatcacatgggtaagtttagaaccttatttcttagtgggaaacgttttagagaaaataaagtatcggggttaagcggggttatggaatttaaccattttacccctagttttgagaaacacctaggttttaacttggagggcattttaatctttttaaagaagggattaggtggctgagtttggtgttggcagctggccactcaaagtattcagcttagattaaccctttctcatttgaagaaaatcaaaaattaagaaaaaggaaaaagttagaaaagaaaatacatttctcttgaactctttctctctttcggctgagacaaaaccaggggaagggccagctttttctccctaattttctgaaattaagctaaggattcaagtgttcttggagctaaggtaaccctataacctttggttgtgtgtttttaagcttttactttggtttcatgttgtgaaattgtgaattgggggctgttagggttaggtgttgatgctgcaattcaaatactaggcttagtttgagttagttataggtcctaggagctcttttgatgttttatttaggttttgtgcaagtttgagcatagaaacctaaactttaatctctaatggcatgtcttgattcagtgagtttttctttggtttattggctggaatatgttgtgtataccctaattaggtactctggaaagtttggttgcatttggtgaaggattgagcaagaaatgaaatttcttgggtgaactggtgtaaaccgggtaaccggctagccagttttggcagggttccccgagcctttcattttctcaattttcgtccattccgtgccatggttgggtgtttccctatttccagagttagattaacccctaaaaagtataacagaacctatagttatggttttgggtttctcgggattagggttttgatcatgtaacttacctggtttcataatgtgattagggcatccatttagcacgagactttccgttcaggtcggccagcacacttgaattcagaaaaaaggtaagaactgaatataatgtgtgatatcaatatctgagtgtatg

SEQ ID NO: 234294 - DNA, 725 bp, Cannabis indica
aaaaaaaaatcaaattttcaagtttaatatgaaattttttgttgaattgagtgtttttctaaacaattttcattccatactaaatatacatttttcctaactttatctttcctaatcacaatctaacatccaaacatagcttatgtttcttaaaaaagatgtatgaaactgcatctacattacatagttatcctaatcattttgcacacttttatcaaacattctagttgccttgtgtatcatgaaagggcaggaaccccaaaccaaaggcaatcgaaagctgtttggaagattaatattagaaagggttttaaggctggatgcaattttcattctccaaataaggatcatctactatattaagaacctaaagtagtctattaacttaaaatatctcttaaaactcttggcttagtatggtcaaaggtggtgatagttgcatttttcctcataagtcacacctaatgtttaggttgtagtatgtatttatatatttatatatacggactcccctagttgaggtagcaatctttttaggataattaatgcagagactggaagaacatattataataaatgattctggtataggctgggtgaatattaagattaagatacatatacttgactagtccatgaattgtatgagagtaattagatgctcaaaatgaattttgagtctattacgctacgttatgtacttaatactcattctttaaattcat

SEQ ID NO: 234295 - DNA, 742 bp, Cannabis indica
ttttttttattttatgaagaaaaagaagataattttctattacttcttaaaaaattaaaagaaaaaaattaaaaattgataaattcttaaattaataaaaaataaattaagtttactcatacaagcatagattattcttaaaaacaaattaaagctttatatattcacaaatacatattttaaaaattcaaaaacaattattaaaaatccaataaatattttttaaaaaattcagattttataaaaaaaaaacttatttatatttaaaaactacatattttaagaattaaaacaaaattaaaatacgaataaacatataaaattatttgtaaaaaaattataaaattaaaataaaataaatattttatttacttaaacaaacctagatttttgagaaactaaattttgaaagtgcacctttttcatatatcaataatttttaaatagataataattgatttttaaaccttttaatatttgaattagtatttacgaattatcaaatatgtataaaacacttctcaataaatattactccttgatgattacttaacaaataagttgaaatattaaaccattagatgttgatctaatggtcaataataaaaggcaaaatttgagttttcatgattaatttagctacttaattaaaaaaaaatactacacttttgacattataatcaaaatttgttttaacatggaaagtatggaactcttactacaactttctttacctcttcta

SEQ ID NO: 234296 - DNA, 1225 bp, Cannabis indica
catcagaaacaaataaccagttcctatcaatgtcaaacatatttcaggtagctgacaatgttgctgattttataattgagaaaacagaagaacacaagaagaaaaggaatgaagaagagaaggagattataacagatcatagggttttcaaaattgaagaaggacaaatttacaaagataaaaagatgctgaaatgtgcactatgcttttatgctatattgcacaactttcaatttaaaacaaagagatcggaaccaagggagtacctggttacatgtattgatgataactgtaactggttacttagagcatcaaaattcaagaatacaacaacattcaaagtgaggaagtatgtccaggatcacaaatgctcattggatgtaatcatgggagaccacagacaagcaaatagcaatatcattggagaaatagtaaaaaaaaattcctagatatcaaaagaatacatagaccaaaagacattgtaatggacacactatatgattatggggtgtcaatgggatatcaaaaggcatggagagcaagagaaaaagcattagaattggcaagagggagacaagatgactcttatcaacagctaccaatgtacttacacatgctgaaagtatcaaatccaggaacaatcacacacttggaaacagatacaaaaaatcgtttcaaatacttgtttctagcattcgcaaattcaataagaggctggaaacattgtagaccagtcattgtcacagatggaaccttcttaaaaacatcatttggcgggactttattttcagcttctacaatggatgcaaacaacaacattttcatattggcattcggaataggggactcagaaaatgatgactcttgggattggtttttcaacaagataagagaaacatttggtgatagagaaggtacaatatcaaaaactggttttaagtttatttatatatatatatacataatatatattttttgaatagtaacaagttacagtaaaattcaaattcaataaaaaaatcatcattaatcacttttaatcctgttgaagaaaccagttactgacataatacaaatatatatatgtcatacataactaaaaccagttttaacatgcaggattaacaataatatcagacaaacataaaagtattaaaaaagcggtgaagaatatttacccagaccactttcatagagctttacatattccacttgcttaacaaca

SEQ ID NO: 234297 - DNA, 2716 bp, Cannabis indica
catacaattctaacctaaacctagatgactttctataaatagaaagtgatggcttcaggaaactatggacatacatcttattcttttttcagagaaaaacctgagcaatagccaccaccctcttcttctcttttcttctcttcaatttcgaaataccctagtgatagagtagtgcccacacacatcaagtggtatctcattcatagtatggaagattgtgaagaatccatcaacaagaaggagaatcagcatcaaagaaggagagaaagagatccaggttcagatcttgattatgttctgctacagaaaggaatcaagggctagagatctgaacggaaggagtcattatatttcgctgcaaccaatgtaaggttttcttgaacatttatgtgtttatttcattgttttagaattcatattaggatgttgatgaaacatacatggcagtaaatctagatcctgataaaatatttctaacagttctttgtgtttgacctttgagcaaaggtctctcctccctctggcaggagaagacccatcttagttcctaaggaacttggtggcaatcttccttgaagtggatcccgaaggacatcctggcctcttctatcggttctctgattaaaccatcttattaaatctttggcctcccggttgcggcttatcaaattttgcttggtgagatcaaaggatgtacacctggtaatccatcaatcttaagaattcgcgctgagcgaatacatcacattcaacaattcttggttcttcagttaggcctgcacgacctacagcttccctgagtctagtgagttcaaggtcttctcctacatctagatgaggctcgccaattacttgctcacccactctcgggcctatctcttctgtgtaaaaccagagttgaggtccaattgttgttcaaggaggttgtcgtccttgggtccttcttcagtgggaggcgccaatggtggatctgctcctgcaggcatgggcctaccacttacttccatttaatcatgtgatctccaatatttatgcttaataaattttggggtgaacacgtactttatataaatattcaattttctataaaataattccagtttaaattattttttggaggttcgtgttaagaaccaactaaagatataagtcatgtagtaagacaaaatcatatataaatacatttactagtaagagaaagtaatactaataagctagaaagttctgatcaagctcatcattaatttcttgtggtggtccaagatagcctgcaagcttttccgtataccacacattcaatgggaaagaaacaaaaacaagaatatgaattgggtgatgataagaaaggagattgatgtaacttattttatattcactatatatacttttttttaccgataagttaaactatacattcattctcatcatggcattatgtatggaaacatacatacaaagctttttaattattcgtatttatcggttttcattggaattttagattagtatatatgcgttttttctagcgacatcttttgttgagtttccattttcgcactactttagagctctccgttaatttttataggaaaatttaacatttttatttccttgattattttattctgtcccttattattttttttaaaatataacagttagataattatatactttttattaaattctatttttataccattaaaaattaatattcttacctactaaattttgaccgatacaaaatttcgcccatttttattaaaaaaaaattaattttaaaaattataatattcgattaattttaaaaaattaatacaaattattaaaaaatctaatcaaaatattaaattaattaaaataatctcaatttacttaaaaatcaaaattgttcctaaaaaatatttttcagatttcattttatttataattaagtgccttaaaatcaaactaaaattattaaaaatctaataaataatttgaataagctataattttcaaagaaaaatgaagcttatttatatttataatctcatatcataaaaaataaagaaaattaattaaaaaattcaataagaatataaaattcttttgaacaaaagttagaaatttttttatgtttacttaaaacaaatctagatttttagagaaaaaaaaaataggctcaaacttattcgcgtaaaatttagattttacaaaaatataatttttaatacacttttttatatctaaatcgattttttcaaaaaaaataaatatattttttaaccgcttaattaattttaaaatttaatttgtgttttaattttcttaattactcaaaataattttcttaaatctaaattaatttttgaagatttactaaaaaaatatttaatctttcttatttttatttgaaggggtacaatttgataattgtcaaaattagggggtaaaattactaatttacaaagatacgtgaacatttaaatagaataatgagacgaaacctaacagaagaactaagtttctgtaagtgtcaaagttcagggaaaatttttacaagccgtatattttagagggcaaatcagtattatcaaaagttcaaggagcaataatactaataattcttttaataataatctaattctcacttagtaacaatttattcttgcaatttataactattggaacacatttgtgaattattgaaaattggataagtgctatgtccttt

SEQ ID NO: 234298 - DNA, 1788 bp, Cannabis indica
taccattacaccttcaatgtattttatccttaatacacttagctacctataaatgatatttcagtaaattaatataattactgaaatgaatactcaaccatttatctctattaagccaagctttcaagaaatcatcatttcacttctatgtccagataaaagctatagattccgtatctatgattagcgctcccactcaattgaactaccatgtccttaatctatatgtcacgagaagatccattgatcgactttaatgaaaagattgaagaacataaataatacaactgaactagaacctaaccatcttaggattgagatcatttgatctaagatcaactaggtgatattaaattagatagatattatggtaagtttattatatcttattcaagtttaatatagatcccttctgatatatacttcatacatccaacacaagcttactttaattaatgccatggaaaggacataacacttatccaaagtgcaagtaaactacattgtaaattatcctatgagtcaaaccctgtgtactgataaatcataagaatggatttaatcacataatcttgattattttccactgtgtcaacaacacagtaaacaaaaatatcattgtgataaggatttggatgaatttagaaatcaaacaaatagtcacatgaaccaaataacacattaaataagtaatgaaaataaatctgtttctttattgataaatgaatattcaagattacattaaatagagctttatttagggcataaaacccaacaacgaattcttgagattgatcaatgaccaagagtacatccttcgatcttgccaagcagagttagatcgccgtaattgagaggccagtgatctgataaggcgattcaacaagagaaccggtgtaggaggccaggatctcgttagagatccactttaaggaagactggtagatagatcagggggtctatcgacaagcttaccaacctgcccctcagggaccaggatagatctttccttaccagagggaggacagacctttccctcaaaggtctaatagcaagaacaactagatctcggcaaccaacggcatggggggccggtcagggatctcaaggtcagcaataaccctcactatccatcatgtgataggccaaccactagcaggagtccccatggctgacaaaccccctaaagaagtccccatggctggtgagacatctccagaagtcctcatggtcgaccagagaggagcactccctccgcgtggggagcgagtcactcgaagatcaattttcaaccgacaaggattgattgcacttggaaacacccaaatcaataatttgagaagttaaattaatcacttaagacagttggatctaccaaactccaacggtgtgatctactccatgtcaacgcacaaactccaccagcccgatagagaagtgtgggcggccaggcccttcccaacttagggctggccgaccatatacaagcaccagactcaaggttggccgaccttgagtataccctctcccagggtgtggctggctaggctctaaccaatctgaggctgcaactcaatcaaagaaggctaatcaacaggcccctacaacaatagatccttctatacaagcacaattggatcaaatacgaggcatgctcaagggcctacctggtccaaaacctccagaacttgagctagacaagtcaaggacttgaacttgcccaaattcaagatgccaacttggaagatgtacacggggaaaaaaaatcctctagtacacctgaagtac

SEQ ID NO: 234299 - DNA, 1644 bp, Cannabis indica
gagggttaagtacaagtaaaacgatagctgatagaatttagccacaaaaaaatctttaaatttagtaattggaaagatgaagttcaaagcttttgatttatttacattggatcatatgtctcatccaacaactgatctgatctaattggattttcaaaatttaaattcaatccaatccaattatgattgaatatccgtaactattagatcagctaggattggatcgaacgattataattcaattaaataactttgtgcacacctctaaagtggactcatagagtttggaaatattattatattaatatattatttatattggtagaaacaatttttgacccatagctaaaaatgagattaggggtgttgatttgtttgattattattattattattatttttaataaatcatagaattttattaatagcaattaattaaaattaatagttttcaatctaatcaggatatctctctgctggagacatgatcaggattaattttttttttaaaaaaagtgtcaaataatcagcagcttaattctcagatcattcgataaacaatctaaaaaataattaaatcataataaaaaaattacagcatcataattacctttaagaccaattatataaagtttcatttacggctcaaaaaacacaagtacaaattgttgtagtaagcttattccaccttgtagattgaacacttaacacatgggtttattccctaaatccatgtgttctaataagtgcacctaaagtgaagttgttttctaatttattatgtatagaatagaaagaaatagatacctttgaagtgagggcaggagagaaagaggggaaaatgtcaacaagatgagttttgatgcgaaatatagcgtctttggagatggcgtgagcagcctgcgtggcatcccgaacagtggtttctaacaagcgacgggccttgtcaagggcctcggctgggacagcagctgccgccagcttctccaacaccttttcctttacgttggccaacactcccatactattattattaaggtaacttgctctatattgttattaatgttattactatagaaaattattgaattgtgggagcatgttagagactatagagaaatgtccatgacccaccccatcccattaaagttaataatattgataaccatatagctagctccacaacttgattatccttgttatatattattggatattctttgtttgcttctttcattatgtggctctggtcttattgatgctaccctcttgtttttgtcttccatttttcttcgcccacatatatatctcaattagattgaggccctttcatcttttatttattttattattttaattctttttaattttttattggctgcaataatttatgcactctatatatatgtacataaaatatataatacatcaaatattaaacacactaatgtaatgctattttttcttatataaaaatgtagtgatatatttgtaaaaatgatcaatttcatttaaaaaaaatattatatcattttagataatatgtttgatgtatatttactatttattgggtcgtttggaacatcgtattaggtcgtattatgtaatgaccgctctagtaaaaggattagtaaaggcaattag

SEQ ID NO: 234300 - DNA, 3034 bp, Cannabis indica
aatagcatgacgctttatagggccctataacacagtattcgtaattctaatgagagacacaccaaaacactttccggggatttaaaaccacaactagaaatatctctaacgatggataaaatagcaacaccctaaatatcataaaacgggaaaaattaggggtggcaaaattgccccaaccggtagaccagttccttagctaactggaattccagttcaatggggtttcctgagcactaaccggtcaaccggttcctacaagtccccctggaccgattcagtgtaggaaaacccataaacattcccaacacttcaatttaagtccaaacttctcaaaaacctccagaatacttgcatacaccatactagatccaatccaagcaatagaattcaaaaattcacacagaatctcatttcaccatcaaagagcaaaattttagttctaagaaaaaccatttttgtagtagtgtatatagacttttaattaatataaatttttataacttcctacattcagtgtaatttttaatcataaaagagtttttgaaattatttaagttagatcatatgtataaatatatatttaacatactataatattaaaataactaaaaactttaataaataatatttacctgtaagaaaacaccgcataaaaatcgcacctctgacctagttctctctcttctccatggcgaggaagaagaaaccagggcgcaggtcgggcctcaaggttgcgaagggatcattggagaatcaagatctatagaaagagagctccgagtgttcgcgtgaagatggacaatcgctggttttcggccctgagcagctcgcgacggagaacagggacgatgaggattcgttgatctctgcgagaaagagctgggccgaagaagtggatctgaaatcggcggctcagacccattggcaatatttctcaggaggtaaggtgttaaactctgatgctaaattgacttatactgaactagtgactaaagagggtagaaagatagctcctatagatatggaaggggtgaaattgaaagaagagagtttgaaatcagctgtaatttgtatggttttgggtactaatgttcctgcagtggtctttgaaggatttattcgtagaatttagggcatttaggaatagttcaaattgctagaatggaatgattcaatttgacaggaaaccagtcattgttagaccatggacaacggacttgaatgttgttaggattgtgaaatcggttcttctttggattaggttgcctagtcctggtcttcaatattgggggaaaaaaactttgagtgctctcattagcactgtggggaagccgataatggtagataagcacaccaaggaaagaacaagagttcaatttgctcgagtccttgttgaaatggacataacggagaacccggaacgctcattctggtttgttaatgaatatgggcagcttttagaacaaggaataaaatatgaatggctcccggttaagtgtaaacattgtggtgggtttggccatataatggctgaatgtaggaaggttgagaagcctaaagaggaggagaaaaagcaagaaaataaggcagaaatggaggggaatgatgttggtgcttctgctataattcagcagccttctgttgctactgcaagcaagaatgaggctgaggctactgcctctgtgacagaggcggctgctatagcagtaataaaagaaaaaacagtcaatggccaaggaaaaaaaactggtgtctaaacagctagaggggattggattgctccaaagaaccgtgtgtctaaaggctctgattcgacaaggagagctagtgacaagggtgagaaagtgcttaggaattcctttgcgatattaacagggggacaacatgaagaagtagagggagagaatgacttgagcctgtgttgttaatggatttttacaatattagttgttggaatgttaggggtttgaatagaaaggagaagcaagataaagttgctgaagtttggagagttaataaagttggcattggagccctagttgagaccaagattaaaggagaccaaattcaaaagtgatggcaaaggacttttattcaagcaataaggtggaaggtcggattctcctgctctagaggaagaattttgttaatattgaaatcattgaggagtctaagaaacatgtgcattgtcatatcaaaatcataggacagaaaaaagattactttgctacctttatctatgcagccaacaccatagaaggtaggagtgaactttggaccgccctatcaatgataaatgtttctaaagcttggatcatccttggtgactttaatgcagtttttcatcatgatgacaggcagggggaatgatattagtaactaagagcttgttgactcaaataactggattgctcagtcttttgtggggcctatgaagcgcacgggttcgactttcacttggtctaataagcaggataatatgatttttttctcgaatagatcatgtgtttcacaacaaggagtgggttgatgattttccgaatacttctgctcatttctcttgggagacctgttttgatcactgactttgtgtggttcattcggttgctacaaaaagtattggaagcaaaccgttccggatctataatttctggattgatcatcaagactacaagaatattgtgctagatagctggggcaagcctcttagatgtggtaggttgaaggggatttatttaaaaaccatgaggttcaaatacaagttaaaagctttcaacaggcactcgattgggagcattggagatgcttatgagaaggccaaggacaattacaaggaggctcagttccaatgtcaagcaaacccgaacaacaatcatttccttgaattggagcaagcggttgctaaccaatttcacattcaggaaagaatgtatctgaactttctccaccaaagaatcaaggttaattggattcaaaaaggagatagtaacacagcttattttcatgcaatgttgaagaaacggaaggaaga

SEQ ID NO: 234301 - DNA, 871 bp, Cannabis indica
gttccttccaaacttcaatcgttgatcatctaatgaaagagaaaaccttttaacttcatcaatcaaagtcaccaaacgaacaaagtctgttaccaagtctttttttttttcttttttttttatttttgataaaaattctcacaccaaaatctctcaaaaaggatatctataatacttctccttattaaggtaacttttttttggaagttattattaatttgtattttttttaaatcctttttagaattattagaggtgtatcatatatttaattataatttttcttatatatttattatttttttgagaacaagtatttccttatactgatatcatgaaattattaaaaaaataatataaaaagaattaattaaatattggtattaaatataagagtgacacataataaaaaaaaaatattatgtacagtcatttttcattactttacctaagcattttccaataatttttattatattactatttagtatttactatgtcttttaggaaaaccaacttttttttttttttgaataattagtatatttgcctcctgaactttttacactaataaattgtgccccttataatataaggcttgttattaatacccctttaactattacacatacagtaacattgtccttctgttaaactctatttgcttttactgttaaaatggtgaggtggcactataaggaagggtgtattagtaattgcaattattttgaaaaggaaaaatataaacagttaatgaaattaaaaaattaattaaaaacaaaatttaatttacatctttatatattaaaagtgcctatttaacggtattttttggtttaacagaatatactttaaaaataaaagaatattc

SEQ ID NO: 234302 - DNA, 836 bp, Cannabis indica
attttctcactattgtggatgatgcatcttgattcatttggacatatgcttaaggctaaagttgatgtccacaatgtcattcccatgttttacaacatggtttgcacacaatactctacaccaattaaatccatttgatcttacaatgctaaggaacttgccatgttagcattctatgcctctaagggtataactcactatcattcgtgtgttgaacgtccacaacaaaattctattgtcgaacaaaaataccaacacatacttaacattggaagaaccttatgctttcagtcacatttacctcttgtatattgggcatacctaattaccactgccacctacttgatgaatagaacaccttctgctctatttcatggcagcacatcttatgaaaaactacacttaaaacccccaattatgaccatctcaggagcttcaagtgtcttgcatatgcctctacatttacatctactaggcataaattttccccaagaagtcgtgcatcaatctttattggatatccacatgggatgaaggcttacacccttcttgacaattgaacaaaacaaatatatcattcctgagatgtcatttccatgaacatatctttccttttcttggccaaggttcaagcaatgacataaatctgcttttccagctgcattgcatacctgcccacaatcacattactacgaatttacacaccaacaccacacagggaacacaatctcaacttcccacacttcctgaacccacacaagcagctctagttgagcctcactcaacaacaaatggcactactttcacactagatgcacctactacaactagtgttc

SEQ ID NO: 234303 - DNA, 910 bp, Cannabis indica
acaaaactaaaatttagtataaatttaccacaaaattactttttgtgctaaatatagcataatttttacatcccccattaaaaatggtctaatgtgatcaaattatttgaaatagggatttggtgagtggttactggtgaacacaattaaaatagcttctaatttttgtcactgttcattttttgagccaatttttgtcactttttttatttttcccgatgattgattattaataccaatcaatttattttttatttttatttgattaataaaaattatagaaaaaataaataaataaagcaagacaataattaattatttttaaaaaataataataaagacaaaagttattatgatacctagctatttatcatttattttacttcctaatgtaattactcaatttctcttcttcttattcaatttacaagttttttttttttttttgtaaaaagtattcaatttacaagttgaattgaatagtttatacccaattgatgtgaaactccttatattcttatggtgaagtttaatcacaaagaaagcattaagcaaagtaacttataaaatcatacaaataatctagatactttcgtcctaaatcaatttgtatcataaaaatcaaagcatattcaaattcgatcaccttctaaaattttgattcgaatttatagataacaattatagatggccagtaaataattacaaaattaaaataaattttatggaattaaattaaaagaagaagaaaaaattaaacaataaaattaatccataaaataaatttaaagttgtcaagaaacatagagtttcacctcaaaactaattggtgatgagtgaagtagttcatattcttatgtatggctcaatacttttacatttaatccacgtgggacaatgttttccaata

SEQ ID NO: 234304 - DNA, 1198 bp, Cannabis indica
tattatcaactatcataaattttatattattatgatatatatcatattgttgggaaaacaatcaattctcaacaaatgcatttaactatgcatgtttgtactttgaactgaacacagttcttcaaacccgaaaaaaagagcaagactttattgaaaggaaaaatgaatgtattgtattattctaatctgatgaatagggatacaagttacccacaaaggggtgagtttacaaatatatagcttgtccaaaaaactaagaaataaccgaattaactaactaatgcctctctagttgtcctaactgaataaatagaccacaactaaatttttttaccttggtcgaataattcaatgtacaaaaaaaggaacaacaaaaataaagcaacaaaacattacaaaaaaaaaaaaaaagttaagttacagatcgctgatggtagtgatccctagtagattcagacagagtctgaacttggcagtggtgagtggcttggtaagtatgtccgaggcattatcctctgttgaaaccttcttgagcttcacttttccttctactatgacatctctaatgaagtggagccgcccatcgatgtgtttggttctttcatggtacaactgatttttggataagtgcagagcattttattgtcacagtgtacctcaatgcacctttgttctatgcttagttttctgatgattcctttcaaccatatagcttcttttgctgcctcagaaaaggaaatgtattctgcctcagtagtggatagggcaacaatgttttggaggttcgctttccaactgactgtgcaattacctagttggaaaacgcaaccagtttgagatactctaatgtccatatcacatgcatagtcagaatctacatagcctttgacttctagtgcttgagagtttaagatatacataagtcttatgtcagatgtgccctttaagtaccttaccacccactttgtcgccttccagtgttttatccctagatttcccataaacctgcttatgacactcatagcttggctttaatcaagtatggtacagaccatgatgtacatcagacttcccaccaagtttgagtagggtatgttctccatgtagttgtgatcagattttgtagtgggagcttgtgagtgagatagttttgttaggtgagttgttaggttataattaacctatatttcgggtcttt

SEQ ID NO: 234305 - DNA, 1371 bp, Cannabis indica
caaacataactaacataactaaaatcttcaaactcaaaatataatactgttcattaaattctaaacataactaacataacggtcaaatgtcagatattaaaagttaggtaatatgatgaaagaattggcgccaaaatccgttaaagacaattccaaagaacaaatctcacaccatattatataaaccaaacacaccactctccaattttccctttcactttctcagaaaaaacactccaatttcccctcattttccatcttattaatcttcaagaacaatggagaataataataacaattcattgtttggaaatgtagtaaagaataccaacactttcttcctcccaaatccactagcaacttcccttaaagccctctcaaatctccaaaatgccaccatttacataagcgacagagctatgggcataggcgatattcgaatccttaagacggtgttcttgcttgacggccgtgtcaaaatcgaaggacaagaatgggacacatttgtcagtgagcgcgggattcgagttggagatgttcttctcttgagaattttttacaacattccttacataatcaatgtcacattatttagaataaacccccaaaataacccaattttgatcaatcctcctaaaccccaacaaaataatgttcatcatgatcataaagatcttgatctaaatttgggttttgaaatcaaaccatttttgtgtgtgaagaaactgagtgaggctgatttgagaagtgatcatcatcaaattgaaatgcctaaagagattggagaaatggtaatggaagaagcagaggatttgattgaattcttgaaaggtgatgattttggggttgttgttagggatcaaaacattggggcaattcagattgagactaagttgaaaatgagagatgatggtgtggttttgtttggtgaaaattggtcccaattggttgatcttcgtggccttaaaggtggagatgttattgttttctatgttgatctttgtcgacgtgtcatcatcacaaccgtttatcgttcccatcaagaacttgatttctttattccatctcaacctcataatcttggtgatcatattcatacttagataattatattatgtcattcttttctttcatttgtactttgtttttgaagattcaatagtcattttgatgttttgttttatataattattgtcgttttacaagttttttttgtcgttttacattaaataattacatgcatgaatgaagatcaatcaaatgataatgatgagtgagtgaaagtagagttcatttaaacttactattattgttacacttaaaatgttaaattagaagatttagttatttattgggtctctattaaaatgg

SEQ ID NO: 234306 - DNA, 988 bp, Cannabis indica
ctggccaatatttctcttcgattttcgaatcgtttttctatttctaaatcaaccgtcatcttgctgctctccctctctaaaccaaagatcatcattactcttcagcgtcgattccagaccgtctctcccagctgtgaaatgatggttcagacacttctccactcctcgaggcgacccttcttctccaggtattgctctcttttctttctccccattctcacttatatatttgccgtttccatatttctttgcacatctgtattaaactttgctgaaaatccatcctttcttacctaccactttgctatggcttcctcttcaaccaaccccaaccccatttctgctcttgacgatgaagatagtcttgttcatgatttcgaccacatttctatccactcctccacggatactgatgctttctgcttgattttcaagctcttatctcccaaaccagctaaaccttcctggattgaaaaagccatgactgaagcttggaccctacgttttccctgtcaaatttctgagtatcactctgggctctatcttgcttctttccaatgtgatggagacaggcgccgtgtgcttgaagagcagccatggcactttgacaagttcttgatggtcttcacccatccggatgtctctccaacaccgactcctgactctgttcgatacaccccgttttgggttcaagtacatcgcattccgtttggccgtaaaagtccccaactcgctcagtttatcgctgacgaaattggtgatcttctggaaatcttccctctttccttagtggaaaactttggaccttatctgcgtttccgtgttctatttgatatcactaagcccctccgtagaggaatgaccattcgattccgaggcatctctgagcctcgttgggttagtttcaagtacgaaggacttcccaatttctgctatttttgtggtttgcttgaccatacttacaacaaatgctccaaataccttctcc

SEQ ID NO: 234307 - DNA, 1095 bp, Cannabis indica
gacttcaaacaatgttctttctcttccatctctatcttttatgtttaagtgtttgtatgattttatagttgctatgcttgatgctattttttgtgattaaacttactatagaaatataggaagttttcacataaattgtgtttataattcttaaccagattataaacttcttaatttaacttatcaattgaacaggaagaagagaaattggtgcaattttatattgagtcttagtttactttattaaagattatagaaaaccattaaccaattataaagtgtcacctcgtagtgatgctaggtaccttggtgccgtaaattgtcatatttgacaatattttattgttattgttgtgtatgtctcttctaatttagactatcaagactaattgaaatattttaattcttttaaaaatataataataatatcgtacaaaactaagaatgcaacagaaatagatgaattgttcctactaaaatactatcagcttcaaaataaagatgacaccaaaatatgtgtcaccttattagcagatttcttaatactaactgcaaaaaaattaaacataaactattaatacgagtctgataatccgaaactagggagagatcattcttctgtttttaatcaaatcattgattacattacatataaatacatgaacgttgtcacattattactgggctgatcgaaacactaagatgaataaactaaaaattattatatgtagaaactttatttttttcctgaaagaatatagtaattaaatagtagctggttaccataattggcaatatcgatcatgcagtgatctgaagttcaatcctagattgaatatgattttctcatgcttactttgaattgggagctatattcgtacaaatttgaagagacttgagattgactcattattggagctatacttaaattataaaacaattataattcttcccaaaagtgttcttttactttagtgtattaaaactataaataaagaatgaaagaaagaacttaagcatatctatatctactaattttattaagtaaaggctgcccacaactaaaatggactggaaaacttgcaaaaattagct

SEQ ID NO: 234308 - DNA, 1251 bp, Cannabis indica
aaattcccttcatattttttttttgaaaaaaaacaaatgaaactacagtgataaccggagttgtgactggggctggaaagtccccgaagtttggtgttggtgccagaaaagtcgctagagtagctgcaagtgtcagaaaagtcgtcaaagttgctgtcggcaccggaaaagtctttggaattggcattattggtggaaaaatcactagaataatcaccaaaaaactggtttcttcataaaaaaaaactagcttcttcagctactccggtgacttttcccgcgccgatagcaaactccggaaaagtcgtcgtaattggcattgtcgtcagaaaaattactagaaaaatcagtaaaaaaattggtttcttcatcaagaaaacagtttcttggtgatttttttggtgattttttcgacgacaatgccaattttgatgacttttttggcatcggtagcaactccggtgacttttttgacatcggtagctactctggtgacttttccagtgctggcagcaaactccggtgacttttcggtaccaatgataaataaaactgcctaaaccaaagaaaaacattaaatatgaactttagaaacttaatttaaatatatatgacatatcaaataccctaaaataacctaaaaataaaaaataaaaataaaaaaatgcgatatgtaaattggttaaacttaagtaaacaacttttaaaatcccataatgagtgtaatttcctcttaaaaatactttaaatataataaaaaaaaataatgccagctaaataatattttaatcagtgttatttgtttctcactctaaattaaatattagtacattctttttattattattattatatcacattattattattaaattattattattattaaatttatatcacattgaattaattgttatactcattacatttatttttttataaaaagatacatttctccttctttttaattgttttttgatattttgacctccttaatttagttccattgatattttggaaaatatcaccacacaatttttttagtatttgtccatttgtcatatataagcaaatccaaattggacaaatctttactcggagtagagcataaatctaaaagaattcaagaagaccattttaggaacaagaaaattacattgtgatttggattccgatgaaacaatacatcaatgagaaggtagttcaataagtttgtttataagtttagtgagttttttttgtttatttttc

SEQ ID NO: 234309 - DNA, 1204 bp, Cannabis indica
aaaaagaagttctcattggtcgtcttgattggtctcctattcgaaaagattttacattttggtctaataatattgcgcaatttgaagagaacaactttcaggtatgttcttggtttaatttttttcgtaaagatactcgatcgatcaattactcaaataacaaccttattgtgcagattttaagagtcctgattacaattttggacacatcgtgtgatccaagagctttggctgttgcttgcttcgatctgtcacagttcatcaagcaccatatagacggtcgattcatagtgacgaagctcaacgccaaggaacgagtgatgaagttgttggaccacaagaatgacgaagttaccaaaaatgcattagtatgcactcagaggctattacttagccccaagtatgctaacttttgctaaggttgttgactcgccactaaaatatcctacaagaaggcgaggaggcgagggctaatgtttcttatcaattaattttttttatatttttaaactcagaaaaaaattatgggactttaaattagttatgtaattaattatattttcaagagtaatattttattttaatttaagttttaattagttaaattagtcgaattaggtgaggccacttgtttagttgttcttttttgaaatcaattatcaaatcaaagaatcaatatttgtgttggaatttataacaatcaattatcaaatcaaagaaacttattaattttgattaatccaagaagtcatctatgtttatatatggaacaaaagaatgagctatatatggagtaacacacctcatatgagtcaattaatggcaacttaatttgcttaaataacaatattctaagccatgaacatctccaataaaaataaaataaatttaaattatgatcaataaatgcctttgcaacgttgtctttccccttttttcttttggtaccaaactgttgagtaaattccacttataaccaagtccatttacatctaaatcagcaaagttaaaacagaaacaaataaaaggactcaatcttaggtggcttcgcctttactgaattaagaaataagagttagttacaactgttattgtaactaactcctagatctgtgatcaaccgactctatgcaagtatataaacatgaaatcaaagcaaatacatatagataatacaaaatcagaagagagagagagagagaga

SEQ ID NO: 234310 - DNA, 666 bp, Cannabis indica
aaaaaaagtattcctcaccttattcccttgttgaggttgggtcatagatttacaatagttgggcctggctcagttctctatagcacatccaaatctactattcattcccctaacatgggcctagcattggttctccttgcatgaatctgcccatattcagaaaccaactagaagtttggtcgtcctactaataaaaaaggaaatttacataaaattactacttttgtcaaaaaatttacacattttcatttaaactttaaagattctattgtttacatttttaccatattcacaaaaataacactagaataattgatcagaaaactagtttttcattagtaaattggttttggttaaatagaagtaaaatttatatacgagcttttttgtatggtattttttcattcatatgatgatttatttcatatttttttaatttttttttaaaatgtcatatttagaacaattatttgcatgttatatattaaaacttttttttttctctttcttgtaatagctgtaaaataaaataaaattagctatgcatatggaaaatagataaaaacaaaaaaattatttatttgtattggaatgattttttcagctatattaaaatggataatcgttctactacaattatagaaaacttattctcaaataaaaatt

SEQ ID NO: 234311 - DNA, 994 bp, Cannabis indica
tgaattttttcacgaacaaaatgataatcaatctcaatgtgcttagttcgttcgttcgtttaacacacgatttgaggcaacatgaagagcatattgattatcacaccacaattttattggaatagaaatcttaaactcgaattcaatcaaaagttgataaatccatattacctcacacacagactgtgccatagctctataccctgattaagcattggatctaaacacaacattttgtttcttacttttctaaaggattagattgcccccaacaaatacacaatatcttgaagtggatcgtctatctaccctggagtctgcccaatctgcatcaaagaaacacttaatctgggtatgtccataatccttgtaaactataccccgtcctggtgctcctttcaagtagcataaaatttgctctaatgctgcccaatgatgaattgttggagaagacataaactgactaatgacactaactgggaatgcaatatttaaacgagtcacaattagataattcaactttccaatcaatttgcgatatttctcaggatcttcaaataattccccatcacgtgtaagacgcacaactggattcattggagcattacatggttttactctcaattttcctgtctcaattaacaaattaagtacatacttcctttgagacagaaaaataccttatttattccgagaaacttcaacaccaagaaatacttgagcacccctaaatccttcgtaagaaactgggtatgaatgaatgacttaagggctgagatgcctccagtatcatttcgagtaataacaatgtcatcaacatacaccacaaacaaaatgacaccaacaattgatcttttatagaacactgaatgatctgacttacttttcaacaagccaaatttcttaacagtctgactaaatttaccaaaccaagcatgagaattttgttttagtccatataaagatttgcaaagacgacaaacttgccctaact

SEQ ID NO: 234312 - DNA, 683 bp, Cannabis indica
aaaaaaagtaaaaatataaaacatcaagataaattaagagtaaagatttgaaattaaagttgagtgtaaccgtctgttcacaagtgatttttaaatgggtgctgggtactcatttcaaagcttatgggatcttgttttgatacttctaaggttctagaacttgaggatgaggtctcctacctcagtttttgaccattccaaattcaatggtcaaactagatttgacatttgagtggtcaaaaccagcgcaccagattgattgtcaacttaggcgctaggtcttgtttctagagtctcgggattatggttttctccctaagtttgttggaatctttattatttctaatgatggaaaaaatttcaaaaacacattttcaagaacttgattggaaataacccaggctgacaatctattaatctgggaactaggcccagtgccatgtgtcaacctggacactaggtcgagtaccaagtgtcaacctggggactgggtccccattttgacccttcaaaagttccatttggtccacgaaaatagttgaatcttaatctttgctaaaagcaaagaagatgcccaaaagattgtgcgaaaaacatcatcgaaatcagcccaagttaacaaaatgtcaaccttggcgctaggccttgcttttggcatcaaggaagtgttgtttcttccccta

SEQ ID NO: 234313 - DNA, 1454 bp, Cannabis indica
tttggttgttggaaaatgaggttgattcattcctagggatttaaggttgcaagtatgaagttttgttaatttatgttcttgaatgaagcatgatgttcatggatttgtaatctgaatttcagtgtgttttatggttggatatgatgcatgaattttgtgttattatcgtatgtttggttggggtttgactctaggaaaatttggcatgtttatgccttaaaaatggagtttttggggtttctaaacccagtcgtcgcgacgggatttttggccgtggcgactgggtttggcaatgagaaaatatgttattcccgattttgttttggccataacttttgactcgggacttcgtttgagacgttctttatatcgttggaaagctcgttccaagctctattttattatctgtgttttgaatgccatgtttatattatgtcaaagtgaaattagggattaaccctatttgtgaaatcccaggttgtgtgactaggattaccggcacttgatcaggaggacccaggggtttggaatctctgttattgtgggacaacaggtaagacagtagtttgcacgtagagtatgcgcggtggcgcttatgttgaatatgatatatgtgagtaattgtaaccgagattagggttattaccctaatatgagcggttaatagcctagggttattaccctagtgatataagttgagtaaatgctatgccatgctaagtatatgattatattgagatttaagggttatgcgtttaaggcataatcgggttggactcggtaaccataaccgagatgaaccacctaaggccttattgtatttagacgtgtgagagcaacacgtaggtctatgccacgtagacataaatagacgtgtgagagtaacacgtaggtttacgtcacgtaaacataaataggcatgtgagcccaacatgtaggtctgtgacacacagacagatttaaatggcattactgtttatattatatgatgagtatattattgttatgttttatactgtcttgctgggcttggctcacgggtgctctactgtgcaggaaagggtaaagttgtgtttgatcagccatggtgtaggagctggacgaggaatgtacatgttcgggccacactagaccaagcgggttggggtctaccagtgatgtattttgagactctgttttgccgcttaggtcggccaaaggaaaagaacttgtaatagtgttttgtaaatacttttgggatcccaacttttgtaacttttaaattataaggtttaaattattacaagttattttcattccgtttattaataaagtttaatttctgcgcttatttttctagtaatccgattaggggattagggtttcataagtttattgggtagcgtgcctaattatttagggcgttacactataaatgccaaaactatttacttaataattaaaataattatcaa

SEQ ID NO: 234314 - DNA, 610 bp, Cannabis indica
ggatcggatgaacacccctaatatacagtcttgtttcaacttcacactaacacactctcacactgaaggagaggagaggagaggagaggtttctaatttcttaagaagtaaatacaactcgctgtaagatttcaatttcttcctttccaacttaccaagtagcagaaaagtgagcttaaaggccatagaggaggagaatatcccagctcaagatacttttcttgcatattatatttgtttgaagactagtatcccaaactttttatttgttctcaagttttaattcatccacccaccacagtatatttgagattaacatagttgaaaatgcacttgaaaactttatgtgaggagatcttaccattacttttctctctttttaaatttcaaataagtatataaactatagagaattattaatatgagtttttataataataattgtttattcgaaaattctaagatgatgacgtgtcaagagtaccaccacgtggcacaaaaataccgggactaaattaatgaagaatgtgtaaagtcatgactgttgagatgaccgtcaatcatgaagtgttagaatagaggatacccttacctcctacaccttcatagt

SEQ ID NO: 234315 - DNA, 835 bp, Cannabis indica
acaaaatatcactattcaaataggttaatatccctccaaaataggaaaagtaacacttttatcttgtatattaaatcatgaaaaaagataactaatatccttaaagaataggtagataatttgagggagaatatctgtgtttttggattgtttgagttgtctcgtattagaaatcaagctataacccatctacaaagttttctacaaacccctccaatcgttcaggctctttctatgctccttgcacatgttggccagtctaccctactcttagggcctggttgggacataagttttattggtcggccagggtgtggtatggccagaaccttttagctggtcatttccttccattttggtcttgcccaactatttagaacccctgttaattcacatgatgtgtagggtaactttgttcatctattgacagactgtattccaagtgacctcaatttttcttatgtggacataccacgtcaagtgggcaaaaattaggataacatttgcccccaaaaccctatgcggacatctttacagatatggactttccaactctatccttgcttgtaaacaaccttaaccgggcagcaatggatgtcccaatatttgacctttcaaatcgtccactttatgacaaaaaatggctttatttccattcattatggggatttatgttttggctgtacactttcccatttttgaactattggtcttctacccctatgcatggctatctttgtggaaaaataactacctaataagtttttgggggaaaagactacagaacctatgtaaggttcaactcttgttcattttgatttcctctctctctctc

SEQ ID NO: 234316 - DNA, 1322 bp, Cannabis indica
atctcagcccactagtgcaggttccccgaaccagggtaatctcatatactaattctcaagagtttcgtattacaatttccagttcagtctaaggaatttaatacaatctttacagcaattagtaatgaattaccaatagcaatcaagaatcttgattgcaagtgcacaatcccttgtgcagcaattaagttcgtctttgacacttcttcaatctgaaatcccttcagctctgatgacgaagttgacatgaaactcccttctgtctgaactcagcaacgtgaggctctgatcgttctgccattgatgaccatcttcaagctatacaatcagacctgtagaaacaataacaagaacagcaagatacaaaactaacacccacgatgaaactgaacaaactaacaatatcgatttttttttataatctgtttacagaatgaaaccgactatttatacccaacagaacagtctacctggcactaactaactcctaacgataagtcataacagactcacaccaacttaacattacacaagtgtgcagatataacaggctaaaaatccagacatggctagacattctattaaaataatctgtcacaaaataacgacacttacaacatttttgctctgaaaaaagaagaatcaagcagttagcccccaaaccaaaccctaatgtcaaaagagggaatgggggtccctaaccgctggaaagaggccccctccggatgtttgccaaaaatgggaacccaaaggagtttccttagcaaacatcgggtgcaaaaatctcagaggcagcgaaagcagaagaaaagcaaaaaacgcagaatgtgggaacacaaatcgcctcatgccctaaataatctttcgacaaagggatcgattgcaaagaagaatggaggaaaataacgaaacacaaataaaagagattttatacatcacataacagactcagtcaaagttactccctagaaatccaacacttaaccacaaagttctaccctagcatgcaaataaacagtaaagacatagagtgtccaagaaacttacatgaaagttgagaactgggggttggtgttgatcgacggtaaaaggtggattggaagcgatggaggaatagcaacaagaaatctacggatattgaaattttttctcaaaggtgttcttgtgaaataatgacgcagtggtgaaagtaactaaatgaaggagaaaggctggcttttataggtcagaacgggtgcaaagcaactgtgatcaggcgtcatcgtacggtgggaatcgcaatcgattcgtattttgcagatccaacggttgggataaatgct

SEQ ID NO: 234317 - DNA, 1158 bp, Cannabis indica
tgagaaaaaatttgactaaaaaattatttcggatgctaaaacagataggggtgcatcaatatgtccattttaagggagtgcattgtagaattttccataaatatacactcttgtataaataactaacacaacacttttgtagtatgagttcggttcggtaataacatcataaccagattttggcgccaaaatctgttaatatcaaacactaaccaactactatttatatatataccataccatacattaaaattaaacaccactctcttctctccctctctctgtttttcctgttttcatctcaatttgaaaaatggatcaagaaaattcactgtttggaactcttgtcaaagacatcaccaagttggtaatcccaaatccactatcaaccaccattgaagcacttccaatgttccaaagtagtaatctttacatcaacgacaaagagtttggagacaacaacacccgaagggttaggcctgtgttcttaggcaacggcattgtccacattgcaggacccgaatgggactccttcgtaagagatcgcgggatcagagttggagacgttcttctcttgacatttgttcatcaagttacttctccaaacatcatattcactgccaacttaatccgattaaacccccaaaataatgagactttcattcctttgttaccccaagaagaagcacaacaagagcgtaatcgacaaccacaacgacaacaagggccacaaccaattttgtgtgtgaaaagattgagtcttgaagatgtgtctaatgttgttggtcatcaaatttttatgcctaaagagatattcgaagtgtttatagcatcaggaggaggaagggaacttgctaatttgcaatatggtaattttgtggttgaattgaaagaccaacacattccatttttggggtttgagacaaatttgggtttgagagttgatgcaatggaagttgttttgatttcatctaatcattggtttgagtatgcgaatcgtcgtaggcttagcgtcggagatgtcgttgtgttctgtttcgatctttcccgacgaactatcatcacatcggcctttcgttaccgtcatgaatttggtgtttacaatccaatttattatcgcacgtaaattgttaaatgaatcttggaatctttcttttt

SEQ ID NO: 234318 - DNA, 1037 bp, Cannabis indica
tttagatcaacttaaattgagatatttttttcaaattaagttaattagttcaagatacttaatttgttatttaaataaattttgaaaatcattcaatttgaaaatttagttatttaacatagtatttttggtttttcttttttctctctcgtgaacagctctgagagctgaagccatggcaaaatcacgaggaagaggacgggggagaccaaaatcatcagcaaggaaaacgaagcaactctcaaatgtgaaatcgaaggggtcactggtaccagaggaggatctcattattgatcccttagcactttcagaagatgaagaggaaattgagggggtgaatgaagatgtattcagaccattatcgcctaaatcctccctgactgaaattctgaggcaagaggaaattcgccatgatttctcctcattcattgaagcgaatcaactcccatccctgttcttcgaactggaggtataattaagaacttgggaccagcttttgagggatcaacgagtaaatccagagtcaagatcacgcatgaggatattgaggatgaggtttctttttggaaatcgtccttagtttgttatgttcttggagccaacccaccattatctgtgcttgaaggatttgctcgccgcatatggaaagacaagatcgacaaagtaggtatgttatcctatggaattttcttaattcgatttcatagtatagatgaaaggaatgctgtattgaatgggggatatacttttttcaataaaagacctgtgattatgaaaccttgggaccctaatacaaactttaagaaggaggatatcagatcagttccagtttgggttcacctcacggacttggaattgaaatactggggtcaaaaatctttattcaagatcattgggcagattggcaatccattaatggttgatgatgttacaagggaaagagataagttgagctatcctagagttcttattgaggttctaattcatcaggattttccaagtatcatagagtttgaggatgaatttggatctaatgt

SEQ ID NO: 234319 - DNA, 656 bp, Cannabis indica
tttcattcagagaaaaacctgagccttcttctctaaaccctagccgccacttcttactcttcttcttccttcataatttcgaaccacttagtgttagtctaggacagaaaggatacaagggttagagatctaaaataatttccaacagattctgcgagcgatcttagaggtcctcctcaggctgacaaggaatccaggaagaaagtagtcctggttggcgtggtctcggattctgctaaagaacccaaccagtccaagacccaagcttccacaagaagaccttcgtgccaacctctctctggtatcgagaaatttcctaaggctgggaatgagatcttggctgcaggaaatgggtggctgtaggaaatgagatcttctgatgtggagaatgaggtctatgtagaggtcgagaccttctacgtgtagacggtctttctcgagctatgtgtagtcagtctttctccaagctatgtgtagatagtctttctctgaactatatgtagacggtctttctcaagtttatcaacccccttgtattctttgtttaggaagatgacttaatggttttcccttagtggcatttttgtaaagacaagtttgtaaaccaacttgagttttctcttatcttaaatgctttgtactcttttcattcgaac

SEQ ID NO: 234320 - DNA, 1249 bp, Cannabis indica
ttaattaatgattataaatatcaaccattagatatttgatccaatggtcaagaataaaatacccatacattggtaatacccattaagagcatacccatatatatatgcatatatataggggtgaattttatttttgttttgaggaaaacgactttttgatttataaaaaggtgataggagaatttttagggagaagttgaagaataccctcttttgttatacattaaacaaatttacctccaaataaaatttaattcaaatatacctctttttatgagtattgtacccaaattattctcacacactcacataactaagacataatttcaaacataataaatttgtgttctttgtagatggatgtgtagatttgtgagaaagtttggggcaacattttgattagaaaagaatgaaaactatcatgaagtaataggagtaaactttgtagaatgattgaaaaaagaggtaaatataagatattttgaaagaggataaaaattaaacgcatcaagttaaaagagatatgtagtgtaattttctcaaatttttatatgtttgtgggcttgggctaggaattttggattgggcgtttagaaaattctagagaaatgtgggaatgtatttttagatgcttgtttctatgcttgaactgttgagtaacaaagagtgtccatattgtgttctgcatccattttaggattgttgagtagcaaaaaagtgtagatcccaagctatgtatctatcttgggaccatagaatgttgaaggagggttatctttgtgtcggcatccctagtagataccatattttctaatagtatttttacttatgttgagtagtagaaagaaagtgggtaccccttacgctttgtccctagtatatggttgctagatcgatacattccgatattgatagcaatggttggcattttgtggtccttacggacatggatggcgattttgattgagaggttctggatgcctcgtctctcgctcctgtcaccgtcgcagaagagtattatggtcaggatgtagatgaccatgatgcaattgggttagcggtagacagagaggaagtcccagtaataggttatgccttagcccaattagtgaatgaggatgatggaccgagtttcctaggtaaatcacatagtattttacgcattaatcttggctctaaattgacggttctactcctagctcaaatgagcttggcttatggcattacccgtaatatgaaaatgaggcta

SEQ ID NO: 234321 - DNA, 937 bp, Cannabis indica
attaaagataaaagaaaatacatgataaaaagtacatatagttatatacccatatatgtagatataagtatttactatacgtacgtaaacataaaagtcatttataatgtaatgcatgcatacacataacatgccttattactattcattacaaatgacattattattatatatatttatatttttaaatgcatattccgatattacttggtccagtgggtagagcacaatgacaaccaggttggcaaggactccaaggagcacaacctctacccacgcatcgattgttgtgacctttccttcaatagtacctcaaaaagagtatcacggtccataatactcaccatttttccatcttgaccgttcatcacaatacgatcctgatctaatgatgagattgcaaaagtaggagatggcacaaacacaacaccaacaactactatgtaaatcaccatcatcatcacaccactcttgcccatattgatatgatatatattttagattatgatttgatttcttgattttgatgaactcactattgtatttgtatatatcattaatctctataattatcattctatttatagcagtattctacaactacttcaattgaatatgttgatcatatatattaattaattattctatcatgacatttatgagtttcgatctcttttgcctcaactatatattaattaatacaaagataattgttattgactaatgatgggagattttattttcaagaaagatgagccctcattaatagccatatcttatctcttactgtattatataccatgaattcttcttcttagcaacaacatatctttatatatatacattataaaaaatcttacttttagtcacaacaaaatttgtgattaaaagtaaaaaaaattgtgactaatgataaattattattcttatgttgtga

SEQ ID NO: 234322 - DNA, 2484 bp, Cannabis indica
ttttcttcttttaatttctaaaagaaaaacaataaaactcacctaaatcaaagtcacattattacacttgttcaataaacaaaaagcacattattacacatatataattatttaggactatatatttttttttctattaattatttatataatttttttttattaattgtattattaatcttattgttattttttttaatggaagattaatctttattaaacaacgacttctgctaccaagtaaggtagcaaatcatttagaatagactctaaattgaaacaacaattaagatataagatagttgaccgtttgacaaaatagacataaacattatgtaattagcaagtaagttcttacaatcttgaatgaaaagtccagaaatcatgtttaacgaactttgaatagcttgtaccgtgcatagactataattggtttcaacatacacttatcaccaaccacgatctttaatccaactaagtgcctctcaaacaccaatagcctctgccaggaccggtcctactgagccaagggagagtttggtacgaccctttataagtatcccgagacatcacacacaacaatacacaaacaataacttctcccattatcaaacaaagttgcatccacattattcttgatactattagcttgaggtaaagtccagtactataatacatcacttgtctgagagaaagaccatggcgatttcaacttggaactttgagcacgtctccaatgttcaagctaacgatttgcaaatacaaccatgtccacatccttcaccaccttcccattccaaactagatcatttcttgtaccccaaatggcccaacacactgctgccaccctgcaatttagattagcaaaccccttgctaaacaccactgcgcaccagttgcttcttgcaggtacttttaatttagcaattgaatgaaaccctagtctctttattttctctgcatctctctattctttattggttattcttctcaaataattgttatggtatcagagttaagtttatgagagtgcatttcttaaatgtaatcacagttttcgtaggcatccgtacaacatttgtatagttagacattctaattttcggtattgatttcttcaatttttggtattgatttattcgtacagttcaacattccagtatcaattttgtatttggaaatttttgcaatgtatttatttctgcaatggctacaataaaggtgattccttttaagcgatcgtgtgagattggatgaaaagaattattcgtatttgaattatgttatgaaaaattttctgaaaagaaaaagatgtggaattatatttttttaagaaaaaagaggaaacatgcagatggtaatgcagatctattagaaaatttgaaaattctcacctagataaataaaactgtcgaacaatctattggtacccaattagcaaagtacaagacaacaaaagaagtttgggaccatcttagattgtattcatagtctaattttgcaaagcaattttaattagaaattgatattagagctattgaacgaaagatatgagcattcaagagttctattatgtaatgagagatcttaaggatccattggaactcaccaaattagaaaaactacgtgcttttgcaccatatatttctcatagagaggaacaatgattcgttcaatttttaatggctcctcttagtgattttgagggacttcgtggttctatattgcatcattcactgcttccactggtcgattcaatagtaagtgaattgttagcagatgaaattcatcttaagtctcagtcaggaaaaggcattctcttaacaccaaattcttatattttggcaatccttactacatcatttcctctacaagagaacaaacctcgcacaaaggttagtattaatgagtgttgcttttgtaaatagaaaggtcattagaaagatcaatgtcctaagcttgtgaatcgtgctctgcagcaatgaagatataactccaaacctcctaatatgggtaaccaaccacagtttgacaaccaaattcgatctccacaatttagtactattgtaactgttcattcatctggctcttacaattttgctgctctgtcagaacagtttcaaaagtttcttgctacttaaccaaatgccatgtatgtctcttctttggtaggtcaaccacccacttgcacgtcaggtatgccaccttccacatgagttttggactcatgtgtttgccatgtatgtctcttctttgtcacttctaaatgtttatcatattcctagtctttcattgaatcttttatatgttggtcaattgtgtgattctggttattcagtatcttttcttctacttcttgtcatgtgcaggatcgacaacctcagaagctaattgggaccagccgtaggcgaggggattatatgttttggatgactcgaggttattagtatttgcagcgcctagtgtaaatttgtcatttttttt

SEQ ID NO: 234323 - DNA, 1559 bp, Cannabis indica
tttaaataaaaagttaaagttaattaaagttaattacatttattttaatattaatttatgtttattttgctaaaaaaaaaacgcaattttttatttaataatatcaccaaattattaagtatccactattatgtaaaattatatatgagaaaggaagatataaattcaaataagaacaaatttgtgtctaaacaattaatccatgcttaaaaatgacaaatattaatactattcaatatttaataaaaaaaagtacatattctccaaaattttcaataggttgcctatcttatacaaaagtcttacccttgaaacattctcaaccattagatctaactttttgctttttcaaaaataattaatggttgaaaatacatagaggaatcacacaccacaaaataaagtgaagtattacataattagccataaaggttatatgaaaatgttaaatgtatatatattacattgttgggttgggttgagcgaaggggtcggcctaagcgaaggagcatagtgggctgtcccaaagcaacttggcccttactttgtccaaaaatgggccaacttattgtttcatcctatattattatataataaaaaaggtcacatgtaggcactaggcgggtcacaggtgcttgttcttgcttggttgcttccctggctgggctgggctgggctgggacattaaatttgaccccatgatctccatgcatgcattgcattcatgccaattttggttatgcaactaaactaactgcaaagtcacacttttcctcatagtcaactttggcttggtagatctgttattttgacttatattaaaaatggtagattttgcttgcagtccatgtttttcgtatgcaacaaagtgaatagtgatagcatagcactgtagtctgtagttggtaaacaaacagattgagatttcagatttcagatttcagatttgagggtgagaatagtgagaataagtgagagtggtgtatcatgagacttactcatgtgagtgtgtgcttaattaatgtcagaggaatcaaaatcagttacattgcatgaggcctgatgagcctcaggtgaccagtcagggaggcatgaaagaattacatatttattagatgcaatgaatgaatcaaacaaacaaacaaacaaagaaaataactacatatacatacatatgccttctctctctctctctctctctctctatatatatatatagtaagtatgttacttgaaaattaatttgaaaaaggaaagaaaccatatttgtgctaatttgccaatgaaaaagggaaattgcatatggctgaattagatttggaaatggtgtgtttgggagtttttttctattttaataataataataatgataataaaagggaaatggaataaaaagagattaggattaggaccaagggagaagaaccttgggagacacactgccctcactttctaaaatgagcaagttgtttgtcagcaaatagaccccacttcaatttgggaattcactgaacccaacccaacctaatacctattctctctttacaattattattatt

SEQ ID NO: 234324 - DNA, 1017 bp, Cannabis indica
gatttaaaaaaaaaaaaaaactagaagtagatagataaaaaaaaaaaaaactgaaatgagaaataaatacaacaattaaactagaaataattactttaaaattaaaatgtatattcaaaactagcctaattaatagtaagaagtggaaagtatttaaaaacaaaataaaatttagtataataaagaaaaacatcaaaataatgacatagaaactgaacgaaagctttttttttttttgaaggaaactgaacgaaagcttttaaaaattttaaaaggttgaattttaaataaaattaattattaagaaagcaattaagaaaaaaaccaattaaacataataaatgaaataacttaatcaataattaactgctgtttgtttttttttttttttttttttttgtagataattaactgctgtttgttactcatctaactataaaaattataataaaactttgaaaaactaagatgtgcgcatgaataaaaccggaatcaccatggccacagactgaaataagactttaatagaacatgcaagaaaaaaaaaaaaaacatgaagaactaattgtcgcatgtagtaagttgttcattttaacgccacattaacgatataaaatattaggatatataaatgaaaccaaatttaaaaacttacaagatcaattattacatggtaaaacaaaaattaacacatatgatgaaaacaagaaatagaaaaatacgtatctgatttcaacgtttctgcttcaatcaccctgagtagaaaatgtagtccctattatcatctccactacactgaaattaatacagccaccatcatcgattgcagttctcgttattgctgctgctattcaagtagaactccaactcctcccacctatactacgtgtcacgggctcaccttttcaggcagcggaacacccgtgcggcaccttgacttctctaagccaaggtcagccttccaaccatccgagtaacaatgggctcatttttcgtgcgaccgtgtgcctcgtgcac

SEQ ID NO: 234325 - DNA, 729 bp, Cannabis indica
attttctattgttgttgttgttgtgtatttcataattttttgtttcttattgtatgcatattttaatgttttcaacagttgtttgttgttgtactgacttgttcttttccccaaacccattacttactgatattctcatcttcatcatcttcaaaactctcttcttcttaagtttttttttcagatttttttcttcattttgtttgaaaaattgaaccacgatttctcaatcgtggttaccattacttcttgctcttcttatatccatcatcttcaaaattttcttcagcttcttaagcttcattttagattttattttgtttttttgtttgtgcatgttcagtctcaaatatcaatttgagattttgttcatcactctctgattttgttaaatttcatatattttgttgttctcatatgtgatattggatgtttagtattatatacttaatttttatgtttcttaacggttaatttttggttgttctggtattggtttttaacgtatagagaaattttccaaggtgaaggttctgtctcgtgatgttatagaagtcctcattgacaaaagagttattgaggtatagtatttttttttttgtgattttatttggttagtttattttgtagttttactgttggcttacagtgttttatttgattttttatgttattgtttcaggatcagaatatttaatacttacgttctgactggaataatagttgttt

SEQ ID NO: 234326 - DNA, 743 bp, Cannabis indica
ggaataatttacaatataaaattaatgttcaaatagtctattttacatatgtataaaataaaataatcacgcgtgcaacaaactgtttgaacgtaatcttcggcttgttaaatttttttgaatttttaaaaattttatagtttgtcttaaataactataatttacatgaccatgagaaaaaatttatctaaaaaattatttcggatactaaaacggatagagatgtattagtacatcttttttaaaggagtgcattatagaattttctaacattatttatcattaacgaaaaattaaaaaatcttttttcttacccggacttgctacttctttataagtagaaattaaaagtggatggcctcacttacaatactccattcaagagagatagcattaaagaaattataaaattaatttcttattagtcatgtacttaaaaaatatgtttttcccaaaacaattattttccatcattccatggatataagcctatacaaaaactaaataaaatggaagtttgtacctacattctatttaatattgcactgaaaagtaataaaatcaattaaaaaaaaactaaccttgtagtaatagatctcataaaacaactatggagaatgaagaaaaagagacctgaagaattcatttgcaaaaactttaagaatggtaatattaatttatacggctaccatttttttagttttagttttttcctcttttcaattttaataataaataaaata

SEQ ID NO: 234327 - DNA, 2167 bp, Cannabis indica
ttcgtgttctagccttcagtgtcagcaagttaaatatatatttattattatcttatatacatatattggtttcgattattatgctgtgaaatatgatctctattctctttggtatcatcctacttctacttgtataattatgtctacacttcgtaaaagtaatctttatgagtcttgtaagcatgtgattaaaaagtaaaaggaatttttagttcagtttggatagaagcctaacatctttaaactaggtcttgatgatctcatatactaatcattatttgattgtttatatgatgttttgatatttgaatatgttacaatttttgccaaggagactcagtttacttaaaagagagtgagcccttccaagagaaaggagtgagagatggcgtggtctgcggcgagagcattcaatgttcaggcggtggaaatgggcagctcactgtgccctcggtctcccttagctgcagccggattgggttgtgtctctcttgccggctctactctatggcgatcgtcttcaatcaatcgctctatgccttttgcttgcatgagcattgccactgatgctacccgtattaaagaagctgttaaaacagacaaggctcctgctgcattgggaccctattcccaggctatcaaagcaaataactttctctatgtttctggtgttttgggtcttattcctgagactggaaagtttgtatcagataacgttgaagatcaaaccgagcaggttatgaaaaacatgggagaaattctgaaagcgggtggtgttagctatggttctgtggtcaaaacaacgattatgttggctgacttaaatgacttcaagaaagtaaatgagatctatgctaaatattttccttcacctgcaccggctcgttcaacatatcaagtagcagcattgcctttaaacgccaagattgaaattgagtgcattgcagcgctgtagcgtagcctccctcctcgaaaaggttgttcattttactctcagttaaccattttggattaataatgtgaaaggggaccccagaagatcctataatgtatcgaagtaacttttgccgtatggattataatgttgttgtaacgttgctctctgtaattcgcttacctgtgacactgcagttttgtgaaatggtatcaaaatggagaaagaacttggctctctttcaaaaaaagaaaatgttacaatttagttgtttattaaaatttaatattcaactttaatgttgtttctgtttagttttatacatagtttcctttcctcggttgtctgttccttttattttgggaggatttcatgtttttcttttaggctccttttcaaaagaaaaacaaaattatgttatgtatttactaattatagtttgtaacacaactgagtttttctactgctgaaatagtggtggtcacatgaggagtcatctctcgaaaacttagaaaaccacaaacattgttagagaagccccacgaggccagaacacgagcaatagcagaacaagaaaaagactcgaaaagattaaagatgttaaaagcaagcattgcatgagtccaggaaggagttcgctctaaactttgacagaccgaaatgtgaacacaattttgcagatgaagtaattgtgccatcttgagacctgccaatagcgcatctcactcttgaagacatcaatagcagaggatttttccacaaacagccctttgagcacaccatgatcatcaactacaaccgtcccagccacagcgtggctgttcttgaaggcaccattcactgaaatacgaaccgagtcctgcagaatctgcactctggacctttccttagcaggcaaagagtgaccatctctgtcacgattgaagactccaaaaatcagcaaaggccttctgaacattcggaaccataacatcaatagggagcttagctttgttatggtagcaatcatccctaaaaccccagagtttgtaaacaagaacagctgcaaacacctgaaattccaccaatgtagatgtctctcttaaaagactacctattcttgttctgcttttcttttataaataactcatctaacttagatttagatgacaagtgtgcaaatggttacacactatgaacctccttaagtagcagataaaagtttaaatttattcaacttttcatctaatgact

SEQ ID NO: 234328 - DNA, 1261 bp, Cannabis indica
tcatccaccacctgatcctcctacgtgtaacacttcatcatttgccgagtctccaataccatcgcctattcacataccagaaatccaaccaacttagtccaccacaacttctccaagtgagcttatcacagttgcattgcccaacttaagccagtcagttgatgttgaagtacagtccacttccaatttgcctcctcttaatactgttactaatgttcatgtgactgttatactagtgcctactaacatgtctaatgcagatgtcagtactcacagaaacactactacaacaattgctactcatcccatgattacaaggctcaaagcaaaatttcaaaaaccaaaggcttttcttgcttcctgtgagccaagaacagtgaaatcaacccttcaaatacctaaatggaatggttctatgactcaagagttcagggctctcaccaaaaataacacatatgctctagtcaaactactagtacccaacagaaaatctattggctgcaaatgggtgctcagaatcaaacacaacaaagaggactctgttgaaaggtttaaagccagattggtagcaaaagggttccatcaacaagctggctttgattttgatgagacattcagtcctgtagtcaagcctataactatgagttgtgttaaccattactgtcacaagaggctggtccattcaacaactagatgtaaacaatactttcttgaatggagagttacaagaagaagtatacatgcaacaacctcctagctttgtgagtgaacaacatccaaactatgtttgtaaacttaacaaggatatctatggtcttaaacaagccccaagggctttgtttgagaagctgtccacagttctactcaccatgggctttcacttatctcaagctgatcactcactcttcattaacgtgacaaacacttattgcatctacatattagtatatgtagatgatatattggtaatggacattaatgacaatgatgtgaacaccacaattgttggcttaaacaacacttttactctcaaatatctaggtctggtggactacttcttatgtattcaagttatcaaaacagagcagggtgccttctcacaaaaacaaaatatctacaagatttgctcaccaaggttgagatgcagaatgtgaagactcaaaacacacctatgaacagtggtctaaagttgtccaattatggaagtcaacccatggaaaatatattgtgtcaataaggtgtgccaattcatgcaacacct

SEQ ID NO: 234329 - DNA, 1420 bp, Cannabis indica
tacacctaattataaccctatcttgcatcccacacgtcttgagtctagaacattcatacgacagtactattgacaataatattagcctaactcggtactctagccgtatcgatgtgatagcgtcaatcagtacttatgccaaacatatatcaatcagtatttagtgtaactctatgtagactgataccactattactgatatgttaactaataggtattcataatacacactaaacatgtaatcacatatgctactattatactaatcttaccttgattctgaatttaggtgtgccagtcaacctgagtggaactgctgcttgacggtttacaggcccctaagtcacaacatatgcaaaattgattagtgatacgctaaatcacttttcgggggacttagactcaaaattaaaagtttatctatcgataaatagcttgtcaacaccctaaatttgtagcagctaacctctcttgatcctgaaaataagtgtccctaggatgatcttgagccttcattctagcttccaagaatcgatctctagcttgctgaaagttctttcctatatctcctattgtctcatgattgcgtttcttaagacaatgcttcaatctcattaacttaaggtatattcctttcaatccataggaaacaatcagtttctcctagtttgttaaaactaggtttttaaaattagggtgatctgcccaaaagttgtagtatcaaaatggtttaatcccaattttcacttcagctttagtagaaacaatgcaagagcagtgatccgagattgtctcctaaccaaaatgagtagtagaattatcaaaagtgtcttgccaatcttcattggaaaatgcatgatcaattttcgaataaattctactagtcacatcttggttgttagtccaagtaaaaactgaaccagtactctttaaagcttcaacatgagcctgagaaaaccaagcattgggatcggccaaatcattgagacatatagggttccctcctgatctattttcaagttaaaaaactgcattaaaatctccaagaataagctacggtttcacaagatgcttaagacttagtagatcaatccatagagttttctctcatgtctggtattaaatccatagacaaaagtaatataacaagctttatcattccctgacattttgacatagcaatggacaagccgaggagttttagcaatgacaatcactttgacaaaagtttttctccaaataattagaatacgaccttcaacggtagagcttaagaaataatcccaattaacaaacttattctccatcatctctttgaatttattctcttttaattttgtttcaactaaggctcatacaccaactttattgatactacaaaaatccaaaacaatatattgtttatctctattattcacac

SEQ ID NO: 234330 - DNA, 756 bp, Cannabis indica
aaagcataataaagaggtcaatttataatgattgagtcttcaattacaacattgtgttatttatataataagtgaataatattgatctatgttttattatttagctgctaataaatactaaatattccacctttggagacattattgggtggtgttctatcttgcttctcttttctttttttagttctttttctttttcaaagcgaaagttgtcgtctctttaaacagaaaaagaaaaaagaaaaagtaatctccactaaagcttatataagagcttctaggtgctacttttaaaatgagtatttttattaagcatcactattgcttacatgtgataatttataattagttagcgatatttcttaaaagttactatattaaattatattagagttgatatttaattacattattaatgatatgacacataaaaaggtattaggtactactgttttctaagatttctctttcaaaagtgtcgaaactcttcatatcatctaaaattataatattttattgtatctcttttctacatcacttttgatacttttacttgtaaaagtatcccaacaataataaacactcttcgaatttgctaccatattcacacattattatttattttaaagttattaaaaaaggggaaaaaataagtatggcatcacactacacaaatatacttattaaggatgacgatatttgaagcgacaaaaagtcgtctctgatagtaagggtattagaagcgacattaaattt

SEQ ID NO: 234331 - DNA, 5232 bp, Cannabis indica
tgatcatattgaatttaagtcaaatttgggaaagtttttgtttacaattttattttaaaattatattttgggtaataaataagaactcattatataagctctgggcaatcatgaggagagtcacttcttttctttgcaagtttgcaaaaatcatcaatattggacaattgtacagaatatttattgaatgtgcagtttaattcttgcaacggctaatcaagttaattaataaaaatattaacaataatcatatcttattaatatcgagatcttccacactaacataatcaacatccatatacaaattatcaatttgatgttgcttacaaatgatttaaccctgtaaaaaaaagcatcacatcctaagtatggaaggctctcaagtagcctattgtttttagttgaagttcaattcaattataattttgtaattaaataattatttcattaaaagttttatgatctaaatttttaatgaaaaatctcactaatttggtaggattatattgattactctgtttttaggtagctcatacataaattcatttgaatgctccaactactaattttattagatggatgttaggtttttagatgaaagaaatcctttacttaatataaatttttcaatcataattattcagggtaatgaagtggttaattcactatcaaaaaattattaaaaaaaacaaacgaagtgattaatgacaaaaaatatcaccacaactggaatatttttgtaatttctctaataacaatgaatgacaactgatttttctcgtgtgactaatggcaattaatttttctagtttttacttctctaccttaaattatttcatgtattgcatgatctaaatgctaaaataaatcacttctcactcaacccattaaaaacttataattttttatttaagagtaacttaagaattgtaaatcaaattatgaatttatcaggaacacttttctggtattttggaagggagtaataattgtaacatactcaaattacacatttttttatatagttaatttaaaccatacaattaaaaataatgccatcccatcattccaaactatttatggctaaacttcacatcttgtctatgaaaaaagtgtctaaaattcaagtgagtgactgatataattcattgaaatgtatacgcggtgtgttaatgaaatgatttttgcaaaaagtgaaacagacaggttccagagctataattcaacacgcatcttcatctgaattcttgactatctaaccttctaccacttggaatggagatggccaatctcccttgatttatataaggcagttgatgaggcattacaacagtcaacaatgaatgacctcctttataaatgaaattataaagtttttaaattaaaaaagaacattcttccataaaagaatagatcaataagaagaaatatatcataagaccacgtaaaattcatgatctaatcatgtacccttctttgaatttaagaaggcaaatggtaaaattatggtcataaatttcctccatgaatgctactactgcttcattgtaattagaacaattaagaaatataagaaatgcttcctctctaagtagaagtagatgtgaaatatatcctttcatccaaatcctccctccagagaaaattcagatattttgtctccttgatcagcaaccaaatcatttagccgcaacaaatcttgcccgtgatactaatgagaaacactacagatacagacagtgattaacaaaaaatatttgcctgtacagagatggtggcgaaattgatcaggtcaaaggtcgtttatcaaaggaagagcgtaaactaaatctgttgaaagaggagagcaaatagcaatcctcatcataagtatgatgaccctcctctcattttaatgccacagcttactacagaaaccgttctttgacctcttgctggagataatatctgagaaagagtctaccagctgcccagccaagctacttggatcatcaatcatggtttgaatgaacgtattcacaactctccgctcctgctcagttgatctaaggctaaaccaagttagcaatttcaacctaaattcctgtgttatatgactttcacattcaagccaccggattattttcacacagtactcaaagttttcatccaaggaactaaatccattggatattcggaatggagaaccattaatcagtgtactgtcacactcatgtgcctcctcaattgtgttcaccaatgcccttttccgacaaaaatcggtccttgaatcaacggctggcacatctcctgtcactccatgagtccaggtctgggagtcaccactaccatgcgatcttgctaaaccgttcttcaatatgtcatgagaagcagcgtcatctgcttcaacagttagctgcaagctgcagccattgtcttcatctctggaagactcaaatggtggagttagttcttcatttagatcagggacagaaacaacattcaagtcaagcccacgtgagacagaaggcacccgctcttgtatgatttctgtttttacaactttgtcagctgcacaacacttttctacatccgcactgcaaaacccttctaggtagcctttctcttgagcccatgctagatgtagtatctttcccaggtctcgaaccttgaattcagaaccagctgccactgcatttttcgattcccccttcccactaggactttcctcagtggaggtattctctttcttatcgattttcacagcttgtaaattaggattcttgtgaagtatctcaatgctcttggtgaaacactttgcctcagagtgacccaaatcaccagtttctgtataagatatgatccgaaaagtatactcagtgcaaggctttaaattggatatcaaaatccttctctgatttcttggaaagacacaattgggctcttttgaatatccatcttctctactattgtaataccaaagcttgtagcccttaatctcattcgaagatgctttagacagctcaattaaaataatcacaacagatgatggtgttacttcttcaaaaagaaacttgcaagcagaaggaagtgaatcctctgcaagagaaaacaagaaacatatgtattcatgtcaacttcaattggaaaaaatagagtaattaaaaagaaaagacataagatgttccaacctctgctatttggattgagactagaaacattggccagccattcatctgctttcccaattgcaagggagcagagcttctgcacgtcaccagcaatagagagtctgctgacgattccacgtgccattttagaagaaacaccattcaccgggccaacttctgtttccaatttagccttggcttctttaactatatcatgcacctctcgaaaccttgaagtcccatctaagagtctgtaactcaagtatattctgtaacaaaggacatcaacacgacgtgcatcttttgctacaagtagttgctttttccagcatctgccattataaaataaaatcaaatagatctttagtacaatattaaaactggatggtcttacacacagtacaggtttaaagttaacaagaatttcttaacatataaaaagcattatcagtgcctatatttaatctttaagatgcattaatttgttactcacccaagtatcccagacactttaccacaagaagcacaacaataacttccatctagctgcatcactgcccaagatcaaccaccccaaccttttcacgttgaagggcacactcaatgtggcaagacaatccacaagagtctccctccccagattccgatgagcaaaccagccaaagactagggtccttgttgtcatcaaacaagtggcagatacagcaagagcaccgcctgcaaaatgtgtcatctattgacaggacagctctacatgcagaatttttacatatccacgagtttgacaatccaaattcggaagattgttcaagagatggagggagtcgcactggattttctcccttcctgttttgctttctagaaggctgattgctaggactagaagaagcttttcttgaatccaccttcttattagtcttgctcgtcacctttgctatctccatggttttgttttttgtgtaactaagttctttttgtccttatcaaaacaagtccttaacagttccttcttgggaccagatctcaaaaattcttgaagtagctctggacttcttgaagcatcatcagaattaccattcttctcaggagtgctttgcacactggaagacaggctttgaacaccagaaactggagatggaaaacacaaaactgagctgagcatgtcttttcaagaactggactcaaaacgaagctattgaaaaattctccatcacttaaaattaaaaacaataaaagataaagagaaaatgaaaaccaatacaattttctatacaagcgtaataatataaatagcaaaaaccaacacagcatcaaaagtgtagtttgttaagcaggataaaacagcatcatgctctactaagtgattaaaactttaagaaattgattataaaaaccaaagagtgtaagagtgtaagagtgttctcactaaaatgtacagtacacgaaattgattataagtgtcacctactagaatgtacagtactcgaacaatttgttccttaagttctactgaaggttttcaaacacataagagtggaaaacacacacaaagacacaagcacaataggaaacataaaggtcatacctttagcaagcaatttatcttctaaatccattttacaaacgttagttacaaacaattccgcagtcctccctgtgacaacataatcacatttcagactggtaattatcataaacccaaaaaagtatagatgcaaaaaaaatttttagcacaagcatcatatcatatatgctttttttccttcagctgctaatactggtctagttgtccaaagattattaattggctattcatggaattattaatttctcgggtcaaaggaatgctgaaacctccatcatatctaccacaatcgagtaaaactctgattttttctcctacgtcctctcttagctaaaaagtattatataaaaccaattaactctgatgaacaaatcaagctctaaaaccccatcccctattctctattccttctactttctcaccacaatgcagttgatcaatttaacaaaatgacccgtaaaaagaaactcgtaattaaacagagaacaaaaccagagg

SEQ ID NO: 234332 - DNA, 1442 bp, Cannabis indica
tcttgggatattgtattgagatagaaagtgtgttgagctcgagtttgagtgagattgagatagtgattccaaaactggatgtggaccaagaaatcataatccactgtatgtgtttttcgattttcttactaagcttctttgattgaattcttctgtttcattagaattcatattacatgatcttgagcatagaaaccgagttttcctttattgacttttacagctcagaacatagagagctataaagattgttatttcttcaccttgccataatacaccatcaaaattccagttagtttgaagcttcgcggctaactgaacttgaaaggtactttaccgctctttcgggactcagctgccaactccacagaaatacattttcatttgcaccatcaggaagtgtatattggcatcgttgaaagtgggtgatgcaaacactcattttatggtttttgtttttgttttttccttccgactctgatatctaatacaccatcaaagtccaggtttgagtttggagccgttttgtggctaactgaacctgaaagttctgagaatttttcttgactcttggggcggttcaacaatgttcttgacgattgcaatggtgtcattcttctaaatttggaaaactcaaatgaccctcaggaaatgcttaccatgagaaagttacagtgataagcaaccagattaaattagactttagtcttagttgttaacctctgctagttcctgctggaacttggactggtgtagagcagtgggtgaagccgagtataggtatggtcaagatcaatgttgacggagctttgtttgtagcagaacgtgcctatggagctggtattgtggcccgtaatactgatggccatcttgtcgaagcttttgctttttatcggcatggtgaggtgcaaccatttgtggccgaagttatgagcttaaaggaagctttgagttgggttaagtcaaagcattggagcaatgtcattcgtgagacggatagtcttgtcacaatccaggcactttctagctcagttcaaatgccttctacttttggcttccttgtggaaggttgcaaacggttattgatttcttttgttaatgtttattgttcttttgtgtgtcgatatgcaaacagagttgctcatttttttgcttggagctcttgttcttcgttatgtcttcgttttactgttaataatgtcccgtcattgttacgggatatcgtaatggctgatttagttggttgaatgaaaattattttcttttcaaaaaaaaaattataagttgacgtgtattagttttagaggctgatgtggcaattattttagggcagtgcaaaatatataaggggagggagtctcttaaaaaggtgaggagaaaattagtaagagttgagattcattgcggagagctccaaccctctcgaacaaattggaatagga

SEQ ID NO: 234333 - DNA, 943 bp, Cannabis indica
cattactgtatttcacttgtagtcgatgttaatatccttcccaattagtttattttgtacgtaaaataaattaaacaatgattggtaagtattcacttttatacataagtgatcatattctgttatatattaattacttaaaataatttttaaccgtgacatcatagtttcattcctcagctttatgtatagatatagatagatactaccccttgccttgaatgatctaaagaaatcaaatcattgaaaaaaaatattaagtaaattacaacaatcatcacacattgagtaattaataagtgatgaaaaaataaacaaaaaaaaaaatatgaataaaaataataattacttctcatcaatacaaatcatataagatctcaattcttcgtgttttttagtatcaagagaattcaatatcctacaaactctaattgtatcactatttaagtaagtaaaaaacactccatcaaataaactttagaaaaattattacttgaattatgaaattaagatatatatatatatatataaatacatatttgaaacgaagtagtaatgttaaattaagatatttgagttttttaatttattttttaaaaaaacatgattcttagttttacaaaaaaaaaaaggattgattgttaaaaaaagacgcgatgatatttgatatttgtgtttaaagttaatttaaatttaaagttaaatgtatttgagtttttttaaatatcttaatttaaaagaaaaaaatcgtaattgatagtttaaaaaaaaatgattgatagtttaagaaaaaaaatggttgatagttaaagaaaaaacgtgattgtgtgatatttaatacttgaaatattacttgaactttttttttgtttttaatattacttgagttttttttcagattaatttagaatatcaatttctgaacaaaaggagaataggtgaa

SEQ ID NO: 234334 - DNA, 992 bp, Cannabis indica
tcgaggtggcgttggacataaaaataacaattggagccttatgcttatgcatactaccaatctatctatgctacttgcaatcatgcaccaaaaatgtatgcatatgactcgtttgctatgacacatgtgtaccaaaagtgtatcacatgacatgtgctatgagtgtaccaaaaatgtattcatatgacccatatgcacacatgtattcatatgaacattatcaatctcactctactaacacatcagaaacaacacaatatggctacaagtagtttcacgatcaatagaatattgcaaaaaaacttactggcatcagcagctccaatgttagacaagagaaatccatagacttcaagagcttttcttagttcagaatagttaggaaaccaatctattttgataggctgtaaatcaatcttgttagaagaattacaaataattagcattcctttaataaatgatacataataaaaattccccaattcacctcttttttcaatgaaagaatagcagaccagaaatcacatgcggatgttctcaaattctcttttgttgagtataatactgacgacagaaggtaagcgctttagaaaacataacagcactatcaaaaacaaaatgcacaatctaactcacccaaattatacgtccacacagctattgactcttctacatgaccaccatatgtgagcactaatttcgtaagccagccacccactagcaatccttcaataaaagagtctcctaaaagagcagaggaggaggcagggaaagaagcattagaactactaagaaatgagaatcaacaaaattatgtaaagtaaaataactaaccattctccaaagaaagttcaaccagagaattgagttcactattcatgaaagacttcaaaagaccacaatcttccactggacacggactaggtggcgatttctacaaattcacacagttcaacacaaggaattttcgtccagaatttagctgataccaa

SEQ ID NO: 234335 - DNA, 1087 bp, Cannabis indica
aagtcaccttttggccagctagcttgtgcctagatcctagacagccatacaagatcatcctagctagcctatagacttcccttggtcggccagacaagttggtacagctccttgacgactctcttaactcttttctcttgttgcttgacagttttgtcataccttgtaaggagactttgtcttactattggcaagactgtatctcacatgtactctgtttgcgattacgaggacatgccacgtcagtaggacaaaatttgggataatattttccccataaacccctgttcaaacatctggttggatagggactttctagctctcgtcttttttgtagtagtctttgttgagcagccttgtctaaccaagtgttgaccttttggatggcatgcttttagatctttgatctcctctctctatacatgtcccttcttctcttctttgtaccttccattgaaaagtttcaagctttttaagcttttggaaactttttaattatcatgttagattgtaattttttttggtatgttaatccacatgacagttttagaatgtataatgtgtgacttcctgattgaaaagattcaattatagccttcgttgtgattcttgactctttgagtcataaagaacacgaggcacatatttgagtttaaataaaaatacaaatttggattcaaaaataaccttagccggccttagagatcttgcttgagacctggccagtcctaggagttaatcatgggagttggctagttctatgatttcaccctataaaactacctggtttatacctagctttggtgaccttggccagttcttggctgagtcatgggaccctagctgatccttttaaggcttgggaaccctggccgacttgggccttgattcgaagcgggtggtcagctttgtgtcctcttttgacttcgataaaaatcttattatggccttctaggcatatacatccttagtctcatacgtggtgttataccgaaaatttcggctaccatctcgagtggggggacacggtcgttagggataaaaacgggaatatggatcgatgctatcgctttttatgcataactca

SEQ ID NO: 234336 - DNA, 1485 bp, Cannabis indica
ttttagaaatgaccattttgttgtttatgcttgtggggaagggtattttagtcatttacccttagatttggtggctgaattttagagtggtagatggccacaatgtgataaattattctaagtgtaatgttgatttttaggaaaaaaaattaaaaaaattaaagaaaaaggaaatttgagagaaagtcatcttctctctttctcttgttcgaaccctaaggaccagcagcctttggagcatttttcttgctacaaatcattgtgttagatcaagtgttagtgatctaaaccaaggtaaagttcttagccctatctcctttgttttcttaagcttcaagtgttagtgatccaaacgaaggtaaagttcttagagctaatctcctttgttattgatctcaaactttgctctcacatggtgatttttattctgtgcatgttgagatgttttgttccttgtttatgttctttagaatatatagaacaggtctggaagctttggtttgatttgagtgagatatgaaattttgaagtttcatgcactgaactggtcgaacgattcagtgggacctgcaggaaccggaattccagttggtcccaaggaaaccccacaaaactggaattccagttggggaaccggtctaccagttggggcagttttaggaaccctagtttttcccctttttgcaatatttagggtactgccatgttaattatcgatagggaaacttttagtttcaagtttaagtccccggaaagtgatttagcgcgtcactcatcagttttatgagtaatgtgatttaagggcctttaatttgtcgagcagatgttccactcaggttggccagcacacttgaattcggtaacgaggtaagattagtataatggtatgcatatgtatgtacatgtttagtgtgcatgttagttaagcctgttagattacatcagatatgtatgttggcttttgtactattcgacagtatcacatcagtatgcttagagtgtgactagcgtaccgagtataggctgatattatggtcgataatattgtactacttgacagtatcagattagtacgactagagtatgactagcgtaccgagtataggctgatattatggttagtattactgttgtacgaacgttctagactcagcaccctgttggacacggggatagggttataattgggggtatgggcgtctgatcataattcggcttatagctatgctattgtttatgcttttcttactaagtctattgacacacagttgctatttccatgtataggtaagggcaaggctaaggctgagcagccgtgagagcgagtatgtacatgttggggtcggttaggtctggattgtatgatctttgggacatcaatgctattgttgtataatcgcttggcgacagacttttgtatatgtacagttaaactttgtaaatattttgtaaacgggatcccgggatttaatatgtatgttactt

SEQ ID NO: 234337 - DNA, 1534 bp, Cannabis indica
tatgggattggataataagtttataaaaatatggcatatcaaataccataaaaaaacttaaatgtgaaaaaaatgccatagaaaagtggcaaacctaaaaatgccatatttttctaactttgttatgaaatcccatatttcatgtaattttcacatttttaaagggattattacactacatacttaaatttttaatttttttacttttatattatggagcaaaatttttttcaaaaatattgtgtaaattttatactgtgtacagtgttaagttttcactgctgttctacagttattttttagttgttccactgttgtttttagttattctattttgtgttctactattattttataaaaacacagtattttaaaaaaaaaattgtgtgacagtatttttgtaaaaattaacctaaattccagtatttttgtaagttttccttttctaaataaatatgttatatgtctctatattattcaaaaatataatattttattttatattttttctacattatttttggcacatttatttttaaaaacactctaatggtatactacaatttaaaaatgttataattataatgtgacacattattatatatagatataatttttttttattaaactattatagatattgcacctttaattttttattgtaaaaaaaaatatagcatcactatcattgtatatatcaatgaaaattttaagaatagcattcttttattttccaatagtataacatctttatattttgttcacctaaactttctacctcatcaagtattccccaaaatatattatatatatatatataccattggagatgctctaacaaaataaaactaaagtactcacaaaaactacaagtaactccagttggtggagcattctctctaacgctatgtctatctgcttaattctggctaaaaaattgcatattgaggaagttttctgttctatctgtggagagggagagaaaacaattgtacacattttttttttatattgtaactttgcctttcacttttggagatatttttcgtgggttgtttttccagctttagaatttggagcccgtgtgtgggattgagttaaattcttgtgagatctaaagactagaggtgtggatgtacaagggtttgttcttttatgcttcaattgtatagtagatacgatatgaaaagctcataacgacaaggtacacaatcatttgatgtgtaatattaaataatatattgactctatctatatgtgttacgcagattatggttcttgtttattttcttctccaatgacaactgagtctcttatttggtcccctcctctaaaagactaggtcaaaatcaattgtgatgttaaagttggttgcgattcgatgtgcatggtggctttgactagggatcacatggagacagttttgtgggtggctaccgaagtgctcaacttctctgaccctctaattggagaagttgtggcatgtctgttagctttggaatcagtagtttgaagaagcttaattttgtgttga

SEQ ID NO: 234338 - DNA, 492 bp, Cannabis indica
atatgaacaaatttaataaattaaatacatttatatttaaatttaataaatcaaatttaatatgctttaatatatatttagttttaatattatttttaatatactatcctgcatttataaatttaataaatcaaatacatatatgtgtttaaaaaatacatatatgttattatttttaagtgcaactcttatcaggtaaaatacatatatattgtaattaaataaaatcatgaaaaaaaaattatacactgatattaagattaagagattgtcttttccaaattactgcctgttgacctaggttttcggcaaccgatttaataatatataagaaagttgtaggaagtttaatgcatgagatttttacgtagttggggcatgaatgagccttagtccacgagtcttttgtatttatgagagtatttattacagataatgttcttggtagtttttctctctttggtttttttgaaatccagaattctcgacccc

SEQ ID NO: 234339 - DNA, 1245 bp, Cannabis indica
aagaattcgattgggctttgagggagcctactgtgtagaggtccaaggtcataaaggcgggcttgctcttttgtggagattcaatgacggggtccgtcttctcggtttctctcacaatcacatagatattgaaattgctatgcccaactcccctgtttggcgtttaactggactatacggggagccaaaccgtagtctgcgattcaagacctggcaactcatcaccactctctccaccgaatctctgttaccttggtgtatcataggagacattaacaacattggaagccaaggtgagaaaaaaggagggcgtccgtacccttctcacttgatcgaaggcttccaggaggttctttgtaattgcaacctcactgatatggatctccacggccacccttacacctgggaacgaggcaaaggcaccagtaattgggtcgaaattcgtctagacaaggctcttgtttcttctctttggctcgactcctttccttctgcaattctcacaaatggcgacttctcctcatcggaccacacaccactcttccttgatatttctccagctgctcctactgttttggttcaccattttcgcttcgagaatgcgtggactagagaacctctttgcgctcaaatcgtccaggcctgctgggacaacaatgcacaactgccccttcttgaaaagatttccatctgcagcaaacaattagaagattgggggaggagtttaacttgcaatttcaaaaagcgtctcaaacaaagcaaagccatcctcacttctcttaaaggtaattccgatccttcttcaattgctactttcggttctgagcaaaataactactttgagattcttgctcaacaagagctttattggaagcaaaggtccaagcaattttggcttcatagtggggacaaaaattcaaaattttttcatgctatggctagcaaccgcaagcgcagcaacaatattcagtctcttcaaaataactctggtgtttggactacttgggacagcgggttaaaagaggtaattgttgattattttacctctattttttctgctgggaatgcaaattgggatactgttgtgaatggtatttcttgttcggtctctactgatcaaaatactgagttgttaaaagcggtttctagtgatgaggttcggacggccctatttcaaatgcatcccgataaagcaccgggacctgacggaatggggccaggtttttttcaaaaacattggcatat

SEQ ID NO: 234340 - DNA, 853 bp, Cannabis indica
ttgtcatttaacaaaatagaaggtcaaattagtaatttttgtaaaacacaaagtctaaaatagtatttaccctattatttattttacgactaaaatattttacttgctagaataattgagtgtcttatgataaaatatttttttatctaatttatgtaatttatgaatattaatagtagtactttagtaatattatcttctttcttaaatggtatataggaataccttaccacaaatttctcttaaactatttttattgcgtacttttatgtatgtggaaagagttaaagtagtgaaatttatgaattagaggcaactctttatttatttttttattctttattccatatcacatttttttcttcctttctttatttagtaattacaaatattttctcatgtttgttctttgcttttgtgtaattatttatatataataaaagagtaaatatgtacaaaaataatatattaattcaaaataaattaacaatttcataatataaacacttatttttattttaaaataattattgattttttaagatatttataattaatttttagtaattatatactgtgcatattaaaaaataatatatattctattttacaatttttttaataattatataaattagtataatcacaaatataaaaaatataatataactgaaaatatatatacaaataagaaagtaattattttttattattatttttgtagttaattatttaattactttaatttattaatttatattttgaatttttttttattagtatcatagattctagcttgatgcttgaaactatcttatatagtttctcattcttttttttttttttctaatag

SEQ ID NO: 234341 - DNA, 1231 bp, Cannabis indica
aaaaagattaaaattagtcattttgatcttacattaatttgttaaaatattttgtcgcatttaactacttgtcttttcttactgactttttttttatccaatcatattttaaaatattttaacgaaattgagtctaaaatgttatctttacttttctaattttttaaatagaaatccaaacaaacaatggcacaaaacatagataaactcttatcttaaatttgttaagtaattaatctttttttttcttgttcattgtgttgttttacagtcaggatgttgtaaacccccaacagtttgtggctacaactatgttaaccctacactttggataaacccagttaaccaagtgggtgatcctgattgcttcttgtggagcaatgaccaaacccaactttgctacaattgtaactcttgcaaagctggccttttgggtaacctaagacaagaatggaggaaagccaatgtgattctcatagtggcagttgtggttttgatttgggtctacctaattgcctgcagtgccttcaagaatgcccaaacagaggacctcttccgccgttacaagcagggttgggtctgatcttgttcccaaacaaacagaccccacattttctcatcatatgctcctattatggaaatgtgtccctgtcaaagtaatgtacatattccactgttttctactcttttttctttttaatctgtttaattgcaatgtgtggtggtaagttgagttgttcttatactgatttattgagtcagtctcttgctagaaggagcatagcatctttaagttatcatcagcttttaactggtattggattcttcttttcagtcaccactttgtcttctttcacataaatattttttattttatttatttttttgtccttatatattatttgcagccattgtcacgcgctcataagaaaattctaaacaaaaggattgattttaattccttttttcccccaaataattggcttcaattgattggtcttgtataattatttaattttcttaacattttctttcgtagttgttgtagatgtatatatatattatttatgccgaccatttataatccaccgactaacttagtaaccttttgttttttttttgtttttgtttgtttgtttttttgataaaaacttagtaacctttatgtgtgggagaaacaacttctttccaatatcaagattttgtattgaaaaaggatcactgtttaatg

SEQ ID NO: 234342 - DNA, 826 bp, Cannabis indica
tgtatggtatatggtttttgttgacctcgaaaagtgatcaacctacagcagggtcgtatggatctaacgcttgccacgtgttacataattagaataagaaattagagaacacacaaaattattataagaggttcgtccctttttgatagtctctactcccattttagttgtattaatagcgatggttaatactattcagatcactatgtgtgaaatctgatataacacccttaaaggatacaaagtaggaattgagattgacaaatctcaagtgtagagatagtttgtatgggcgtgtgagagagagtgaagagagttatcagacttaggcttagagcttggaggctagtattagactttagtgactttcagacgtgaactggacttgggttttctatgttagagttaaggcatttatataggaagcctaaactctaatttacaacttgaaaccctagatatttgtatatttaattagttaattacaaaagaccaaaatacctatgaacatatatattattcaactattctattaggcttttagggcccgcagcccaatcatgttgtccacgtgtagaattacacaggaaatcctgcaggccttctcctggccggccagacacctacagggagtatgttggccgggcatggtgctgtctagaggctggccgaccatagatccgaccaagggtggcgactagcttttgtgaggaagctggacctgtttgagtgttggggtccccgttttcttaggtactgacttggccttcttgttagtgagttgtactgccacgtggtactgattttgtccacgtaagcactgcca

SEQ ID NO: 234343 - DNA, 1523 bp, Cannabis indica
ctttctctacgtagaagtcacttctcaaagccaccaattgcaaatgatgagaatggtgatatttattgatcagggatatggatcctaaagtcagtggttgcatcaatttaagttgttaagtcagttacgacttcacaaagtcctcgtaatagtacctccacgtcaacttaggaaagagcttttccagatgagaggcacgcttcctagacgaacttcccaggcagacgaagcgtgtcccttgtagtacattctgaataggtacaaggccatctggagcagaatatccagactatccttccaggatggaacgactagcctttcagaactcctttctaaagaagtctagctttctaaaagactccattcggagtggacacgctagacttatagaacttcttttcaggcgacatctagctttccatgagaaaatttttagagtggacaagctagacttccaaaactcctttccgaacgacatctagctttccacgactctttccggagaccttttcatttggagaaactattccacggattccacctagttcctttaaattaaaagtgatggcaatgaagaaagaatgcatccataatggtcggtgttccaagtatctcagtatgttaatttttgagattgatcaagtccaagcaatgcttgaacttgttgactgttaagaccttagtcctaacatcagcatgattattttttgacctaacattttctaattcaactagcccttcttttatcttctctctaatccaatatagttttatatctatgtgtttgctcttttaatgataaactgggttcttacaaagatggatggatgactggctatcagagtacacaatcactccttttagttgtttcgattcgtataaaattcctcaaagccataaattttccttaaaagtttctgtggtagccataaattctgtttccgtggtggaaagagaaaccacggactataactagactttctagcatatacagttttgatttgtcatgagcatgtaggatatggttgatcttctagtatctctattagaagcataatcaatatccacaaaccctttcaattccagtttgtcttttgcgttctcataggccagaccataatcccatgtgtccttcaagtatcttaataaccattgaggaccttccaatgttcaatgcctagattagacatgaactgacttaggatgtttagagcatgagctataactagtctagtgctcaccattatatatattaggtatcctaaaaccactacatagggtacatccttaatctctttcaactattcagcattggttggacactattcttttgacaggacaaactgtcctcccaagggtacgtatgtactctttgcatcttccatgttgaacttctaaataactttcttgatgtatctagattgctttaagctcagtgttccttctttcttgtttcttgaaacatcaataccaacgatctttcaccttgagaatctatttgcactccacaatcttcttgttct

SEQ ID NO: 234344 - DNA, 683 bp, Cannabis indica
atgataatactaaaaacttgactaaaataaaacattaaaagtggacatcataatgacagtaaaaatgtgtttcaggggatccctgctataaaaattttacaaaaaaactatatatgatgacacttcaaaaatataaaaccaaaatagatgatagatacagaccaaaacaattattggcaactcagcacgcaggctggtaaggttaatatgtgcattgctagaggagacgatcttctcatggctgctctaacttttctttgtccttacctgtgcacaaagcactcgtgagtcacacagactcatcaagaaaagtaataaagatgggtacattaaataactaattatacagttcagtatcataaaataattaaaccataacatgcaacagtagataatataacccgccatatgcatataaatagatatgctcatatatttgcattgccaaattaggcaagccgtgtcataatacaatatcatatataatatcattgcaccacctaatcaggtgagcccgtatcacaacctgacaccaatatattgcatcgcctaattggacaagcccgtaccatagcctggtactcacatgtcactcccgcccgtacctaattaggtacgctgctaggaggaaacccaacaatggttttgatctatgccataacttggcattcatatgtcactgc

SEQ ID NO: 234345 - DNA, 1035 bp, Cannabis indica
tattattagggtcaaaaattgaaatttcccttcttaaaagtaaaaaaagactattacacattaagccgcaatttttctaaactttatgaaaagacaattgttattaagtgtcctcctataatttgattagtaattttttataccctttagcattaaaaaattctttttatacattcaaacaatactaaaaatgtactaaaatcaacttataattattcataatttttttttttttttaaaaaaaaacatataattattcatatttccaaataaataaacaataaagttacaactttaatttatattattttttcttatttgctaattatatataatagtataagcacaggggtagtcgcatcttttgatacgtttttgctgtctctctggtttttgagagtttgttttgagtgctttgtgtttgtttggtctgtttgtttgtttgttttcttctggtgatttagtccaatgatggcatcaagtagcagtgaggggagagtcttagaggcagagaaagaagccatccctttggatgaggaagagacggcagtgttacgactcccaggcagcagtactgaagaagtggcgattgacaccagatggtgtctggtgggaaagcttttaacaggcagagtttctgatttcaacgtgttccaaaacatgatggctttcctttggcagccggggatgggaatgtatgttaaggaactcaacccgaacttgtttctttttcaattccaccatgagattgatattcaaagggtaatcgatgggagcccgtggacttacgatcgaaagccttttatctttacgaggttgaaggaaggtgataacccaaggcttgttgaaattaacaatcttgatatgtgggttcaaatacacaatttacaaacgggtaatatgacacttagtgttgtgatggctcttggaaattacatcggtactttcatcgaatcggatcctaataattttgtgggagtgtggcgggattaccttcgtgtaagagtccgactaaatgttgacaagcctattaaa

SEQ ID NO: 234346 - DNA, 908 bp, Cannabis indica
ggactcatttcccgaggctatctcagacagtacgtaagaaaaaaggggaatgaaacaaaactagcccaagaaccaaaatcaaaaccaaggtctacaaccttccccaattgagggtgaggacatcgttgttatttttggaggggcgcatcttgcgggaaccagcaatagtgcaaaaaaaggtatataaatcaagttaaaaatccagaatctacttttgcaccagagccccttaagtgtacgatgtctgaggaaccaccaataatcttcacaaatgtggatgcaacgtatgtacagttcccacactcaaatcccttggttatcacagtctagctcgcgaacaaaagaataaaaagagttctcattgacaatgggagttttgttaatattatttacacggaaacactgaggaagatgggcctagaagatgccaaattaagaccatgtatggtgaatttatgtggcttcaggagggatagtgttgtgagccttggcaccattgaactaaaacttactatgggagaacccccattgtcagcgacccaaatgcaagagttcctagtcctcgatatctctttggtatacaatatactaatgggtcgccctgcacttacagggttaggggcagtcaactagataaagcacctatccttgaaattctcaactcactttggagtcgggagagtgaaaggtgaccagctgacagccagatagtgctatggtgtggaattaaatacacgaagggaaaattttttgggttttatgccctaaataaaactcatttcaatataatcagatttacttattaatatatatcagaaataacatttaatgttgcatggttaacatgtatttatttcatgattatatgtacataatgtatgaattcatctgaaaccattttcacatac

SEQ ID NO: 234347 - DNA, 1482 bp, Cannabis indica
tgcaacagaatatttgaaccatatttttcgacatgttaaatttttttgaatctcacaaaattttgcaagatgtcttaaataattataacgtataagacaaccatgaaacagattggactaaaaaaattctcctacaagctgaaacagaaaggggtgcatcagtggaactgctctgaaaatatgtttgaatttgtgtcaaaccaattgttaatttttgtttatcgatatattcggttgctaccatgactttatcgaaccctattgtgtcacttttatatgacaacaagctttttggagctaacagttagttttatggtactaaatcaagtacgcaatagaataattgaaactgattatcattgtactatatgtccaagatcaccatatgtatatatattaaacatgaaaataaatagatgaaaataatatttacctctctaagtctattagggtattctcaagtcttttcgtatgttgtatccttgaaatggtgacgtcaaactcacactttaatctttcagatttttcaccacacacaagaactagtgtgggctagtatgataaaagtgtatgtcaagttcttgtactctcaacacataagcaagaacaatcttgttgtagtgatggagagaaaaaggttagcatattaatctttttaggtttttagaaaagttacgtacaaattctttttttttaatttagtttatacggtatattaaataaatctaatagtcttttttaattaattatttaagttcaaatctttttattaaatcattaaattatttgaataaataatataactgaattttgttatagatatttatattctataacagattgtgagtaatctatcaactgagaatatctcaactacttttcaaattcaaattcaaataactttttatcttttgaattaattaattaattaattaacccaaaaacaagtccagtgggaacaccctatataggtggcgcctacattgtgtttgaacacagtgtagggggcgcctccctctgtcttaattaagataatggacgtgtcttttgtcttgacaacttttgtctttttccaatttattcaattaattaatttaaaaataaattatttattacaaaataaataattactattttgacaattcaaaatagattttttcaaacttttatatacaacttttatccttctccttgatcaaggtggcgatccaaggactatggacctataactctaagttccaataaactacattatttattgaatctcatcaactaaataattatatttattaattctatgattactccactataaatatgaaattgaattcttagtaattatagaattatatttactgagttttactgcaatataatcaattctagtgattggccctcattatgtcggttcgtaattagttttggtcaattttaccattctaattacttcattatcctttaattctgttaattcattagtga

SEQ ID NO: 234348 - DNA, 1780 bp, Cannabis indica
agatcaatttttcacatattttttatacacagacatggcttgttcagttggatatatccacctgatgtgcgctagtcccccaagtgtcgcttttttaggtaaatgcatgaccaagtgaaccattatgtcagaatatgttggtggaaaaatgattttcgatttgcaaagaatgtccaaaatacttttttgcatgattggcaagtcttgaacattcaatgttttagagcaaaatttttggaaaaaatacacgcagttcaattattgtatcctagacttcttatttgaaaaactttctaatgccccccggcatcaagcgttgtaacaatacatgggaatcatgagacttcacgctagaaatattatcttcaatctcattcacattcttctctaaatttgaagagaatctgtctgggaactacacagacctaataaattcgaaaaattcacactgctcaggaagactaagcgtgtaactaggaggcagtttcctccaattcccgttgcggtcttcaaacaaccataattcacgacgtattttaaggtcctccaaatctaatattgttttgtcgatatccttagacttgcccacgatacttaaaagagttccaagtacactgtcacacatatttttctcgatatgcataacgttgagattatgtctgagaggcaggtccgtccaatactctagttcaaaaatatactcttctttgaccaatttaactcatctacacaacatttacgtttgactccaacaaatttcttgtgttttccaggaaaacaatattgtatctgctccaactgagctaaaacatcgtcccctgacaattctagaggaggtagtcttttctcaatttttctaatgtattttttacttctctgccttggatcgtccattttaagaaatcttctgtgccgaacataacaaatcttgttgcgtaatccaatggaaggggtgtgtttgttacacgtgggacacgccttttaccctttggtgctccgaccaaacataattgcatatgtcgggaagtcattaatggtccataaaagagtatcaggcaatgaaaaacatagtcatgttgtaaggatctcgaacttggacacctaactcctacaactctatcaattcatcaatcaatggtctcttgaaaaacatacatgtcttttccaggggcagggcgccctggaatcaacagagacaacatcaacgagtcagctttcatgcacttccaagggagtaagttgtacgagactaagataacaagccacatactttaagagttactcatgttaccaaacaaacccaacctcacatttctgggttcaagtgtgatggatggatggcgtctgtcaaactgcttccactctttagcatcagtaaggtgcctaagcacgccatcctctttgggtctcttagagtagtatcattacatgtcctcagccaagtgtcttgaactgtataacctcttcagtctcagaattaagggaatgtatcgcaaaactttttgagcaactttcttttggtctccctttttctttttccaatgactctagccacaaataggaccaaaataatttatctcattgtcttcccaaaacaaggcacattgatacttgttcataacctaaaccaatgttatgcaacttcatcttcgactcgtaatgggatttgggtaattttgtaccctccagaaataactgaatcaatgtggagagtaacatatcaaaagaatgattactccacttattgagaacttcgcagtgcatcagcttcaccaatgca

SEQ ID NO: 234349 - DNA, 897 bp, Cannabis indica
ttaaatacatatttttgttctaaatgtattttgtcaaaaaaaaaaattatgttttactttttatttacttaacttttttttttgtgacaatacttttttaactttatttctgattgtaaatttaagacgcctactaaaattccacaattaaaagtcagttaaatttccattgtggacacttctgtatgcgaaatatattttcattaacttggagattttagcgccacgtgtatacataagtacacagtgacaattccaattaacatttaaatattgaatttaacttgttcttcaaatttgtaagcagagaagttaagggagtgttgctacaaaaaaaaaatataacaaatgtgtataaaaactaaaacataaaagagtattggtcggtgattattctaataaaaaatttaaatgtttccataagttattttgaattcagatagagaatacaatgattttttttttaaaaaaaaaaatctaaatgtatttttcatttcagtgaaagtttgaattatggtaaaaattgaagaaaaaaattctttttaatgagggactttaatttatcacataacacaaataattttttttaggaaaaactacttctcacatgtatgcttttattatataatgcaacttgatcaattccaacaacaatattattaattataacatttcacaccatatattgtttcgttttccctcaaatagtcaaattaatcttcttcctccttccttaataatttaataatttaattaattgttaattttcttatctcttaatctgtccatacttataattaatatcaggtaactgttgttttaactttctttttttttttaaaaaaaaagaaaattaaattaagtgtatgatttataaatgttattacactaaaaagc

SEQ ID NO: 234350 - DNA, 1594 bp, Cannabis indica
cataattaagttagactcggtaaccagaactgagatgaaccgttttaagaccttattgtacatagacgtgtgagcgtaatacgtaggtctatgccacatagacgtaattaggcgtgtgagcgtaacacgcaggtctgtttcatacaaacaaaaggtgaaatggcattaatacttctgtgatatgttaagtatgttattgatatttatactgtcttgctgggcttggctcacgtgtgctctactgtgcaagaaaggataaatttgtctctgatcagccatgagtggagaagctgggcgatgtatgtacatgttcgggccacactagaccaagcaggttggggtctaccggtgatgaattttgtaattttattttaccgcttacgtcggctattggaaatagacttgaaatattttgtaaatcgtttttttgggatcccaagacatgtaacttttgtttgttgttaagttaaaattattacaagtttattttcattccgatttcaattaaagtttaatttcccgcgcttagtgtattagtaatcctgtctagcggattagggtttcttaattatcttgggtagcgtgcctaataagttagggtgttacaattcagtatcagagcgccaagatttttaaacttcctgtagactggtcgaacatgtacactcatcatcagagacaagctcgactcatggtgcagtaagtgttgagagtaaatactttactgcttatgtgatcatttatttactgctttccattttaggcagtatgcaagcatctagagtatttatgtgatatatgatgccatgcttagaatgctatatgttaagtgtttatttatttgaagtaaatagtcaagttagggtttaaggtaataagtgcgtaagtgtggtattggtgcttgacgggtttaaggtaataagtgcgtaagtgtggtattggtgcttgactcgcgcggggttgctgattattgggctgtttgtaaagtggaccctctataatcatctagaccacagggtgagctagtagagccttgtatagaccaaaccaatccacctgcacccccgcgcctccgctaagttcgagggacaatgcgggggttggctacactaatccgcctgctgattggcagcagatgtttaaagaaatgcaaggtgtcatacttcttcaagaggaagaattgtgtcggttaaggtaactggtactagataccactgttgagcaagtgttaccaccagcacctgtgatagtggtggataactagggtttatgatgtcacatagagattccgtgtttgaacggtttgtgaagctactgttggaaatattttaccatgatctagatttactaccaagtatatttcattaacatcctaatatgaattctaaaataatgaaataaacacataaaaagtttagtaaaccttacattgggtgcagcggaatataatgactccttccgttcagatctctagcccttgattcctttctgtagcaaagcataatcaagatcagaacctgcatctctttctctccttcttttgatgctgattctccttcttgattgtttggattcttcacagtcttacacacta

SEQ ID NO: 234351 - DNA, 951 bp, Cannabis indica
aaactaatcttatttcatttaatacaatccaaattaaacaacgagtagaaattattcaattcaaacttcaacacacttcaaaacagatctaaaaacacaaaccctaaattgaatccaaacatacagctctaaatccttaaagaaaatcaacttttctttctgaaaacctaagtaattcaagaataaagcttaaagatcttaccttaatgtataaacaagcttctagcccctccaatctgatccaagagctgaagaataagcaagagaaatccttggtttgtagctccttagggttttggctaagaagtagaagaaaagtgaaggttatgtgacttacctatttttgttttacacctaatagtttaataaataaattaaaacaattaaatttatttccaataatccatttcagcctaattaacactaaagacaaaacttttatcaccactcaaatgaccataatacccctcccaatacctttaacttaaaataaaagcctaggggcattttagtaattctagctaattcgtcaaaccgacaactcaaaactctaaactagtcgggtataaaatctaattcaattcatcttttattgttgtgacatttctgatctccccgccaagttatagagttgtcaggcctgaaaaatattttattcaaaattatggtgtctacgatacccacatattctaaatataatcatcgtaataaattattcttatctccctaatcaacccaaaatcaaactaataattagtttaagtaggattataatcatactcttaatacccacttaatacacatatttaataaaatatatctaatttaaatatcaatatattttttgggatattacagaagtctcccgcccactttcataaatttaaagctcactacatcccaatccccaaccactactgcagagaggtacaagatgagtaaaatacctta

SEQ ID NO: 234352 - DNA, 1038 bp, Cannabis indica
aagaagaagaaaaagaagagaaagaaggaaaagaagaaaacacgaggaattgaaagaggaagataaggacaaaaagattatacctacaacataatcaagctaggatttttttctcaatcctttctttcttctctattttgtattttcttattttgtatggctattctagtactcattgatatttttttctctattttggatacttgttattaagctagatataagctaatctctttgagacttgaatgactaataatcctatgttttggtatgttaacttttattgtatcattttagtgtaaattaccattgttcattcaagtgagttttatgattattaattgttattgtttggccagaaatggcaattatttgagccaaatcaggttttggaaggattagatctagtagtttgtacttgaatgatggaagagaatacccatttctaggttgttcttagtgagtagaatatgaatatttactaccttgcataacttgggaatttatgcttggattgtgttcttagatcttcttttaacagaggaatatgttaaattagatgatagaacttatttcatgagttttgaaaaaatctcatgagcttgtaagtaattctagttaactctgtgtattttgctgaattgtgaatgttacacatcctggacaattttagacataggagaatttagctatccaagttttttttccattgataatttttcttgcgattaattttcctatgtttgtggcaatattttagtcctacttccatttctatcattttattttagtttcattattcaatcaaattacttttctttaaactttaagttgttaaatagttggttttacaataaattttacttacaatccttgtggagacgatcttacttatcattatattacttttgtgactgtgtatacttgcgtatatcaattttcacgataagtttttagtgttgttgccaagggttgagataaaaattgtttattatcaactatttcactatttttgtgttttgagattctaaacttgtt

SEQ ID NO: 234353 - DNA, 1073 bp, Cannabis indica
aacactaattatttgaattatacagattctctcttacacattaaaataattataataggtcttataatgataaaacattgaacatggttatttcaagtaatgtcgtagccgttcaaagtgttcatgagtacacactacggaacaaattataatgatcaataaactctagctaattacaataattaaaatttattaattatagtgtgtgtatagaaaaaaaaaaaaaactacgatcgagcagcttctaataattctattaaagaacttaaaaaaatgaaaatgaaagaagaaaagtggggttacatgcatgaacaatttgccatgattagtgaaatcggagacaaaaattccataggtaacatggactcgtgtgtgaggtgggcccagtaaaaagggccgaaatccgatttggcggcccacacccacgtgggatgttcttgagcctctgacccagacacttcaatgcttgtttcagatgaaaagacgtatatatccccgaccacatctctactctcccactctcgcatggacaagtagatttagagcatcttggttacaaattgctaatcaaaatcaacatcttcactaagctgttaaacatgtcatgtctcaaacatcatggtatatattattttaatttattaaataatatataaaattattaaccaattataatgacatgtcaatatggcattagggacttaaggtgccaaataaccatttaccctatcttattgcaaaaataagcgtgtcgccttgcgccaaaatatataagagcatttcgtattttctttaagggtgttcaaaagttgaggtttttttatttttatattttaaaataggtgttttatattttttggtactagaattccacatgatgactcttatagcaactaacagagcaacgtaaattgcaattaaaatccgtatagcaattcacatagaaatcaccggagaaactaccagagaaactcaaaccataaatttgaaaaaaaaaaaaaactaagtaggtaaagtactatttggtacctgtgtttgtaaaagttatagattgaccgtctatttgttaatag

SEQ ID NO: 234354 - DNA, 1051 bp, Cannabis indica
ttgaataaacaggttgatgttttaaatttttgtaatctgaataaagttggtgttggggcatttttggagactaaattgaaggggaacaaaataaaagacatgatggagaagaggtttcaaaactgggactcctattccagctcagttactgaagacattctagttatgtggaggagtacatttgctcgtgttattataaccaaggagacaaatcaacttgttcactgttatgtcaaagtggcaggttttcctactgctattagtatcacatttgtatatggtctgaatacaataatagaaaggaaaataatgtggaatgatcttgctggtctgactttaccggctaagtcgtggcttatgcttggtgatttcaattctgtctttcatgttaatgatagacaaggtgggaacccgatttctcctagggagcttttagactccaataactaattatctcttcagttaatggatgctttgaaaagttcaagttcagcttatacctggaccaataaacaggaaggagggaagcgaatttattcgaagatagatcatgtgtttgctaatgaagattgggttgatatttttcctaactcggctgctctgttcaaacgggataccctgtctgatcattgttcgtgtttggtgtctaatggaaaacttgaaaacattggttacaaagcatttcggtactacaacttttggtctgagcatactgagttcaagaatgttgtcatggacaattggaggaagccttgtgcgagcatgaagttacatagtattttactaaaatgatgaggctaaaacacaatctaaatagattcaataaagagactgttggtgatattcgaaagtcttattctttggcaaaggagacataccatgaggctttattcgatgatcaagccaatcatgggaatttttcttttcaagaagctgagaaaaaggcagctgaggcatttgaaactcaaggtaaaatgtatcatagcttccttagacatcgtagtaaaatcacttggctaaggaattgcgatgataataatgcctattttca

SEQ ID NO: 234355 - DNA, 807 bp, Cannabis indica
tgaaatctacataaaaatctaataaattttggcttttattttgccaaaaaacgaatttttgatcaaaatatgcatgaaaatcagacaccatgcaaactcccctgtttcaccatgcacacggggctgcatggtccaaaaaactcgtagaaaacagaggaaaagtaggggacattgcatggtcacatgtgcgcgagcgtctgaggagcatccgccgagaaaactcggctcctggacacccttccgcgtgcggaatgataggctgaccaagggatctctccaatgactgactccttcttttgcgattttcaaaaattcatctccttcattttttatccaaaattgcttaatttttcacaaggaatccaaataaaatattttcagaatgaaaataaaattacttttatggaaaaatttcgtaatacacattcaatcatcaaataacacataaaccaacatgaatacatccaaatcaacacacaaataatattcatcgatttaaatccatatttcatgaaattaaatcataaccatggctttgaggtcagttgttgggaatattttaccatgatctgtatttactaaacaaatatgttgattaacatcctaaatatgaattctctaaaacaatgaaataaacacataagggttaagaaaaccttatattgattgtagcggaatataatgactccttccgttcaagatctctagcccttaattcctttatgtagcagagcattatcaagatctgaacttggatctctttctctccttcgagtttgattaccaccgtcttactcactatgattg

SEQ ID NO: 234356 - DNA, 976 bp, Cannabis indica
ttagttgttatcgttcatgtatataatgtacaagagttcatattaatgaatacacattttatctctttcatgttttttttttcttctctttctttctttctttccttttctgttacttttctctgtttttagttcttcatccatccttcaataataatgtcaggaaaattcaactctcttaatacaatggaaacaaaatttgaaattaatatatgattttacaaaaaaataaagtaattcttttttattatcaaataactattatataataatttgattgaatattaaaataaggatagttaagaaatattaaaatcttaaatgcactcagagtactaaattaagtaattttagcaaaaagagaggatactaattgatcattaacaaaacatggttgacgaaatatgcattataagttaaaattattagattagacatgcttgtaatactaattaacttactttgtaatactaattatattataattaacttactttgtaatactaattactaactgtactatatataaaacaaaagagaatttaaatgcaattataatatttgtagcttgtagggatgcacacgaatggagaatttgtaggaagtgttctgtcattttcatctctgttaagattttaattatttttcattttatccttcgcttattcttcattgggcgaggacgggacaggaaatccccttataaggtggggattgagtgaaaaatcccttagaaaaataaaattaaaaatttaaatgtataaaattattaaattacctaaattatttattatttaatatatatgctaattattatacaaaaacacaacttaaaaattataaaaattacactaatatatttaaaaaaatacaaacatatattataaaatataaatattaatagaagataattaataaattaaacgaatctcgttgggaggaaagtgtcatttccgtctctgccccgtttaatatt

SEQ ID NO: 234357 - DNA, 850 bp, Cannabis indica
agcatattgagatgaaataccatctactaagacttatagtagagagagatgatttgacaatcttagagatcgcatggcagatcctttcacaaagacgttactagaaaaatcttttatgggtcacaactaagggagatgcccaattttcttttagggcaagtgggggattgttggagttttttatccctattttttctcacctgacgtggcatgtctacgtggccaacattggtgccacgttgtagtacaactcaccaagaagaaggccaagctatctactttatacaaaaataaccctagctgcctccaacccctttgtcgcaatctccttcttcttcccaattttgtcatatcatcaactccaccatgttcatcctcagctgcatctataggaaatacttccttaggagaaatcaaaatctacacacaaagaaaacaatataatcaaattactaattactacaaagtcaaaattgaaaaaatagaaaaagcaaaggaagatcaaatatcaaccttcttcccaaaaactgtaacaacatgaacttattgtccaccataattgacgtcatcagccgcaacccaagctaaagtcttgtcctcgacctgaaccttcgagcctttttgtaaactcatcgcaggttcctataaaaaaatattaacgaaatcgaaaccctagataacagtaatggaatcaaagaacaaagaatgaaaacccctagtgagagagaggagttacgagcatgagagtgattcgaaacgaaacgagtcgagtcgagtcaaggtgaaaaccctttcccattttcaaaatctcattacaaaataaacgatccaaatctcactataatagtta

SEQ ID NO: 234358 - DNA, 1521 bp, Cannabis indica
atgtcattaaatgcaaaaatggaataactcattaaatatagagttaatagagtatattcgtaactccctgactgtatagtccaaggcgagacaaggatacacaaactattaattcgtgtattgacgagaaaccatacggccttagaaggcatattcctgagggaactacggacaatgcatagcgagacatctacctcgcaacatgtagggaagtattgatgaggcgaatcggttgttgaaacacttagcgtaaaatccatattatataactaagtgtaatagcttgggagtctggatgacatgattgtccagtctgcaaggccttacggtcaaataacagttcttaagtttgctcagtgcattggtgctcatgctattgctggaaagcatatgaataaatcaagtcattcatctatgtacaaagcaacatgcctttggcgagattctccatccaacatcagtgtccattaccttaaagataagaataacaagcagttatgcagatttttagctttacacgtgtcaaaatggaacgtggtcaaagcccacattttgtgaaaatagttatgtatttcaaattcaactataaataactaccaacttatattcctataaataaggacaaattattcttatcaaatttctcataatttatgtgcttaatttattacagaaaaggcttattaattagttaatgaaaaatctcggttaatagtttggtgctttcattgagagcatacgtgataaaaacttagaaaaatccctcctaaccaacaagaaatttgtccatgggtgatgataattaaaacaatagtggtcgtcccgaagagactaatcgttgtcctgggaaagaaccaatgggttcacaaaggccacctacttcaggaacaacacgtcaacagttcaagagaagccaaggtggtcatgaccaaaacccagaaactgggaataaggataccaatactaatattggtggttatgtacttagaagcgaggatgcctatgatcccactaggtatgtatcgttagtagaattggaaaattgacaactccgacaacgtctggccgagtataaccaacgaaatgatgagttggagagagaggcagccgtaaccagggagacttaaggaaacaatgcaagaaaccaacctgatcctggagtgagaaggccatgaggtagacctcgaggtttgagaactaggaggcaggagacaaatcaagaaaatccctagaatactcaggaggaacaacctggggaaacaagggatgttccagaagaccaacaacagaataatcagacacctcgtcgggaagtacctcgaagaccctagggatttacgaattaggggaatgaaaacaatgacgtgccagaatcttctcgtagaaacaagaacatatggcaacctagaactagggaacatgagatccctcgtaataacgagaggaatccttaaatttaaaattacatgattatagttatcttattataaatttaaataaggtcaaattattttttaaaaa

SEQ ID NO: 234359 - DNA, 2162 bp, Cannabis indica
tccaataacaatactctaataaatgaaaaattttaaaatgcactattgatgcctagcattcttctcggtgttatactgctattggtgtaattaagtatcagatctcttaagaaaatagtttttaggaaatatcgctaactaatcataaagcttcatttatagaaggtgttagacaccactagtactcaataataatgctcttattgagtgccttactagttaacacgcacacatgcgatgattcatgttatatgttagatcaagaggttggaatttatcttatcttatgttaatttgaatatcacaaatgtttaatttcattatctagttgtctcaattgtgtgcaacaaaatgcctctagtaataattaaacattaagcctgatatataataggttcatatataactaaggatggcatcaatcaattcaatcaccttcttcttaaaacgtagtgtttcggcaaacagtgaatgcatgtcattattgacattgatatatatatataaatatatatatatatttatataaatattaagtcgacagccacagccaaaaaccaagattttaatgtgatgtaaaggacttggacatgtaaaccatctaacattagatagatgaaaaattgttacgtaaaattatatattaaatatgtaatcaattggaaaggacagagaaacacaaagcaaaatctcatgatattataataattcacaaatggaatggtaacaacgtgccttatatgtccttctatctcaaatgagttcaaatataagtactatttcttaatgttttatcttgaattgaccaatttttcatgtgcacacaaacattagcatcttcctaattaataaatgagtctgtatgtgtgtgtgtgtgatttaggcttctaattttggattcttgtttttgaactttcttatattttcatatattaacatcattttcagcatcttaatgacttgtgacctttttctattaccaatttccacacttactacttcctttcttaattaatcttcatataaatacttcttcttagaatcctccgctaacccaaaacttgggctgattattccaaagcctaaaaagtaaatatatactaatatggggaagagagtaagtcaatcaacatctgtgaaaacaactaagaacaatgaaaagaaggacttgaatagttggataaaagtcctcaagccaaaagtctacataactgatagctcaaacttcaagcaacttgtacaacaactcactggcaatggcaacaaccaaccctttacaaaaccccaacaagagatcaagaatgttccggtcatagaaatcgacgaggatgatcatcaagaaattgagcctgaaatcagtgtggaagtagcctcattatcctttgatggtgccactgattcatcagagttgttctacagcaaccaattagagcaagagttcagtcaagtgtataataatgagatatttttggatgatgataatacaaacttggaaaattattcagtagcaaatcaacaggtggacttgttagcttattgggatattgagaaatggcttcttgattatgattcacatggtttattatacaataatgtttatggtccaattgagcaagatgtcagcatatatgattatgagctatctgggattatatgagaactattttctctgttttcctctgcttatacatatatatatatatatatatatattgagaatgtatgtataaattatctgttttactagattattgtagttgtttctatttgtcatccatagtggtaatgtatacattgtgattaatttttctttcttcaatgttaattagtcagttaacaaattcaatatgaagattatcaaacacttaagagatagatttgattatggttctggatttttgtccacatcagagtgtagttttttatgtattaatttcccaaacaatgccaaattgtaaagacattatctttgtttaatatagtaacaagtgatttgcatgaaattacctatatattaatcttgtaatagttatggatttaacagaaaaagacaactcaacaccttatgaagaatagtaagttgcgtgcccttcatgtcatcatttcatctttccattattatattaatatattatttgcttatttatctttaatttgaaaac

SEQ ID NO: 234360 - DNA, 951 bp, Cannabis indica
ccgaccttatggctagccaagcttggaaacagcgtcatggtcggccagcctggccagcacaaggccatgaccgaccaaggattgcgctataggtcccacaagactctcctacacatgcacaacaagaatgggctgcaaattgggccccaaaaacccaacagacaggctgagaagtatctagaatctaaaggctttttggtcttttgtaaatatctagctaactatcttatttttaagggatttgagttgtaaccctaggatttaggcctcctatataaaggccttaacctctagctaaaaatctaagttgcctaagcgtcctctaagctagaaattctcttcctcactctctctcacaagcccaagcctaggctgcacaccctaggcattgtccgacagttgaattctgccaaacatcggttcatacattgtaatcctaaagggtactataacagatctcacctatagcgatatggatagtaattccctcggtataatacaactaaattaaagaggagtaagttattacccgttatcacaagggggccgaacctttataacaaatcctgttgtttattgtttcttattcttttttgtgtacacacgtggtaaacattagatctgcacaactccgctgtgggttgatcaattttaaaagtcaacatacacattaatcataatcttcttaataaataaataataataatttttattcttatcaaaaatattatcattaaagtaatgagataatttaattttcatatcagaataattttttaaattactattcattatattgatgaataatattttttaattattatactaaaaaaaagttataacagaagaaaaactagcacataatataattatacattctatttttcatttaactatcatattggttcaattaagtatcaagtcccatataatttaatataataagtttta

SEQ ID NO: 234361 - DNA, 1407 bp, Cannabis indica
tgtttgtgtcataagtaagagagtcataccttgccatttgtgtcagttgttcttgattattggagacaccttgttcgggtggagtttgatgatgttgtttcctccttagtccattattttaaaatgagtgagggtggcaaacgacttatgttgaagtatttcatggatgcccatatgtgcttgcaaggataaccttctgtttcgaataataagcaatcacacttgaagtgattgttaattttgtagtatcgaaccttataacttatttctccatgttgaaatcgtaattaagggaaagaagaaggtgatccccacagtcatcaaagtgactaattgtatatcctacctcttttcttatctcgtttgcaccattaatatacaattcataagtataaatttcaaatgcattcttgtaataaggtctgactggatcaattaacgatggtagctgaggagaagtgtgcttattcttaaacatcttctgcgcttcattgtagcatagcttactgaccccaatatcaatacattggataaattcactaacggggatagcttgcccggaaattttttttcaaaagtttgcatttcatagacttccatttctttgtgttggtctcattccagtgcaaaaatgacctcttacaaaagcttctccccacatgagtttagaactataagctttggcacaccattctacatcatgtagatcaaactcatcaattaagtctctccattttattttaaaattcttctggacactaggtacttgtacattagacgagtgaatgcacgggtaaaatttggatctttcaaatttttggtgacattattgcttaaatgccaagtgcatgtgggatgaaatgcatttggcgtgacactcttaattgcaagttgcattccttgatcgccattagttatgacaacagaaggttgtttatcacccatacatttgaggaattttgtcaacatccaatcgaatgtatctcccttctcatggaggagcaaaccaaaaccaaaaacacaactgttgaaatgattgttaacccctattattattattataagaggtttgttgtatttgttggttttgtatgtttgttgtatttgttggttctgtatgtagtgtcaaaagcaattacatcgccgaatgcagaatagtctctcctacatttcccgtctgcccagaatatatttgccaatctattgtcttcatccacttgatactcgacggagaagaagggatctgaccttatggcggcgtcaaagtaaccaagtgcccattctgaatccgtttttgaattttccaatcttatttgttcccaaaccttgttgtaaacatcctttagttggaaagggatattttcgaaccctccagactgtaatcccatatgcgagactatattagaa

SEQ ID NO: 234362 - DNA, 1516 bp, Cannabis indica
gattgctttcttcttgtagcaatgtcccaatctggttcagaaatttatcgtccagaggatttagagcttgaatttcctacacaatcaaccatcccttataaacccaacccttacaaaacctacatccaaattagaattaaacgattgtagggttagggaacacttagtgaaagttcatcatgaagataatgttagtcgccataggcgcttcttgcaagaaattatcgagggcaaatgccatttcttgcgagatggagcttggtcagaatctcccagtgtgtcctctattcctttggctaagcctttgtttttacccaaagtcatgattgcttttgaaccaggtgacttcgactttgaaataatgtctcccaagccatgtacatcgaagactccctaggatcctaacgtcaccttagaccccgagttaatagagtcgaaggtgcaaactatctcaggttacacaggtgatatactgaggacctgcgaaatcaagtatgggcgagtatgccaagttaggtcagtgcaagctggtgagtttagctgttaacctcctgcgcgtcccacaggtgaggcttctgaaggagccagtggcctatacccttgaacacatcaaggcaggggccataattcccctttgtgattatgtcaaggattacgtaaaccacctcggacttgccccattccaactaactcccgtctcctatagaatccttgccagtttgaaggtcttgtataaaattctaaagtgggaatgcccaacgcctatggaaatcgagtatctgtactctattaaggttgttccagtgaggaagaatgtcgcaaggggttttcattatcttggtactcactctagcgagcctaaaattattatggacttccaaacaaaatatattttaaagataacttcttttagacaactggcctctccccaatcggcacaaccaccttttgcataattcgtaagttattattttcatcaggctctgttagattaatccatgtcttttcattctaagtttattgactaaggttttgttttttacagccctctcgaagagacccgtccctactcccgagatggtcaaccgacacaagctcctactgaatcttccccacagccttaggtcatgcgacttccttctaaacgaggccaatctgagatctgtggacctctttactgacaaggagtttacctgcaattataaatttcccaagtattcatcttcgcagtaggttcccattctagagggggataaggcttgggatcgcgtggctcgggcataatacctccaaaacactgtccctcgggaagctagttaaggagcatcccaaggtaatcaatgtggttggtcacccacaatactcagggccgagcgtaacacattagttaccttccgagatagctgccttaatttttatatttagaattcccttctcgtagactgaattgctcataggtttgacaactgctaccctagattccacagattagttgtaacgagtcgtattacggtat

SEQ ID NO: 234363 - DNA, 1310 bp, Cannabis indica
ttttacaaaacactcaccacctgtttggcctccattatttaattcaaaaagatagcaatacaagcaaaatagagcatccttttctatgctatattccaaccaagtaggaaaatcggcaaaccaggattgatgaaattttcttctttgatttgcgatcattttatctggaaattcaattatgggttgataaggacctctttgtagatatgctctccgaatttggtctctaacattaggatcatattctaaaattggagttcgtagcccaggatctgaaggaagctctgcaagattaatctctaccttttttaattttgaactttcaatattcgaatctgtagaagatggcgaatctctttttctaccatagtacctctccataaatatttgtgcctattcatgattaatttataaaatattaattagaaagatacatcaatatataaagataaatttaacaaaaaattaataaaaacttgttaatataaaaatgataatgtgtataatgtttatatacatgattcgtatttgatgaaaattacattgttttatttcatacaaagtattttatgttctattaaattatcttttatgttttattgaattacttaaaggttttaattaaacaatgggagatatctttttactcatttgagcttggacatctttattattttccccactaatgctaatagaatttgtataacaatgacaacaatttatacataataaggacattattgtaagttttacaatcaatttctctatattttagtctaacaatatcaataatataatataaaagattcttaaaaataattactaaaaaaaaacatgatagattaataataacaaaaaatgagtcattaaaaaaataaaaaaataaaaaaaataaatataaataaatataaattacctggtagtgaaatatattttcttgaacatcaactattcatcaattcacttcttcccttaacgaacggggtaccctaaaaattcatattgataatattatataatcaagaagatattaaacaataaaaaattaaaaagaaagtaaaaataataataaaaaataaatatcaattataaaatatgcaaaggaaatacaatataacaaattaacaaaataccttgatggctagatacaatattgattatttgaaagatattttttgttcttgagaatcaagctatcaactaccaatttttcttctactagcaccacaaaaaaaataattttgaaatcttaacttttctaaattaccgtagtattgagtgatttgtcaatgaagtatttattataaagg

SEQ ID NO: 234364 - DNA, 907 bp, Cannabis indica
tatttaacatgttttttttttttattttcatttcaatttttattcaagcccttgaaaaagaaaatattcaagccctcactcaaccgaatttctggttccgtcactggataagggtgtatcaatgtttctcttttaaaggagtgtattgtagaattttcctataatattaggaaagtattaagatatacattactgttttcctctgatgtctatctatcttaatactactagtagtatattataatttatttaaaatgcattcaactccaatagagacaaataatagtatttatcttgttggtaatgtcaattaagaaagcttagatttttccaaagttgttttagaggatatttactaaacaaggcagtcaacttctatgattgatataatataaatagatcaagtggtagtttcattatacacatatggtagggtttatgttcattactttttactaaatcacattctcaaatttatttagatgatatggtcttagtaagaaatagtaactttaagaacgttatgaagtagagtgctataattcagttgctactagccaaagggattccctttggctagttctagtaatttttagtggggttctggttacttagttcttattgtttggtagattctggttaatttgataattttctaataaaagttttattatggttttctgctatttttcaagtgtattttaatgagctaaaagcattatttgaagatgatataactttattgtctaaatttttagaaacaactttgtcctatgtagctcgctttgagaatttagcggcccatagtttggcaaaacatactctacagttagacgatgagctatcctggttcgaggaaatttcagcaccaattgtagatatcagcgccgtaaattcacgagtattt

SEQ ID NO: 234365 - DNA, 936 bp, Cannabis indica
gcgacgtactgggcgtaagtacgcgtgtcagtaatatataatgagtaccgagtgtagatacaggctcacctaattaggtgatgcgattttcctggcgacagactgggcgtaagtatgggcgtcagtgatatatgataagtgtcgggcgtaggtatgagtttgtctgattaggcgattactcctagcaacgtgtagatatggcatcaatgatatgaaaattgccaggttatggcacaaaatgaaaccgttgtagggtttcctcctggcgacgtgtagatacggatgtcagtgacatatgataagtaccagtcataggtacgggctcgtctgattagtcaatgcgatatattggtgccaaggtgtgacacgtgctcacttgattaggtgatgcaattatatgatatatgggtgtaggttttaggaaaaggctcacctgattaggtgatgaagttatgcgatatatgggtgccaggctatggcacgggcttgcctgattaggcaatgcaatacaggattatcagattaaagcatcgacttgcctgattaggcaacgtgatgttatgaagatggtcacttcatgaggtaatatatattatttatatgattaaatgaatatgcattatattattggtgtaatggttttgtattactaaatatttgtagactgatgcttattcgtcgcagatgccagtacttatatggatttcttcttatgaacaatgggtgatggtttgactcttattgtgtataaatgacaatgttcgaataacagcctatatgattgttattattacttttcttgttgagttcttctgactcatgagtgctatgtggtacagggaaaggcaaagaaaagctagatcaaccatgaggtgacagtctctccagtaatgtacatattgacctcattagcctgcgtgccgagttgccaggagt

SEQ ID NO: 234366 - DNA, 959 bp, Cannabis indica
ataccttaaatatcgagaaaatatagaaaaatgtgattttgagaaaaacaccactaaaaatggtaggccattttttctggtcttgcttgctaaaaagggtagaatgtttttagaaaatggtctaccatttttaactgatgaattcgaaaaaatctaatttctcaagcaattctacttcaaatattgtaattaaaaacacatttagaaaaataataattttaaacctaattttgacaataagccctaattatcagctaattaattcccgtaataaaattaagcagtcattacaaaaaagttagtggctaaatatattagtcaaaaaaataataatttgttgtaactaaatgtatttttagttacaatatatttattgtgactaaaactatattagttacaacttgtatctaaatattatattctagttacaagtaagtttttatttcgagtaaaaatcatatttagtcacaaaaattttatgttgtgaacacaaaattatcattaaaaataactttttattgtagtgagcggtggaaatctcatgctttagaaatgttttttacgattaacacatgctttaaaaattttagaataatggatttgaattgaatttaagccacatcttacatattagtgttggttgagtcactgagattgaatgagccttaattaaaattactaaaaatatatatttttagaacaacaatatatatatttttgagtttttgaccctaagcgcaggcctaacataccttaacaacaatagatgataataatatcatatttatatttttgagatatttttgtcacccttgtccatttacatgctcattaattataacatataattaattagattgaaaaagaaaattgtttcacaatatatttcattttacatatataatgttgtagggctctatagttagttaaaaaaaatacttttaaataattgaaaaata

SEQ ID NO: 234367 - DNA, 822 bp, Cannabis indica
ggtcagtcatcaatccaggaagcaaccagagtggtgtactcgtgtataagagccattcattccgttggtgtgagtactcaatggaggcttgaagcgaggacgttacatatggggtctttgggaacccattggttctttcccaaggcgatgtgtagtctcatcaggacgacttccatcgttttgattgttatcagtcatggatagacttttatttgtaaggaaggatttttcttagttttatcacgtaggctctcaattaaagcaccaaactgttaatgcagattttcgttaaccaataataagcctttttcgtaataaatttaacatagaaataataaggaattaataaagtataaatagtatattaacaacactagatatttttatatggttttgcagttaaatctgcatactccacgagtctatcttattcaagatattttctgagtacaaaatatatttgatgatatttctatttttctctctaaaattctttgtccctatttctgtgggatttgccccaatttataggaatataggttgacatttatttacatttaaattcaaattataactgcatgtcattcttatccttaaagatggtcaatgctgatttggacaatagcttctcgcttaacttgtcgatgattaatgctgatttaggaaatcatatcttgaatatttccaagttgttatccttagctattataatgtagaaaatacgctaagtgttaacaaatgatctgcctcgtcaagtttcttatgaatagcgaggtggatgtcttgttatatgtaacccgaggtcgccttgggtaactacgt

SEQ ID NO: 234368 - DNA, 629 bp, Cannabis indica
tggggatattgagttctcttgaattagctgttgttcctggctttccttgttgtctttggtcgctgtccttggcagacttccactgctttcattttccaaaatgtgtggagaaggaaaagatgaagcagtaggaattcttccagtacttattggtgattgttgcagagaatcgtctgcaattttttgtttccccattccttgttcctctccatgagtcctttctcgggcctcatttccaccttgagccattttccataagcagccgtatcctccttgccatccacctgaatcatagttgggttgtgatgacaatctttgtaacaatgcccaattttcccgcacttgaagcacatgaacggtagttcttcatattggaagcttatccatttcttggtgcctttatacgacagggggaagcctgggaaaattggtttatttatggacatccatattctaaatttgaagaacccgtctgccaccatcttggaaacatcagaattttgcactatgatcacctcccctgcctttgccgccattcgaactgtgttgttgattgtcagtaaatcgatcggaacatcccatgctcgaccccatattggaaagctggttaagtcatgtttccaagattc

SEQ ID NO: 234369 - DNA, 1115 bp, Cannabis indica
gcttaaacataattctttgatctaagaggaacttagcaaatggtcgatattcccctcctccatcaacttgaacttgctttataggcaagttgaattgcttttctaccatgcttttaaattttataaacatatcaaatgcttgagacttttgaacaagagggtagatccatgtataatgactaaagtcatccaagaaatggatgtaatacctatatccatatttggattctatatgagatggcccctaaagatcggtatgaattaattctaatggttgggaggctctagaattagagataggaaattgtagtttatggcttttacctaattgacaggcatgagaaaaagacaattggtttggggtagtggaattacttatgctagacaaaaccttttgcaaaacaggtaaagaacagtgaccatgtttttgatgccatatatcaaaatttaatttactgctagtatgaaatgtgataggagtggagaaataagaaggagaattatctattttattgttgtcaacgttattgcaatcagatttgagaattacatttgtgtaattttgtttattacagatcatagcagtaggaaaatgaaaatgagacttggactgagttgggggatttgatcttgaggcattggaggactatcctagcaagtatagtccatctttaagggctcccttgagtagcatcctccttgttgctttgtcctttataaaacagcaggttttgtgaaattcaagatacacaggattctcattagttaactgagaaatgctaacaagatttttagtaatagaggggacatgtaagatggaattcaacttaattggataagaattagaagaaggtagactggctgaaccaatattagaaatttgtaatttcttaccattgcctacaaccagcccttcaacacctgtgtaggtggttgaggagtcaagattatttgtgccttgggacacatggttggttgcctttggagaggaattatggacatttgtattggacggaggttttgggggcacccaattcttatcaaaccgataatggaaaactggtgcagtgtatccaaaatgaagacagagttaacatttgttgggttttatgccc

SEQ ID NO: 234370 - DNA, 1153 bp, Cannabis indica
cccctccccctccctccttctctcccctctaccaaacatagtgtaagtttgaagggaattgttaaagaatatttagattgcttaacggttatttcagttgtgtatagtggtgttagttaattattgccattagttagttagattctttgttaactaacttttctattagttggttagctaagctatggtgacagttaaaatagtgcaaatgctcccgcagaaaggcagtttgaatttgaaggattagtttattggtgtgagcacattggaaaggggaactaagctcgtggggctccctacccttcctgtcctcaatctcacccatctttcttttcttatttctatctttcttatcacttttttctttcccatctttctctgtgtaagtatactcaatctcatctgactctcaggtaacagagccacaatggtaaaggaaaccgagtactgtactatgatgtcactcctgaggaagaaattagcaaggcctattatcttaaggttcattatttgccattttatctttttcttttataaaatctctaagtcttcttatccttatcttttcactcacatgattgtctgatacctttacattgctttgatcatatagtaaccaaattgttcattgatattatctttcttaagttatataattgcaataaaataaaattatatgatccaaatggcaatattatacttttaggctatgttggtgggagagaggaagagtaggatggatggagaggttagagaggatgtagagtaagagggatggggaggattgttaatctcctttgtattatttggcattaggtctgaggtggaaatgatggagaaaaaattgattagtaaaattataaaattgtccttttaaaaaaaaattattatttttttaagaataattattgtattttgcaaaatatattgtctttttatacaatccttccaaatttagaagaattaaattttgaagatttggagggagaatgtctccctccatctctcctctcttgacaaacaagtaatatagtctctccttccatcactctccctccatccctctccatccacccatcctccccctcccaatcaaacatagtgttaggccatgtttggagggagagagagtaggatggatggagaggttaga

SEQ ID NO: 234371 - DNA, 629 bp, Cannabis indica
gctcggtttatctctgaagacaaccctaagtgaatatacccatctagttgtgtacatacttgagacgtgttacattgttgagtgccatgtcacattgtgtgaaaattgggataacattcgtccctcaagtttgcgtgagagttgctggtcgcatggggacttccgaggtgtgcatatttcttggatgggtaacacgtgttagagttcacatgtcgtactagagatgacatttaccctgcccgagacatgtgtatcttctttagtctcttcaaatctcaacatttaatgcttattcaaaaaccgagaaatgagggaatgtgctttgacggttgcacacccctactcctttaacgattgtaccctttggcatttttggaggggaaacccaatttcaattttatgttgagactactgtttggtgggtttataagagggatttccaaatccatttagacaactcttagagcttagaaaaaggaaaacttgttcttcaagctgtgcgagctttgcttccttccaaatgtcttccgcgaagaaattcaactctcaacacaacagtgtgtaagtcattttcttttaaactttttctttattttcctttccctatttttgcatgcatggtattactg

SEQ ID NO: 234372 - DNA, 777 bp, Cannabis indica
aaaatagcatgtccccaagctaaaattgggagttttgttctcataagtaatggtcctgcgattaactaaaggcacttaataaatgattccggtagaccattttgtgtatgtacatgagtaacaggatgctctacatatatccctatttatatacaataatcattaaaagcctatgctgtaaattcaacagcattatcatctttattgcataatctcggaattgtgctcgtaatcagattatttgagcaagcaatcttacaaatgctacattacaagtagataataaacaaacatgtgaccatctagttgatgcatctatcaataccttaaaatatctgaatggtcaacatggtgggcaaataggcccacatatgtcgtcctgaattcattcaagaaatccaagggattcaattccaactttcaccggtgatggtttaatgattaactttccttgagaacaagtaacacatgagaactcactggataatagaatcttgtggttcttcaatgaatgaccatatgagttctctattattctacgcatcatgattgaactgggatggcctaactggtcatgctaaataacaaatgaattttctactttgtaaacttctcgttcaaataacacgagtttatattgtacttatacgtgtaatatacaaacctgaagacagatcaggtaattttctaatatgcacttttcttgaaacaatagacgtaatgcaaagatactcaaaatgatttctatctattgtctcaatatgatatccattacga

SEQ ID NO: 234373 - DNA, 1034 bp, Cannabis indica
tacactccgtggttgtggagcggcgcagttccaaaagaacgctcggtggcggtgggtgtacggcgaggcgatatcacagtggtggatcgatgtttaaggcgcctcaaatttggggacagatgggttttcaacgagccaccacacaagttcaagctttaacatggttcgtgtgatccgatcgatggttcaagatatcttcataaatgtttttttctttctgtaataatatttttaatttttaagtagatatttgcatataatttgttctgaattattaattgtatataatttatgtttatagactttaaatatttattatatggcataaaatttgttgcataaataattttttttgtatcaaatgtttcagatttatataaataatatattatattatatatatttttttataaatatattgtatagtaatatatattatatattatatatttgtttttatatatagtatatattaatattttttatttaaaaattaatatgaggtccgacatttaaatgtagtgcctatcgactctccttaggcatgaatctttaagcccgacatgtcgtgtctaagagtatattggcacaaaaaataatgtttgtgtcaataggctcttttccttgtagtgattgaagttcaaagatttaatagttggaggtatttggatcctttaattatatcgtgtatatgttagtttaattctgcatttcatgtagacatttagggctcgtttggatccctgtataagggctccgtattgtattaaattataagagtaccatgtttgggtgggaccttgtattgtaatagatattacaaccctaatttttaatacaatctatcatgtattattctatgctgaataaaaacagtgtataaggttgtattgtattattttggacggtgttagccagtacttcccctctcacccaaacttcttggccgatttggcctggatttctcggtgaagagcaacttcgtgttctccggcagatcaatctctctgtttcatttctcagtgaaaagcaac

SEQ ID NO: 234374 - DNA, 754 bp, Cannabis indica
ccttggctgattgatgacaataacccttacattgagtcctctagcctgatccttcaaggaaaaataggtaactcgctgatgcaagttgataagttggagtgggatagtgaagttatctccgatgttttaaataacagagataaggagttggtgtggcgtattccactttctacatcaagtaggggagatgattagttttggttgaaagatagccacgaaatgtttactattaagagtgcttatgggttgcaacagagggtaagtaatcgtattaaccagagctctttatcttgtttttggaagaagatgtggaaactaaaactacctccaaaggtgcataagtttttatggagagtgtgtgtcaattgtcttcctactaggtttcaattgacaaataaacatgtgcaagttaatacatcttgcccgatgtgctctgctgctccagaaattgcactacatgtcatggttcggtgcaactttgtgcaatcctactggagataacaaacaagagtgtcggttgcggctcctgctgccatgactttcatgagctggtttgaggaagggatggcccaatggagcgatgttgaatgtgtggaagctgccatgattctttggtctatgtggaagctgaggaacgatgttggagctcaatatctccctcgacagatgaggttattcacgttgcaaaagtgaattatttggactggtgtaatgctcaacagtttgaaattgagcctcatagtgtgcaccaaat

SEQ ID NO: 234375 - DNA, 755 bp, Cannabis indica
gatattaaactttaatatatgtacttatgatgttattcattgacaagttcaactctctatacttaatttttttttaaagaaactttgtatacttaatttgaattgattatatcatgactttcttgttcatcataagcctcttattatgattgttaataatgttttaaacttaattttagtcaatttttttttattctaactaacaaaaagatataaaaaaaatataatcaatctaatcataatatctctaaatcaaacaaaaataagaatccaactagtaacttttataaaaataaaagttatttaaattagtatgtacccttatgaattaaattggcaagaaattcagtatgaaaatacattgtataattttgatgattagcagactttaagacttgtgtcaagaattatacagacatgtatgacaagatttgaagtatgtcacaagacttgttcatcgaccactactgaatttgaagtataaaggctaaaaggaacagagccacttgaaaagccacttgaagtataacatccagtcaaccctactctagaaaaatcatgccaacaccttactctgtaaaacagaaagagcagaactctggagagaaaatgaagtcctaaggacccttacaatcataacaaggaaaatgttgtctacatagttggtgtcaatccatagatgcccaccataaataaatatatgatatttagcctacaaacgacgcaatattcagacaaaactcgatcatagaaaa

SEQ ID NO: 234376 - DNA, 1022 bp, Cannabis indica
gctgccccaccctctggccggccgtgagtatacctacttcaatcttaggagcaagcttttcaaacttaggtttaagaacatgagcaagacaaccccaaatatggaaatgtttcaaactgagttttatcccattccataattatattggaatattacttatgatcttcgagggtactacattcaaaatataagtagccgataaaagtgcgtatccatagaagctcaatggtagtgatgagtagcacatcattgatctgaccatgtctaacagggttcggtttcttctttctacaacaccgttctactgaggtattcaggtgttgtgagttgggacaagatccattcttccagtaaatagtctttgaatttgaaatctaaatactctccaccacaatctgatcaaagtgtctttaatgatttacctaattacttttcatccatagccttaattcttcaaactttctaaaagtttcagacattttggccattaagtaagtatgaccatatctagaataatcgtccattaaagtgacgaagtattcataacctccccgagcttgaatattaataggtttgcacacatcagtgtatattagctgcaatgttctttagctctattgtcttttgtagaaaaatatctttttgccatcttgccttctggacaagactcgcatattccaacttttagttccctcaaaggactatcatttgtttattctgtctaggccaatatgggctaaacatagataccatagatacatttcatcatcatcaaaagccttttgcctcttattcgattgaggtaatgctacactagacaattcatcatttaaaattaattgatcacttggcctgagcacataaattttgtttctctattatgcaaaacaaataggcgtactatttttgaaaataatagtatcattattaataaaaccaatattgaaaaattgttcatgcagcagagataaaaaaaataattactacattacatttgagaataaaataaatattgttcaata

SEQ ID NO: 234377 - DNA, 2539 bp, Cannabis indica
tttctttttcttcttaatttattcaattaaattaggatattttgatcactcctcaccatttgtggcgaaggtggtaaccacttctcagagatgttgctgttttatagaaatgagagactcaaaactcttcgtttccgtgtgagctggaaatgagaaatgcaaagttgtgaattttacttctctgactttatacatctttgttattgtgaaaaactagatagatggtcaaaacagaatcagaatcagaatcgaatgagcagaacccagcgcactagtccttttgtcaatttgtatgctaggtacttactctcgaactcctgtgatctcattttttatacttccaaggcttctaaactttagaatgaggtctctcaccttgtttttgaccattttgaattcaatagtttcattagaattgacatttgagtaattgaaggcagcaccccaagttgattgtcaacctgagcaataagccccatttctaagggctcgggtttgtgatttttctccgagttttcttgaatcttcattatttacgatgatggaaaaaattctcgaaacaatttttgatgaaatggatcagaaacagtccaggttgacaatatgtcaacctaggtgatgggcctagtcccaagtatcaacctgggtgctaggtgccagttttgtcccttcgaaaactctatttggtcctcaaaaatagttgaatctcaatattttctaaaaatagagaagatgctcgaaaggattcttgaaaaactccatttaaaatagcctaggttgacaaaatatcaacatgggcacaaggctagccctaagggtcaacctgggaactatgccctattttttgtacccagtttgtgttattttttcttcgaaaggacctatttccccattttgatgaagacaatgaatatgctaaattcaaatctctaatctgatacttggaatgcgcccaaattgacagattgtcaacttgggcgctgggtgcttggggcccttggtgctaaaaaataaacttgctccaattctaattttgatgcctcatatgtgtccgtgatatgtctagtttatgtcccagtataatttttgaccctttttcactaagacgatcccaaaaactaaaaccctaattggatatgtcaacttgggtgctggatgaaaccctaggttcccaagttggctttcgggttgcaggttttgtgtaattttaactcctatcacttggattaggttgttccacgtcttcatggtatagaataataaaagatactgatttagatttaagctattaaagtctaagcttccatcccggagatcctgaagtcaacctgggcgcagggctagggccccctcccaggtcaactactatgactcaagtctactcaactttgttacgtcatccttcattccaagtgtcaaacattgatgtctacatcaccatggaaagtttttgagttaacatttgtcctgcaagtcaactttacacatatgtgaagttgacttgatgacgtgaactgagcttgtttcacttgaaactactagatgggcaccaattttaaaattcttaggcatttgtatatgttcttcaagcattctcaattgaattaggactttgagcacttttgcttagtccttgagaattttgaaaattaattaacaatgaaaaagaggaaaaacttttttttttcacttatcttttacctttttctttgaaaattttgaaattttcttatttttgtcatgccattaggattaattggattggaatcctaatcttattagtaactgccattagaaattagagagagaaaagaagaagagaaaatattgttagcctttttcttatcatttatctttttcttttatttttttttttatttttccttaattttaataccattagaatttcatgttacattttaaatttgtatttgtattcctatttgcataggaattttgaaattagcttaaaaaggagaagagaaaagatattgtaagggttgtacataaatttttgtaaaccgcccaacctgaacaacccgtccaaaccaaactgagataacccgatagaaaaatgcaaactgaaaaacccgacgaaagtataactcgctcaatctttatattggacggggttgaaaataatatcaatctcctcaatcaatccaaactaacccgaccaacccgattaagaaagtgtttatatatatatgtttttattagatataatgtatatattatataatttatatacatatttttaaaatagaaagttcaaactactatatttttttatgacagatgatttgatttttaaattcaaactttatatttatctcgttatcacaataactaaaatataagaattgaatgtgaaaaagaaataaacattagtgctaacctgactaaaccgacaaattcattgggcgggttgaaacttttttttttcttaattggacggattgcaattagatttttgtaacccgatctttatattggattaaataaaatgcaacgtaaatcaaccaaaccgaccgacgta

SEQ ID NO: 234378 - DNA, 1051 bp, Cannabis indica
attagctccttttgaagggcaccaccttgtttggttctcctatgtgaggtggcaccaaagccagtggtgacaccataactgtctgtgcctttgctcatactctccataacccaatcactactagccttaactccagccctcgacgactctgaaagttctaccttaactccgtcgatgtcacctccagcagcaatggcagccacctgagaaatggtgagagtctcaccaccaagacgaacaaccggcttccggtactcggcaaccattctcttgacttcatccaagtggctgccagtcatggactctgccgcagcaccccagttaagtgggtcattagagacgatcggtgctggcttagtagtcttacacaaactctccattgaagcaataatacaataaaaaaatgttgtattaattaagttgaagttgaagaggttattgaatagaactaaagagttttagaaaaggatgatgattgatggagtttggtttgaagagtataggaatataattaagggtcttatatagaagaccgaaggtgggtttagtgggtcaaacttgatggcttagtgggtaagtatgtgaacatataattagtccatgcattgctattccacacgtgtgtgtgtgagaattaaagtaggtcttattttgaataaaaaaagtattgaagaagttggtaatgttattttattattgttattattttattaattggaagaaggtatataagttgttggacaaatggttgcacacacaaaaaacaaaaattactaattaataagaaaacaaaccaaatacaactttgtcttattaccataataataataataataataacaattattattattcctctatatctaaattataagtctcttttggacagataatgtgtaataaatatatagttataattggagcaatatatataggtatgtttatactttataattcaatttttaaaagagtatttcggtagttttttttgtttgtttccagctttttcaggtaatatttttagttctattttttttttatagtttgtgtg

SEQ ID NO: 234379 - DNA, 1203 bp, Cannabis indica
gtttacccacatagctgattttgaaaactagctagacaacattatatttctttgacttatttaatgactgtgttccttctcatttcagatattaagcatacaagattccattagtttcaaatgtttggttgacttaattaaattaaatttagataaatgaaggtttggtttcaaagggtctctttatttgctatagtgcattattctcactcatttatgtatttctttttattgcaggataattttctattctcttcctcttgctgaagtataagattgctttttttttgtattaaaaatcattagaaacgagaaatctctatgtatagataccaatgcaattaaagtattagtgttttaaatgataaaaattgctatttatgtatgttcctaaacattttcatgtaattataaaaaaaaattgaataatgaaattatcaaatttgcaagtttctaatactttttgttctatgatatagtacctatcattgtataagtagtactcataataactaagtaattaaaataccaatactaattatatattattttaatatatttaaaattaattatttatacaatatttaaaagacaaaatggcattttaaatagtaaaatatactattgacattgtttcaaatgtgagtaatataatttaataacaattttaaaatgtcactaaaatgatttaaatataaaaaataaacatataaaaatctattagtgacatttgaaaatggtattaattattattctagtggcattttcaaatgttactaaagtgactcatttagtaacatttcactttacctcacatgggcatatcttacacttcctacaaatgttactaaaaatatataattgtgacatttataagtgttattaaatagcatttttggtgtagtgaatataatatcttataatagtattaagtatgagtagtattttttttaaatatttatatatatggtcaatgaatattttatatgcacgtgtaatattcactagtgtaaataaaatattagaatgcctatagtagtgagtagtacaaataaaaattgtgatgtattgataaaaattttttttataggataatatactaagttaaattttatttgttgctagataaaatttcattttcataattaggcataaagctaaggaattagtaaaaaaaatatttaatttctctctctctctctc

SEQ ID NO: 234380 - DNA, 773 bp, Cannabis indica
ttgacgtcagatgtcaacctaggcgatggatgttaacttggccgctaaaacctgtaatgcctttagtaaaacgactataactcactctatttttttatctgaatgttgtgattcaacatgcgttttgaagctatttaatccctctatcaagtcatgtctcacacacaagtcgaaattctaaggctattgtcgccaaaatttatccccaagggagttacaaaaataagctttgggtaactcgcagtgggacctgccagacataaaaaattggctatcattaccagaagctaattttaaccgttagatcatcatcaatggtgaaaaataatttatttgtattttatctcctatattggtggtcctccttcacctataataggagagctcccttagttcattttcacattcagaaaactacccacaaggtcaaagcttctctctttagagtttgaagtttctgataattaaataattgttgtaattaccatttcgttaaaaataaaaactcgaagtagacatagccccattactatcgcgacataggggtgaactactataaattattgtgtctttcttattaattactttctactttcattctcactaatctagcgagtgggtgtggcttagaagtctactctagattttttagtcaacattttggtactttcatggagagccacagatcaagaaagtcactgattgagatggttgcgacacattctacaagtgtcgacagaaagactccaacaactgggggcatgccagttgat

SEQ ID NO: 234381 - DNA, 1304 bp, Cannabis indica
ttaattttacaaataagtgaattggaaaaaggaaaaactattgttctaattctaatggtttcggtaaattttagtgcaatcttttaatatttgtttcctaaaaaataaaatcctatttttctacttgtttttttaataaataaacaaaaattgagagaataaaataacatgtatataataaaatattaaattaaagatcaagatatatatgggttaattaagttcgtattgatcataatagaaattaagtaattaatggtgtaagcaatgacatcataatattggactgtttaaatattaataaaggacttttcaatacacaatccacaacaatatctaaattgaatgcatggttaaaggttttgaggacctgaaataatattttattaatatgtaacactgtgtgaataattatatttattttttattttttgggaaagaaaaaacttttggtttggcagcttaattaattactcatattgtctttcaattagcgtagtgtgaaacagatatcttttgtggtatattataatattatacttactgatatgtaattctatttctatgtttattcaaaaggtttaaggttatacaattctctctaaaacaaaaaggttaaacaattcatttatttaactatttgcatttcgtttattagttaccaacatctgtatttcaatcatattatatttagctaattatattcagctgtatatttgtgtggatgcatgttttgagttttaaattaattattagctctaacaataaacttgtttaaaacaagttgttatataatatctaattaaactagtttaattattacaaatcggttttgtgtgagtactgcttgtcaatataaatctttgtatatatgtttaaattatattaaatatgaatatatattttttttctaaaacattataatttaaattttaactctaaatatctctttatctttttgttagagttagtcccatatttgtgacttttcggccaatgtgtgtcagtttttaatgttggagtctttgatctattttaaaatttcaaaaatttttcgatgtgtacacctacaaaaatttctcaatttggcattgtagtattctttcaaatgtcacgtttattcgttttacccatgcacactttccaaacccaatatgagaatggtgtattagagttaatctaatattgctaagtagtgaaaacaaattgtcatattaagatgaatgaactattcctctcattgccaattgattttgagatgtaacctcattctttttagcatctttcattccaaattctaacaa

SEQ ID NO: 234382 - DNA, 707 bp, Cannabis indica
atcttagaacttaaatttttatctttccgttgaaaaagttcagtaaaatgttaaagtagactgtttaagtgtatacaaatatacaacggtgttcatactccaatttaattcaacttgtgtgatctaattcacgccaatcagcacttgaattgaaaaatttaagatctacacttggacatattagatgttatttgacatataaaataatagatccaatccaatatatatttaaaaaaatattatatatacaattaatattttaatataaaaaaataatttaaaattttaatatatataatacaaatgtttcaacacttacgagatcaaacgtacattttattataaataagaaaaatataatctaaaataaaattaaacatatgttttattctattgttagctatgtgaaaaaaatatactttaataaatattaaataattcaatagtaaaaagtacccaatccaaaataaccaattcaatctacacatttgcgaattaaattgtatttatcgagattgttaaaaatcgattaaaataagagttgcgagattaaataaattaatagagaataaagatggagatttttccatggttcagtttttaatgaatcctagtctatgagtcaattgtatttggccaaatggcctttatgtattacaatgacgttttacaagctcaagatccctagcttcttgctataatatttt

SEQ ID NO: 234383 - DNA, 649 bp, Cannabis indica
aaaccatcaatgaagggcatttgtgctacaatatcagcactcagcatcatagtgtttaattcaggtaatacatcggttactaacacctctagatttgtttctggaacgaaactcccaacctcactacgattgtccttagcagaacttggtgtgggactaggattgacacaatcattcttctttaacaaagtcacaaacaagggagtaaattcatctggcttctgcacaagtgtagacaaaaagtaccttgcacacttatcatttctaataactccaggacgatatgtgtagccttcttgtacttgtaatttacttccagttttaagtcacactccactttgtcaatatctagttcttcatacaaaagatcaaccaaacctgagtagcttacgttcgaatcaatgtcaaatgttaaattttcgacccctttataacccaatctacaccctcaagctcccaaacaccattatacattacaaacgcattaacagttgaacctgtcacatacattaaaaaaactacaattacaaatttagaacaaaaaatctaataaaaaagtcttaaaagtaataaatctgtaaccatcaggcccaatcgtacccaatcaggcttaacatcggactcatcagttcctgttaagataaaagag

SEQ ID NO: 234384 - DNA, 1423 bp, Cannabis indica
gatgcgtacatacctgacaatacattagactctcaacagttgatgcatagagaatcttttgcatagggaatcttggagagtaaatgttccccctcttttttccaatatacgtggtagtcccgaggtcagcgaggtggcaagtaggtcttaagggcaagaaatacttaagataaatttcctaagagaatttatctaaattcgatagtcatgttcgggaggcccctccagaagcttcaaccacaccctactgtcaaggaattttgttcatctccaggagctaggtaaagcctctagggccagtcattaggtcccagatgtaaattttataggcgcatcaaatacgacatggggaaatcatctgtgaatggatctaaaaagacatgtcagaggtattaaacccattactcggtaattatactctaatctatgagctttacgacggatgcataatgaactatcaccagacacctagctaaaacctatgcaacctaccatacatacatacatacatacatacatacatacatacactattattcgaatttggaaacttgtgcaaaccatgctttaacacttgcgacgatagtgataccttttttctctctttaagaagctataaatactccaagtattttctaaagaaagggtcggaaaaaatagtgtaaaccatcttctgtaagaaaaactactatattaatagcagtgactcgtgaattaaggctcattaatgagccaaccacgtaaaaatattcgcattaaatctgttttgatcattaaacagctctcatcaattagttgccaaaaatctcagtcaatacttcctaacctagtcgccactctctccttggattctctctctaaattttgaaatactagtgttgtaatactttctcacacaattctattacaatacctggattcctgaggaagattgtgaaaaaaaaattggtggtaatattaggttctaagaagatttaggttcggtgattagtaatactttgcaacagaaagaaacaaggattagatcgctgaactggataaaatattctgctgcataacattctagaagtgttttctaagttctgtatgtgaattgcatgttataagtaattaatattatgttaaatattagttttaacaaaaaataaattaatctgctaggttgtgtttcccaacatggatagtcataggtgttgggtgtttaatttaaatgcaagattttttttttaattattttatcatgtaaataatttgaaataaataattatttaattaaatagtttatagaataagttatttattattaaatgattaaaataaataatgataaacctatttcttagataattatttatttgaatttgaatttaaataaacaattaatttatctttatttattaggattaaatagaaggctacaaat

SEQ ID NO: 234385 - DNA, 4238 bp, Cannabis indica
aatattggcaatagagaagactaactaggtgtaggtcaaaatttcttaagctcactccacaaaaagttgagagagtaatcacatgaatttcagatatagctatccaaacaagataagtcaatgatcaacttttattgatgagtttctaacctagtatatgttatggtcaatatatatatataataatagtccaatagaattaaatgctgtatgcacattttatccaacacctacctcacaactaattaatctattaattaattaataattttctttatcaaatttacaactgtatatatataaatgattgagtactagctatatatatattcattagttttatcttttctgtcttatttcagtgatggagagagtgagatcgtttctacaatctcctacgtatggaaatgtgataactgttcttagcatcgacggtggtggaataagaggaattattccagcaactattcttgccttcttagaatctgaacttcaggtatatatttatgtatgtaaatatatataacagcacaataatttggaaaatttgttgtgactctgtatttaaatttatcacgagatatatcaccctaaaccctagaagacagttttacaaaaactgtcgtctcatgttaatattgtatatgtcatgatgacatgtataaataataataatacaaagaaattaattgatgaataattgtgggagcatgcagaaagtggaggaagatgaaaatgctaggctggcagattattttgatgtaattgctggaacaagcacaggtggacttattagtgctatgcttgctgctccaaaccatgatgatgatgatgatgataggccaatgttttctgctaaagaagtcattgacttctaccttcaacactctcctctaatcttccctcaaaatcataggtaaattaaatattacatttattaattaatataatatattcctatatataaagaatacaagaaaagtgctattattaacctagttcttaccatctctcaatcaatttttgtctctcaatatatatgccgaaatattttttttttcaaattttctttctacggcggtgttcgttatgcttacaaaattattattgtaaatttttaaaaaatttcgaatatttacagtaccaaaaatatattgaagtttctcgaacatgcatgcgtagtaaactaaaatatcaagaattctgtttacggtactttaaattattcgaatttttttaaaagtttatagagatgatactgtaattaattatatcgaatactgctataaaaaattaaatttttttattccaacatatatgatttcaaacgtagaaactgattaagagattgtaataaaatgttatatttaatcagagccgactatttacccgtgcaaggagtgctaatgcacagagcccacaaattaaaaaggcacaatatgactttttaagattttttataacttaatctttcactaatttgttattctaaaaaaaaaaaaaagatttttccttaatttttttttttttatttaatgtcttttaatttttttcccataatatttgatattagcttgaagttgcattagaaataacaacaattttaataaaattgtttaagtttttgggtgcttaattatataaaatatattttcgtaatatgataatatttaaaaatattatttacaagttataattttttttgataggggcctactttttaaaattagaacagagcctccaaaatatttgagacggccctgtatttaatattaatcaaaacacaaactatgtaggtatacgttcaaatcttttcttacctaacttcttctttttttaatatttttttaacatgcatgattatgaattgaggatatgaaatatctaataataataattatatagtctttcttgtttttttttggaacaaatctaataataataataatagtcttatatgaatttgcatacatggtcactattatataaagtcgttcaccctgagcatcctgaccacctgattctcgtggcagatgcaagttggttggcaggtctaagtgccgacatgctgaccaaaccccattcgccacatgaattaaggtggtcgggatcctcagaatagcagattattatatatttataatattaattaacaaatgataattatctcaccaatgtactcattgattggtgtaaattaagctatagctttatctttcttagggcaactccaattataatagcatgctactttagtacttatttgaccctacaaattactttttatttaatttaaccaatgaaaaaagtatgcatagtgttaagcatcattgatgttgtttagcatttttctagggcacattattttttttgtcatttcttataacgtattattttataatgtcatttggcttcatttactaacaaatattaatgtaggcatctctactcgagttgtttatacagacactttttataaggattgcttttatctatatgaatagatattttttttataatacttattaaattaaaatatgtatacaaagactttgagcaagtgtacctttaatttagcatttctcaaaacatttatttcttattaattattatatgtagttgttcatttggtgggataatccaatcaattaaatcactaatgggaccaaaatatgatgggaagtatttgcataaacttctcaaagaaaaattaggtgatctgaggttacaccaaacactcactaatctcataattccaacatttgatatcaaacgtctccaacctactgtcttctctacctatgaggtaattaaatattttttttaaaaaaatagaaagttaattttgtttttgttcattttcatttctctataaaatattatatattaatttattatgtttatataggtaaaaagaaactcaagcctagatgctaagttatcagatatttgtattggaacctcagctgctccaacatatcttcctgctcattcttttcaaacccaaaccccaaatggtcaactcagagaatttcatcttattgatggtggtgttcttgccaataatccggtaattaattacttaattaacttaatttacatgtatttagtataatatatttcatgatgttcaattatgaattttattggcattaatgttcataatgtttttttaaagaaaaaattgagggtgacatatgatcccaaatgttctcccattagtgatcaaacatggtttgttatacttgtgtaaattaaaggttatttgaattctgatgtattagagttagactcatattattaatgcctgtggaaataaattgtgatatataagatgaatgaactattattttattgtcaatttgttttgagatggaatcccattcatcttatccaaaattctaacataatttcttgaaaaatttgtgggacattttaactaattgtaaaatattattttaaagtatatataaaattgaaaatactataagtagtataaacgggtcttaggaaatttttttaaaaaaattaagtctttattataagaataaataatatttttaaaaattatttaaaaaatataaatatatttttttaaaaaatattattttatttattaggccctaacataggtgggaccttaagctcgagtctagccaaccataacctagggcgaccgtgtatgtatatttgtatatatttcataacattcattaatatttcaggcattagttgctataaatgaagtgtctaaagaaattttccaaggaaatccagacttctttccaatcaagccgatggagttcggccgatttttggtgatatcgataggaacgggttcagctaaatcagaagagaaatacagagctgatgaggctgcaaaatggggtgttttgggatggttaagcagtcacaactctactcccttggttgatattttcactcaagctagtagcgatttagccgatatctttctttctacagtttttcaagctctccattctgagaaaaattaccttcgaatccaggttataattaatttaattgactatttaataataattcacatttttagttttcttaattgaattatatgtcagtagtttgttagtaacaaacagaaataactcagggaaatttttacaacagaaaatatttaagggacacaatttaaatgtgttagtgttttaaaaaatcatatttatttttaatgaattataattattttttattattat

SEQ ID NO: 234386 - DNA, 722 bp, Cannabis indica
tatatgtatatagtttttttaaggtgtaattatttttatatagaggtatattttattaatacgggatttaaaaaatgtataactaattacaatatagaggttattcttatttataactggtccaaattgaaattttatttttttataataaattaaagattattcttgaatagagtattcttaaatagagtttttattttattcattttctttttttcagagaagatgatataatagacaaaatctctatgaacggttttttttggtatatagagacttttatttaagaaaaaaacaaaactattagccacagttttttgctttttcttcttatatagtgtctgacttttgagttcagtttcatagctttatttcaaaataaaaatccgtttcataaatacttcttttgctttttttgtaaatggacaaaaattttgagagatggtatttatgagaaagtactttcaacaaattgtccaaacaaaattcaaatatgatttactcgaaaaagaaattctgacaattacatttcatttttctctcaacaatagtggtcgacttatttcgttgagttttggataaatgttgatggatttagattgtctatcatggaatttcttttttcccaataaacttatcaacaaatgaacaaatcttgaaacctggttttaaaacaatgtagaatttacatcaattaaacattgtcaaaataattatatcaa

SEQ ID NO: 234387 - DNA, 629 bp, Cannabis indica
cattctacctagaacattggcgactatagtaaacaggaaaggagagagttggtctccttgtccaagtcctcgggaaccttgaaactttccccttagttttccattaatgagaatcgtaaaagatgttgaggagatgcatcctcgaatccatttcctccaaatctctccaaaagctatcttgcgcatacctaagtctaaaaagctccactcaactcgatcgtaggctttctcaaaatcgattttaaagactaacccacatttgcctctacttcagtaatcttctattgtttcatttgcaatcaacaccaaatccaaaattttccttccttcatcaaaggttgattgattttcttgtatggtctcccatagaactcctctaagtattagttaggacctttgtaataatcttatatacgctggtaataagactgatcagactgtaatctctgatccttcaactgttgagctttttttagaattagacagataaagatctcattgatcctacttgtgctacttgtgaatgaaacacgaccaaactaaaacaatcggcaccagctttatttccttcacaactaaaaatgacattgtgaatttcttcttcttcaaaaggtctatctaagtgactt

SEQ ID NO: 234388 - DNA, 1589 bp, Cannabis indica
aacttggtgatattgaattgaatagatattacggtaggattatcatacctagttcaagttcaatatcggtcccttccgatgcatactccactgtagacttagaattgcactcttaattacatagaacactatatagctccaatatagatacgttatgaatcatccattgtcacaatcaaaataatcaatgatcttctataaacagtctacattgagtagggacaaaattatcgttttattctttcaatgtattttatccttcaaacacttatcttcttgtaaatgatatttctgtaaactaacaaaattactgaaattagtactctactatttaatctcgtttagccaagctcaaaagaaactatcgtttcatttctaaataatcatagaagatataaatgtccatatctatgatgaatgctcccactcaattgaattatcaagttcccaatgaaagtatgaaataaaccgacaagtaagctggtaactaaaaccgagatgaacccgtaaggtcttatatgtaaaaaaaaatatgtgagagtgacacgtaggtctatgttatatagacattaggtgcagtgatttattatatatgagataatgagatatacagtacggtggcacaattatatttacagaggcgtaatgtatgaaatgtgattattataattgttcatactgtattattattctgtcttgttgggtcttggctcacgagttctctattgtgcaggcaagagtaaagcagtgtcgggtcagccatgagttcgagggtttaaagatgaattgtacatgttctagccaagctagaccacgagggttgggtcaaataggaaattgtatagaaattccattttatcgcctagatcggcctgtatatgaaataacttgtaatattttaaaaataaattttacaggatctcaaatatgtaactttaaatatattagtttaaaataaagttaatattattataaattatttatttaattaagtttaataattatttcaaatcacttggttcataaacctcaattaataggattaatttattaaaacacatggctgttatagtacatttctcttgtaaaacaattctcatataaataaaattcagctcaattgttattttgggttaaactttcatagagcttagtgcatagcaatataattttctcaaatatgactattattggctttacctttctttaattttgtttacaattacgtgttcatgcgctcatctttggtttggtagttaagttaatttaaattcagtcttttgtaacattagacaagtgatttgatttgtattgaaagaaagaaaaagaaagaagaattgaaatattcttgttataatttagagaggggatctatgaacacttcttgtgttgtttgagtgttgtaatcaatcttctaccattgatggtgtgcttgaattgaacccattctacaaggagttcgagagagatttagagcttgtttggctgtgttttcagttttcagtttttaaaattgtgtttttgaaaatgagaatagaaaacagttttttgtcattttaaaaatttaatagtgtttggcacaaattttt

SEQ ID NO: 234389 - DNA, 2153 bp, Cannabis indica
gaacatttgctaccctactaccaataaataaatgatataactcacattgctgatgtaatattttaacttcagtcatgaataaagagaatcatttctattatttaagtaattacaaagttttactctttaaaattacttaagggcatttgtgtgtgattaatcagaatttatctggaaatacatgatataatgcaaacccaccacttcaaaaaaaaaattaaaaatttgaattaaggttctcgactaaacctttttgatgaaagaggggtcgaaccgtcataacttcctgtccaaacctttttgacgagagaggggtcgaattgttataacatcctgatcaaatctttttgacgaagaagggatcaaacaactataatttttgattaaaaaccaatttgacgggaaaggaaaattaaaagttataaatgagatataactcataattggcgtataaagctgaatataaacggttcgcgcgagctaagaaagtactaaacaagacatcaagacttcttgataaaagtacttgaacctagaaaatagatagataatttaactattcatacgagcaatcaaaaatataccaagtgataaaatcattaaaagtatattcaagtttgcttaagacagattacaactgccatagcgtggcagatttgacaactgctcgaaaatcaaaagtttggtagataactaactacttaaacaggaagattacgagcaatggaaaaacccaaaagtactttacatttgatcaaaatatagttgcttatattgtgaataaaaatgcaagcaaacacaattatattaagtttgaacgaaaaagtacaagccatttaagataagagaaaacccaagttggtttacaaacttgtctttacaaaaataccactaggggcaaaccattaagtcatcttcctaaacaaagaatgcaaaggggtgttgataaactccagaaagaccgtctacatatatctcggagaaagaccgtctacacatagctcgagaaagaccgtctatacatagaaggtctcgacccctgcatagacctcattcttcacatcagaggatcccatttcctgcagtcgagacctcattcccagcctcgggaaatttctcaataccaaagagaggttggcacaaaggtcttcttgtgcaagcttggttcttgggctggttgggttctttagtagaatccgaaaccacggcaaccaggactaccttcttcctggattccttgcccgcctaaggaggacttgtaaaatcgctctcaaaatttgtgtccattcttgtggagacagagatgaaggatcaatggagcaacaaataataataataatatgcatgatccggctcaaaccaccattcactaaggatgatacttaccctcaaaaatctcttttaaaaattgcccgtaacgatcaacaacatttactcggtttggattgattggaagctcctcagtgttgaaatccttcgtttccaatccaaattgaggttagaagttcttgaaaacgtacagagaagaaaggcgattgatgtattctggtgttatgaatttggagggataagtttctaaacttagatgggacatcttagcaaaagaatgacaatccaatctcaagatgatattcaccaaagaaatcaaaaatatgtggaatatggcatgcttaagccaccattttatactcaagatccagtaacaagaagcccaaagattgggaaatctaacggttagaagtgacacaaaagatgaaaagaaggttcataatgaccctcaaaaccatacaaccgtcaaaaccaaaggacgcattttttcaaaaagagattatgacgaaaataccctctataattattaaaaagcactttttataaataaaaaaaaagaactttttaagggacaattgttatacccaaaattcagctaccatttcagtggaggacacgtgtcaagataaatggaataaggatctacgtgatcacttttaatagaataactcattaattgcgtaaatagtagagtgtacgagctcgttgactacaaggtcttatgcgaggaaaagatatgcaaactgttgtttcgtgtattaatttgacaccatatgttattggatgcataaagcgagacatcaacttcgtttcacctaggaaga

SEQ ID NO: 234390 - DNA, 1166 bp, Cannabis indica
ttgatttggttcatatggacatttgggatccttttcacataactagtgtagaaggttataaatattttctcaccatagttgatgataaatcaaggttcacttggatctacgtgcttaataacaaatcgaatgtccaaaacataatccccaatttctttaatatgatttttactcaattctcaatgtctattaaagcaattcgatcagaaaatacaaaagaattgaacttacaatctttctttgcctcaaaaggcattattaattaccactcttgtgtggaaagaccacaacaaaattcagttgtggaaagaaaacatcaacatatactcaatatagcccgagcactaggtttccaatccaacttacccttggtttattggtcttatctagttcaaacggctacatatctaatgaatagaacaccttccaaattttaaaggtttaacctcatatcaaattctacatggtacaactcccaaatatgatcacctaagaagttttgggtgtttagcctatggctccacccttatttccaaaagatacaaattcacacctaggagtagggcctctatttttattggttaccctcacgatatgaaaacctatatacttcttgacattgaaaccaaacaagtttatatttcaagagatgttgtcttccatgaaaatatttttcctttattttcaccaacatctccatctgaagtgaaaaacctgtttgatgacattgtccttcttacattcaaacccatacatcaacaggttcatacaattaaacctgtaaatgagtcatccaacttatctggtttcacaccagcaactgactcctccaatttatctggtttcacaccagattcatctactcatcatacacaacttcaaccactccaaagtggctctgacatactgatttccacaccagaaatcaacccaaatcaattttcagatactggtagcatatcagcaccagtacctacacccaattctcaatctaaaaatgcagcttctactcctgtagccatttccaaaaatctcttgaacactggcagcacaccagcaccagtaactcacatttcttctcaaccaccaactacagcttccacatccgaagctactatagcaagttgtcaacaacaggccgccataacagcagccccaacaccatt

SEQ ID NO: 234391 - DNA, 1226 bp, Cannabis indica
tttcaactcaccatttgaatggaccacgagttcaaggagaacccagaatctgggaatcagtcatgaagggcctagaatgaaaaatggcaggccttttcataatccagttgctgagaatggcgcacgtgatccaacaaagtacatacccattgtcaaattagaaaaacgccatctcaagcgccgcttggaggaggcaaactggcttaatgctgagttggagcgtgaggcaactgcgaccagggaagaacaagggaataatacgcaaaatcaacctgaccctagagagaggaccacgaggtagacctcgagactcacgaaccagtgggtaggagacagctcaaggaaaccccaagaatgctcagaaaagacaacatggggaaactgggaatcccttgaagacaagcagccaaattatcaaccaggaaccaaggaacaggaaattcctcatagaaataagccaaatcctaggacacaacgtggagcacgcgggtcattagtgaggaatttccaacgttcttcccaaactcataaggaaggagctcacacaaatcccggtgggggaacgagacgacccacacctaagggagaagaacgtggtgtgaacaggcgagtgttacctcaaggcacacaaggtaaccacgagtcgatcaatgcgagaaggagaaatactcgtcgcaacaatgatcaagaaggcataggtacaagcaaggatgcaagtcactcgagggcgaggtccatgagcaggatacggtctacgagtggaacgagatctgccagcaatcatagccaactggacctacgagaacacttgaacttaaaaaacctgatcttcaccaacaacttggtccaaagcaaggggatctgatccaattgcgaatgcactgttaggtgaaccattacgttgaaaaaagaaggtgggaaaaattattccaaataacacaaagcttctataatttctaacttgagattttgtaactttgccacatcaacaactttactgctaagagattttaagaacaaacacaactttgtaattgcatttcgaacttttatatgcaacatagaacagaaactcactggtagaatgtgttgaatcaatatatgatgatcaggagatttcagaccactcaaaattattttgttcatatctaccttatcaaagacatttgaggagtacccttcaggtactttaacctgggagatagaactgttggagattattttac

SEQ ID NO: 234392 - DNA, 833 bp, Cannabis indica
caaatttaattttttaaaaatacaattttaatatttcaaaactataaaaatatatttttttacaaaaaaaaaaaacaaaaaatttaagaaaacaacgagaagttaatctcacgacaattataaatcaattataataaactataaaacaacaaaaaattaacaaaaaaaaccaatctcataccaactaatatataaattataaaacaattaaaaaaaatctcgagtagtttattatttttattaaagaacatatatttttctaaataaaaaaaaatccaaacggtaaaaataaaaattctttcgtgttatcaatttttttataatttgtttttcaaaattttcctttactatgtaaaaaaaattaaattatatatataaatttttagttgcaatacacatatcagtgaataatgaaaatgctagaagtgactactttaatagaacttttactagaatttctaattttgcacttgattagaaataaaaaaaaaaaaaaaagacaaaactagaaatctataaaaaaatctaaaaattcaaaaaaaaaaaatcaaaaatttataaaagaacaaatttatattcttttatattttatgttttgttttgaattgcgtccaataggatttgaatctatactaaaagtttagaagacctctgtcttatccattagataagtggacgctttttattttattttttattttttatttttcttgttcgtaaaaaatgaatataggacagggttgcacgttgctttctaccacatcgttttaaacgaagttttatcataacattcttttagtttgaaagctataaattataatattttactaatt

SEQ ID NO: 234393 - DNA, 743 bp, Cannabis indica
atacttgtgagtagatctaagttcccggtaaaatatatatccaacacttaattcctcccgaagtaaggcttaaacaaatcttctcccgaaaatatatggtcacttcctctcaaaatgagacttgaaaaagtcttctctcaaagactcacacttgttcaaagcttctcttcaacctattttaagaatattatgagatcataaaaaaaaaaaccaaaacctagctgaacactctaggtttttacaaataaaatactcttttcacaaagaaagatatgaaaatatgagactagaagagataaaatcgtttggctgctctctaggtcatatttatagaacatggcaaccctagagatagccacaaaaacgatttcacagctgtacaaaactttcttaaaaaatttcttaatttccaacatcagaatggggctctgcagtagcatatcagatttggaaaggaaactttccaaaatggatcaagatcacgaaaatcaagtttctcaaagttagataactttccataagagaatttcttctcttacaagaagtttcctaaactaaaagacaccaactgagaatgaatctttccttagaagaaaagagtaattagaggcacaaaattaatgtaataaaaataatttaaatgctaaataaaaatgcacatcaattaaaaatattttgacaactaaattgccaaaaaaagatctaacgatctccctctttgtcactttagataatcaaaatat

SEQ ID NO: 234394 - DNA, 784 bp, Cannabis indica
tcctgggaacattgtggttgatagactgtcgtccacactttgggcagagtcgcaaaacgtcttaaagagagcgacatagtctgcgaacgcggattatgtcgccctctttatgatcttttgcgactctggccaggataaaacaaccactgtatacgaattgctttgcacagaatgatatccctctgtaacaccccaaaaattatttgctataagaaatcattgaatagaatatattttctgtgttgaagagatgtgttccgccattaataggatacgacttaaatagatgttaagttgatcaaaaagaacaatcaaaaaacgtttcttccatcatgggtcatcaacaattaaaacggatcacgtttactgttttttcataaaataacttttttctataaaaaatatggataccacacaaccagctcgatcaaacgacgatgtgcattgtggtttggtatgtgagtcttcacccataaacacaaaaatgggtgaccgttagggctcaaatccaaatctcatagttgcaccttatatacactttcaatgaagtattcctatcacatattggagtcaatacactaacacacatttcactactcatatattttgtaaaattttaactagagttccaaccattcaagtgaaaaataataattacatataggaattgagaaagtaattaggatcatgaaatttgaatcggtactcgcttgtacttgtaagttgtagtaatatatactaatcttttggtctctctttacatatatcaaaatcaaaataactt

SEQ ID NO: 234395 - DNA, 903 bp, Cannabis indica
taatactctacgagagaaaggaatacgggttagacatctgaccggaatgagtcatattattctggtgcaatcaatgtaaggttttctaaactcttttgtgtttaatttcattgtattagagatattcatatttaggatgttaatgaaacatacttgttagtaaatctagatcttggtaaaataaatccaaacaactggcctcagagccatggtaatgatttactttcataaaatatgaatttaaaatgatgaatttgttaatttgttgatttcgatgtgttcatggtagtttatgtgttatttgatgatgttatatgaattaaaaaagaatcatgaaaataatttatttggattccttgcgaaaaattaagcaatttttatatttacggaactcaatttcaataaaaaatgagagagatatggtgtgttaaaattttggttcattgagtgtcgagcactcgagcaccatgcacacacagcccctcagacaaggaggatttgcacacgcatgaaggggacaaagcttgtctgaactcagtcaaacccaggcttcagacacgagtgatgctacatccgcccacgatgaccctacaacccgctgaggtttctcgcacatcccaccctgcaactttcacttgcgcgcgtgtagggaggatgtgttcacccttcttgggcagacaagtgattctccaccaaaattgcgatttttgtgatattttttcacaaatttcaaatttttgttttcaaaaccctaaatatctaaataaaatattatttttacatttaaacttaaatatcaaattttttaaattaataatatataattatttaatagattcttattaattttgatattttgaggtttaattaaaaaattaactattttatattttaaattatggt

SEQ ID NO: 234396 - DNA, 666 bp, Cannabis indica
tatttattataataacaaatacaaatatatatatataaaaataaatataaatttttacttttttttttcattttggagacaagcaggaattcaatctaaaaatcgatttattaccagtacaacgacaatggatagaacggttgatggcggtgattcaggaagacttagacgattgatgctgaaaggcctaagaatttttgtcccccactttttttttttggttaacttgtagttagatttattaacttgttaatacttggactaattttacaatatttgtgtaatatttaattgtaatttatttaattacttctatgaaacgaaattaggtatattgaccaatcataaaattaatttaccctttgaaaaaataaatatctaatttaaatttaaattaaataatataatatataaattaacaaatatataatttaaataaattaaatgaaaaaaaaatcattacatatttggcgtcagtagttatgggtgtatatgacgtcgattattttagaccttacattgtcacttggatcagcgtcggtaccgaattttgccaaaaccgacattgaaaggccttaaaaatcgcctgttaaaggtatttttgtagtagtgttagtaattaataaaagacacaagttatgagtgttttagtcttatctgtgtgac

SEQ ID NO: 234397 - DNA, 599 bp, Cannabis indica
tctttcagttatacattgtgcctatatatttactattatagaaagtcattctaaaatttaaaaatacaggtaggaaaaaatgcataaaaatctacaattttcctttacctacaaaaaaaatatttcaacattttatgtgtcattttataaccaacggtataagtttttagtgtttgttttgaaatggtgcaaacaagtttgcgtcatctccaaaccgacgcagaagataaaaaagaacagtatatatattgtgtcgggtttttgaatgaagagaattttttttggcgtcattataaaaaggaagctaataaaaaattatttgcgactatggcatatatgtcagttttctagactgacgcaaattctttaaatgtcacctaaaaattgacaaaaatacctgtttttgtagtagtagtagaaattaataaataaattgtattctgtaagacatagcatatttataacttaaatatagattagaaactataggataagagataccaaatataagatatgattctttcaaaaactatggaagaggtttcaatggttacattttcattgtaacattatatttttttaaaccattggattactat

SEQ ID NO: 234398 - DNA, 744 bp, Cannabis indica
atgatctcatctttaaaaaatcccccctaacgattgataaagtggtctcatttgctaaactcactttggatcaatggatttctgctcaacactcaccttgcaatttctctcctaacaatcacactgttagagagaaagatgagcagtggactaaaccaagtttaaacatgatcaaagttaatgtagatggtgccatcttcagtcaatcaaatagctatggattcagatgcattgttcgagatcatgaaggaaatcttattgaggcattccagttagctaaagcaggtgttgttaatcctggatttgctgaggcagtgggcattaaagagaccctaagttggataaaatctcatgggtggtgcatgctatcaagagcaaagttcatatgtattctccatatggcattgtaatccactaatcaaaactcattttatcagaattgtttaatatttcagttcattttgttaagcgatctatgaataagtggctcactttttagctagggactcttactctaaagttgattgcatgattagtaaggagtctgttcctgctaatttattgtccttacttttgaacctttaattaatggaagcttctattttcgttaaaaaaaaaaaaaaaaggttttatttaaaagaaaaaatagaaacctaaatctaaggccttaggctatacatagaaataaaatagagcttaacgtacaagcaattatttcaccacaaaattggtctctctctctct

SEQ ID NO: 234399 - DNA, 1209 bp, Cannabis indica
gctgagtcaaaattagatcggatttcgttagcgtatttttcggattctgttagcattaactccgtaaaaaaatgaaattgatacaaattaatagattcactaatccgtttacttttttaatttaaagtttaaatattatttatttttcataaaagaataaatctaaataaaaagaaaatttactaaaaacataatagggtagcttattcattattttaaaattaaactaatttacttctacttagatattttgaatttaagagaaaattaaaaaaataataaaaataggaagcaagtagattaatgtgggaattgacgttattgatttcaattgtatcaattggtctaacataacccaattcctattactaatatctattcaataacagatttattcaagtaatttatggttttctcaattatattattttcgtgataaattaaatatgtaaatgacattaaacacaaaaatcctttaagctattaaatcatataggtactctcatcatatatcgaaatttgttcatatttcattatagcatagttgacattcatttcttaaatctcgtattaaaatcataaatatttattggcatcatatattactaattttttgaaagaatatatataatcaagtgtacgtgggactatgatagataacttttagaattctctactattgcaataatttttgtgagaaaatgtgtatgaatgagagaaataataataataaaaaaataatattttagaatgatttgtatattttgacaactatgaatgttgcccctattagagtggaggttgcccatggagttgtttttactacataagcaatgtaatcatcatttttaatgtaattttatcaacaccgttatctatattcgacaacaatcatgtgacattattttatttttatcttttttttttcaaaaagattactgtatggtattattctatagtatttaataaaatttaatcatttaaataatgaaatgtgagatcatagcaggtaacttttaaagttgtcaatcattagagtgatttttatacgaaaaattgtcaaattttacgtgaatgaaaaaaaaaatttaaaaataatatgtccacttttgacaactataaatattgtcttagttaaaaaaacccctaaaaaattagctataacataactcgaccaaactgatcaatatacaccctaggctcttagta

SEQ ID NO: 234400 - DNA, 745 bp, Cannabis indica
agaggcacgaaaatgtagtgccaatgttccccttttaaaaaccctaaattgtttttcatcttcccatttcttcttcttcttatttctcctaccctctccgcctccatcagaccaaaacaacctcctgccttctgaaacccacccataatctgaaaaataaccgcatcccaactccaaaataaaccccccgtccttaaaatcggtaccccgaattttaaaaagattatatttgttccgtaaattcaaaacccatccaaataccataacaaaaatttgtttggtgggtggtatatatctccattccaggttttcggacatttaaagctacgttctcgtccatcagcttcgatctcaggatggaactttctctaatttgttgtacttcatcattttacggtaagagcagatcttggttaagccatctccttgtatttacactctttttcttttcgatttaagtattgtatattacatgtcatactccttttcttttatttgatttaaatatctcttactgcccttatggaaataagtatatataatgattaattttatttttctgttttggatttataggtttgatcatattggtacacagtataaaaacagggtttggattgaaaagtggctgaaaatggagttggggttcactattcacaaaggtaaatctttatgatgggtatatgatttttttaaaactttattttggtattttcggtttcaaatttgtgtgcaataatgagta

SEQ ID NO: 234401 - DNA, 841 bp, Cannabis indica
ctggaatgtccattcaaaaccccagtaccctagtaattcaagctcgaatggtaaaagatctaacaacaacaacagacaaggcaatgggagatagggaaagtttgtaggcaaagccgaacagaccccaagagagaattcgtccaaatttactgctttctctgtcttgactgaaaatttggagaccatctatatggctactcagtcagtagttccgtaagagaaacctactcgcatgaaaaaggacataagtaagtgggacatatccaagttttactgttttcatggatattatggccatgacaccaatgaatgctacaatctgaagcgagaaattgaattcttgatatgaaaaaataactcgcatgtacaaaaatatgtcaaggctgaccagagtcagagggccgcccaggtagaaaataaccaagatgtattactgcctccaccaatagacgggcattcgcaagtcatcatcggggcccacatatagctggagatttgggcaaagctcgggaaaggtatgcccaaaccttacaacacgagcaaaaagaagtggtcctagccgtagaagagaggaagccaaaagtaccacgggtgggggaacccactataacattcagtgaagaagatgctgtcaaagttcgcttaccgcacaatgatccattagttgtggaagtacagatagctaataaaacagtggcccgaactatgatagacaatggagcctcaacaaatatcttgtccaagacaccatatgaaaaaatagggctccaactcaaagatctgatcccatacctccagcccgtgtacgatttctccgaccaaagtgttgcacctttaggga

SEQ ID NO: 234402 - DNA, 608 bp, Cannabis indica
ttttcaaaggacaatcaatgttaattcttacccgaacacgtaagtaatccagccatacgccaatgaaattgttcggatccgccctaataaaagtccccacatagtttccaagatcccgcaccacccgttccaacataaaccccgttgacagagtgtgtatttgaactcaaaaatcaagcttattaagtgtgatggttctcgggttctgaccttgttgaacacgttcaaatattaatggcacacgatcaaaagtacaagggatcccatccatcactcgttcaatatcaacttcatggtagaattgaaagagaaacaaattgttttcaagttctttgacgtacatacctcttcccggctgccatagtgtcgccattttattctgcatagcttggaaatccacccctctatgagttaaaaatctgccaaccaacaaccacctatcgtcaatctcctgcagatcatccgctcccccttcatacactaggctgtcctcctcttcatgttcgatgttaaaccttgcatactgttcctcaatgtcgacttcctaattactcccaggctccataatcaaccaatcaaactcacacaaacacaaacaatagactttt

SEQ ID NO: 234403 - DNA, 1942 bp, Cannabis indica
aaacgatctgggaaccaagcggctaactggttagctcgttcttctggttcatgtcctgtatcgtatttccagtaggaggtctcgtccctgctcgtttggaagcttattttattagctgatttgctttaatgaaagttgcaatctttgtttcaaaaaaaaaaaaaattaagtgttggctagaggagatagtgagaaacataaagatgagatgaagaaagagaataatagatagaatagatatatagaatatttttagagcatcatattcggatcatgtttataatatattggattggcattttagatctaacacgtacctctttcatttcttttccaactttttacttttatttatatttatgtctattttaatactaaagcttcacttcacttatatacaatgtatacaatttccttttcttatttcttttcttttgtgtattattaagggctaaattatgttaactttatttgtgtgttgtagtaaaccttctaacgagacattttggtaaataaatttttaattattttggtatttaggagagtttaaatttttttatatatatatttattttaacactaaagcttcacctatacatatatttgtttttgggtatatatattattaaggactaaattgtatgtacagttaagcaatctagtaaataacggttgaaattttattttcgacactataaatttaattttaaaaaaaattaaattataagtaatactaaaataactacaacgtatatagttaataaaaaaaaaaaaaaattacttaaattttttttaaatactaaaataattaaataaataaatctactaaaatacctatttcaataaagtataatattgattttttctaatattatttttgcatgagaaaaacagatataacttatatcttgtgtgggccatgactgagtaggcttagctactagtgtatatataatataagaatttggagtattaagagaaagaaacaaattaataaattctcacaagtagagaaaagattagcaaccacacctacccaaaaccaaatagataagagcccatatatatatatatatatgaggtcctttccttttaatccatatattcaatacaatgagacatccaaatttgaagactacaaattaatgataaatatttcaacaaatatatatatgtgctcattaaattatagtaataaaataaaataatttattataagaatgtgaaaatatgtaatttagaaagtaaaatgaggtgtgtagtaaaaaaatatgggcctatttattggagtaataagagtttggattagattgtattagatatctattttttttaattagattgaattaatttagttaaatttaattgggttgaatcagttcggttcaattagatattgtccctttaaatataccatatataggaatatattttaaaattcattaatttgtgatttaattaagtagggtaatataactaatatgaataactagtattataaagttcccataacaagactagctctatctcaaagtatgaaaacttaatgatcgatatttttaagactaattataatgtaattaatattcttgtgcttattactattagtaaaatgagagacattccacaaagaaaagtaacaactcataaactcgagtaaaatgcactaatgatagagtaataatcctcttcgaaacaaaacaaatctttaaaatgttcttttgagacaatatcaatcttccaactaaatcaaattacttatttcattgattaattatctatttgtaaaatgaattacatatttataatagttacgacaatttactaatctttcatgtaacaatagtattttagaaactttacgaggattgatgatgcctccatctaattatttatatatacttttttcaataaaaaaaaaaaaaaaaaaaaaaaaaaaaca

SEQ ID NO: 234404 - DNA, 1166 bp, Cannabis indica
attatagaatcctaactttcctaaaggatcaaatgttggttccctttatgtgttaattctagtattggaaagttgcgtgcaaattcagatgagatttgaattatacttttattagtgaattaatggtactaaagaataaagaagtaattaaaagggtagaatagtaatttgaccaaaacttattacgaaccaacacatgaaaggctaataactagaattaattatatcaatggacactgcagtaaaacttagtaaatataattctataattactaagagttcaactccatatttatagtggagtaatcatgtaattaatgaacaaagattgtttggttgatgagactcaataaataatttagtttatttgagcttaaaattataggtccatggtcaccaaattgtcaccttgaaacataatcaagggaatggataaagagttgtataatattgttcgaaaaaatctgttttgaattggcgaaatagtaattatttattttttgtaataattaaataatttttcaacttaattaaataggaaaaaaataaaagttgttaagataaaatttttcaagacaaaagttgtcacaacaaaagacaccatttttattttaattcagacaaggtaggtatctgccatatagtagggtgtccttataggttttatctttttggattaattaattaattaattgattcaatcagataaatgtttgattttcaaaagtggttaaagatatttcaataagttggttgagatattccttcatgtgaaatatcagtaaccgaattcagttatagaaatttatttaaataattaaatatgatttaattaataggaatttaactactataaatagaagtctaatttgagaaattaaaagaatcttttcataatacaattttgaaattgacagaggagaaaaaggaaaattatttttctctctcaaactgttcttgctcatgtgttgagatgttaacaagaacaaattatacactttatcctaatagcccacactattccttgtgtgtcgtggatcgatttgaaagactacgtgtgagtttttaatcaacaaaaaggatacaacatacgagaagttttgaggatatcctaatagtcatcaagaggtatatattcttttctagtaaattattattttatttaa

SEQ ID NO: 234405 - DNA, 3943 bp, Cannabis indica
aaatattttacaaaaaatagtgtcttatataattattgtatatgcaaataaaaattaatattattagaaatcaatatatattatatattctcattttttaaaaatatatatataatttatctcaaaaaaaatgttatttttttgaggttaaacaatatccaatccgcacaagtatttaaatttttcaatctaattctcacaaatgtagatgtccatattttgtagattaaattaaatcagatattttgtgaacggtactacttataataggacgacaaatagttacaacataaacaattaataataatagaaaaaaacaactcctttttatgttggtccgccactaacattaacaagtagactagagccctgtatatataattatatatgcataattggctgctcaaaattgtagtgcaattaagactacaagccaaatatgaacaaaaacaagattattagagtagcagataacaaaatattaccccttaattactagataatatagcctcaaaatccgaattctcaactttaaactaactaaaattagaactaactagcttagatatgtgcccaaaaagtgctaagaaaaacttcaatcagcagatcatactatttgcactccaaatagcctaaaacctgaattggcagcagcagcagcagcagccgccttcggaatttcattgccgacttcttccatggccacttcgccatccccttccttgtcaacttcaacttgtttacaacacttgtcgaaattcaatcgaagacaggaatgtttcgctgcaccgttgatcaataatctgtcgttatcttcaaccacttcgatcatagcaaaagcatccttctcattcaaaacatttctctgctcacataagtagaaggcaatggtgtcatttgccttgagctttttttccttgacaaaccgactccaacccctagtgaagacatagctctggctgctcctccagtaacaataccgaaacttccatgacctcattgaatggtcatggaacaccacctccatgtcatcaaccgtcccatcaccgagactttccttctcctctgagtcctcttcagaaatatgaggcaaatacttgatggcgtatttcttgggaatcacaagcctgttcagcttgcctacatcgctcggtgtgagctccttttggaaaagaagttgcttaaacaacaatccacctatgttagcattacctaataagccgagagaagcagctttctcagaattttctaagcaagtattccttagaaagtcttcgaatttggcttgataagagccatctttgatcatgtttagcaaattttctgtggtgtaatgactttggaactttggctcttcaacagtagctttagtccaaggaaagttcctgtgtgaatccccgcaccgcagcctgattgccgcactgtcataggccatagcagcatcctcctccaacttgaaagtcccaagccaaatgcgctggtgattagcgtatatctgggcaccccagtgcccattttgctgcttcaccgtccctttgtattttgccgaggaaccagtctttgcacgcttgcttggagtgagcgagtgcacgctgccattggaattagctgcttccggtatcacattcaaccctccatttaaaacaatgctcgacatgacatcttccatgctgatacctatgcataaattcaaaatgaaatagcccaatattagactaaagaaacgaatcaacaacaaattaaacggaactgaaacacagatgaaacatgagtcattaagtttggcatataattgataatctacatttatagtttgatcaagttattacacaatgctcatcaatccaaaagatatataaatgttataatgttaccattaagtgagaaaaggatcatatcagatgcacttatgaaaattacattacacaataaatgaaaaccaattacgaaaatcaaaagtaataaatattttatataacgaaacagtatatatccttgcataaaccaagattaataatattcatgcaattggaatatacacaattaaattaagcatcttaattgaatatcaaacaagtatctcaaaaaccaattatacatagacaaataaagatcgactttcctttcatttagtatattaacccattttccacaagaataaaacgcttcaaaatgctaaaattcaaaattatttaaacaattaatcgaaaaacatggattattgtagcacatcaagtgcgtctataataaaatctaatgaaaaatagaggttgtgattatttttaaatttttatggtattaggtagtatacatacaaaaagataattaatataacattcaaattttttattattatgattagacttctaagttccaaataaactaaaaataccctattatattttaataacttcaagttatggaataaagaaacccctataaagcttttaaaccatgaaaaagttttgaatatattactgattatctctctaaaaccaaaaacaaaaagcagggaaaagaaaaacagtaacaagagataatcattctagaaacaatcaaaactctttccaaacaaaatcttttgcagaaaataatgcataatatatagatatatatatatatagataggtttataatcctttggcatacaatcagtccagtacttcattattgagaaattaacactactcacaatgataatatacatacaattaggtaattcctgaaagaaagactatgcaaactgtatcatccgcatacaaataataataaaccaaattatataattacaaagcaagattaaaagagcatgtaatttgtttccaagcagccaatcataaacaaaagttaattaatttaacaaaaaattttatacatagaagtgtctgtgtgagtaaatgtatattaaaactagtacattagtacttctatagtaaaagaactgatcaagattaaacaatataatacaattaaacaatattaaaatatagctagattatcaaataaatctgctcattatgttgctaataataagaccgctgattgtgttgctagaaggtagtcttgttttatgtcggattatatttttcgtgagctcaatgctcctcctgtcttaaaatctattttaatggctgaacgttattgaataaataatcagtttctattcaaaaaatagaaatagctagattataattctaggaaaaaaataaaataaaatcgctaatactcatgagaggaattattaaagaatttacaatagctgtgccaaaaaggaaaagaaaagaaaaacacaactccatactccatactttattggggttaataatccaacagagaaaaatcactgtatatgatgaactaaaatcaaataaattaagaatgttcaaaagaattcaagtaaaaggagtgagtgattacttgtgaaataatttgagttcaattacaacacaagacaaataatatatttaacatacatacaattaatatatattgtacatacatatagagttatttttacacatcttcaaagaaaaagagggaaatatatataacgaaacatacaatcaatttcttgcacggaattactcagttttctattaattatatattcaacaaattactgcacaaacacaacaaatcaaatttaataccaattaatattcgtttcagtacatatacattacagtagattgaaatagtgaaattttatgcaaatcaaatctggaaaaaaaagaaataattaacaagtattatactatacatacacacttaaaacatgcatcaaaagtaataatagaccacacataaaatcagaagatcgaaatagaagaacccaaaattgtatagaacttgaatatctaacctgctgcaaattttagaagcagaaaatattttcaacgttgcctcccaaaacactaacaagcaatgtagtgaaaacagcagc

SEQ ID NO: 234406 - DNA, 1818 bp, Cannabis indica
agatatcaatagaaagagaattttatgatgaataagactcctaaacatttaagattaaacaacgaaaaatttaacaaaaaataataacgaaattaatatgaaattgtaaaaaattaacatatacatattagttgttacataaattataggttctaaatcatatacaattggcaatctgataccacatgttagaaaaattaataataaacccaagatcaatttgtatataacatagaacacaataataatatataataattaggtatgcgtacctgattcatccatagcaattacctcaattcgatccatagcaattaccttaattcgatagtggaatactatcaactaagtcttccttcctagatctctaaatcagaagcagtttattatctaattatcaaaagtatacaattgtgatgagacaatatgtatttatagagttagggaggggacttagctagataaccctagttggactgctcatcaaaggcttcagttaactagaaaagcccacacttctagttcacatagactttacacatagatgctaagcccattaacaagtgatcaccaacaatatgggctaacacagcaaataactattcaatcaacccaagttttaataaaatcaataaaatataatgtaagcccaaataaaaagtctaacatcctctgttatgttaaattttattttgggcctttcgttttgaaaaattataaaaaggaccatgtgataattaaaatagtaaaaattgccccctttatcatatttttagttgattttttttaaaaaagagtaacagtattatttatttttaataataaatttttgaaatcatctcaaatctaatttaagctcaattaaaaaaaattgtttaaaaaaattaattggctttagcaacctgctcattcttaaatgtagttttcttagtattcctaacaacattgctagatcgtaaaacagggggtaggggtagttagaaataccgttgagtacaatcgaggcagcacacctccgatttagttgaaaggaagtagtcaaaatctgcttgtatttcctcctgaagtttgatctggtgcagagaagacctaggcgaaagtggaggtcgaaaaggtcttcttgtatatcatcttcatcctccaaaaacaccataggttcaacctcaagaacttcctcaatctgcttggtcttcctcacatcagccgtggatgtaggtcccttcttcttcatcttccgtgtgttctttgccattgaattttgcttcccctgtatttttgccctagtcttagccatggccccaatctgaaaaccagatcgcgaggagagagagaattcagggaaaaaagtccaaaaaaataaaagacctataattaattaaataaaaacttatataatttatatttttttttagaataaactatatatcatctttaatattttagatttttttttttgggatgtcccctctaggtaagttctaatttggaccatccactttaaaaatatatataaaaaggatcccttgtgttattaaaatagtaaaaattagttccttccatacaatttgtcaatatttttttaaacaattttttttttaattgagcttaaattagatttgagatgatttcaaaaaattaattattaaaataaataatactgttactctttttgaaaaaaaaaagtaatgatttcgacttcttcctttgagcaaatcggaggtgtgctgccttgattgctcaagtaattctaatattccctattttcgatctgacaatgttgttaggatctggaaactcatttaagatgagcaggttgct

SEQ ID NO: 234407 - DNA, 1277 bp, Cannabis indica
aaaactgacccataaaatgacaagactgattagttaaatggtatattatgctagtatggaagaaagggaataaaccccctgaaaccatatccattaagtgttacattgttaaggaaaagggagatgtaattaggaacatacctgcatgacttatcacaagtgatgcagacctcaaatggtctgcaatgcttgatgaaaaagtaaagtagtctaccgctaatgacccatttcctccactctgcattataaaatcagaaacctttacacaaaaatatatagtttgaaggtttttcttaatgtatgacaatcagttgagtgttttagcaacagtttaagaatataaaagatgcagtttgcagataagttgtgagtatactagcagtgaaacgataactgattttccttacatactttatctccataaacataatcttgtcattatgagtggaactctcattcaataagttatgatttataaggattatggtattattttttttttgaacaaggattatggtattattatgtttacacacttcctagttaattttcctttgtgattttacgaaggatttcctccattagctttaattaagttagaataatgaagctagcagaacgctgccagttcctataaatttcttcaaacttagaagttttcattgaagaaattagagaaaatcagtttttccttcctcttcctctaactcttgtgtatgaataactggtaaaccttgacaaaagataagaactaacaaaaaaagtttttgacactttaatgaatatctccctttttgttcaacaattcacttttagaaattgttaaatcaaccaaattacaaaagtgggataatagtttcattcaggtataaaagcataaacaattgcaacggggaaaaacagtgataccttagtggggacgtaagagccacggcccatttgaataagaaggtgagtataccctcttctaaatagttcttctttaactacttcagtgtccattgttttaacgagagcatcgaaacaagttgttcccacagtcacaaataccatcttcttcttagaatctatgcaatccatggcatctcccattttagagctgataaattttcaaaatgaaaattattaatgaatacactactctatagcaattaaagataataacattaattgacagagataagttaataaaaaattgaacatttgatacaaaaaattgaattagccaactttaatctaaggcaacattagcaaaccaatggagcaaaagcaataga

SEQ ID NO: 234408 - DNA, 1050 bp, Cannabis indica
gcagtgctcgatcttcgggatagtaggctttattttgatagttgctaagtgacaacttttgtaactaagccttttgtaaaatagttgtaactttaaaaataggatcccagattatgtaaaatattttcatattcaattttaaagtttaattaagaaaattttaattatttacgttaatctataaaccttttgattagcaaaagagcgcgcggtattaagaaatcacgataacatgcctaaactagtagggtgttacaatttggtattagagctataaggttgtcttctgaagatcgtcacgatatgatacaatcatcatcagagataagcttaactcacgattcagtaagccttttatgctttagtagtttgttttattagtatgtgataagaagcatgttagtaacttgatagctagataggcgcatgtgtttattttctcaagtgagcaataattagaatttaatcttgagcatgatctgcaaggctagctcactgtttcacaggctattctaatagaatgggcgctaggcaaagcacgagaagctaagctaattcggttggatccagtgacggtcaaggagtttagtttcctcctaatatttatggtcgaggcagaggccaaaaaggtagggcatgcagttggggtgatattaacccatcgtaggctcccgatgtgcagatgactccttcccatgtaatgcaagtggggcaagttatcctactcccgaggtgcaaatggctccttcccatgtaattgagatataaatgcaaatatatttatgaaaaatatcattgaagatcttgttcagccttgttatcctgctcagaggatttggcttcactggatggtgaggacctgctcgaacagttgcatacaggcgagcatccggataatacatactgaatgtttacacttaatcagattcacataaaactctctagatagatcgttgaaggaaaaatactcgtctagactttggaaatgctctccatgtgtcactcttattaaataccacatcatcctctttggaaattgaaataacaaaa

SEQ ID NO: 234409 - DNA, 1877 bp, Cannabis indica
ttttttttaatttttaataaaattatagggatccgattttgtcccgtgatatactttcacggaatgtatttcgtggtacattagatgggtctcggggtacattaaataagtgtcagggtacgtttctacttattaaccctaattacccttagatcaatcttaaccgtcagatcaaataactccctcatctgacggttatcgtacatcacagaatgcattccgtgaaagtacaatcacggaacaaaatcatatccctaaaattatatatagtttcatgtaactatactacatataattttgaaaaaaaaaaaaaattattttggtcccccttaatttgtttttggcattttgacaccccctaattggtgaaggtgtcgtcgttgatgagagggatggagggagaggtaccaatgatcaattgtttgatagtaaggataatatgggagggagagaaaaaattaatggagggaaagtaaatttctctaaattaaaaaaattcaatccttcccttaattaatttggaaggatcatgagaggatctatgcttaaaacatcataaagaaatactttacaattaatatttttttttcttttttaatttgtaaaaagaaatccatttaatttttgtctaatattttttcccattatatcacttctttttatatatataactattgctttaaaaaaaatagaatttgttcaagttacatacaaattttaaaattaatcatataaatacagagcaaatggtattctcactcttatgtgttcattcttccttcatccttcttaaatcataataccaaacatagcctaaaagtacttaaaacacattagaaatctaaccagctattgagttctttctgctttttttggtatggatggaaaatggtaaagatggattgatataataaggtgtggaaaaggaaaagtagtggatggatttgttgtatccttagaagtttgataattgagaagaaagaaaggtgtgctccattttttacaatccctcgaaatgagggaaaactaaattttgtgggcccttgtggatttccctttggaatccacacccccgtccttccgacaatactttctttcttccatatcaaacaaacataaaccatggatggataagcccaatccatcatatttaatccttccctccttgaatacctcctaccaaacatactgttcgtgtccaattgtgatgatcaactaatttaaagcaatgtgttgggctactaggaatctcactgtacaaaagaaggaaagaaaaaagggggggaggagacaaaattggatattcaggtcttgacaatacggatatgcaagttgtagtgggtcattttcataacagcttgctatcccatctacctagctataatgtgtatgcgtccattatcatcaacaataaatagactactactactactagtagtagtagtaattgtaattaagaaccttccctttctccccaaccccagttgacaccccctaatgtgtttggcttccaacaaaatccaattaactacgtgtcatttcttcgaaaatcaaatgtcatgaaaagacactgattagatgaattgatttgaggagaaaagttgattattcttaattgttgtaacttgtaactaaaagggtttaaggtcaatgctatatagctttaagcaataattgtagtttggcatggcacgttcacaacttcatcatcatcatcatcatcatgaatcgtgaatcgtgatatatataaagttgtaggaataatggaggtaacctatatatataagagcctacaattatatataaatagatatagatatagacatattttgggtgatggtttatcatatattaaattgtttttgcctttaattgaa

SEQ ID NO: 234410 - DNA, 1319 bp, Cannabis indica
tgttttaatttttttgcagctctagacttaggaccaattgtttgcccctgtcaagccaggagacctgaatttcagcgaatttgtaattatttcttcaagcaaggactacccacaacaacaaaatggccacgattgtggaatgtttgtaatgaagtacatggaatcactattcgaggaaaatgaaataatggaagaggtaatttaatgttgatttctttagtttaagttttcatccacttaactaattgtttataacgaaattgatgtgtcaagttacaaaattgaacaaaactaacaagttacaaaatctattttttaggcatattggtccattgtttttaacagtttccatatagtacatttaacaaaaagactattgtatatataatgaaatgatgttatgtaggaagagatgcttacctgttattgtacacatataggaaattaagtgtagggatgtcatgaatacactgaaatgttagacgattgcaatgaattattcaaagtttttgtcttccaacattttagtgttttgaatgtttgttaatttaagttattttgtcttgtgtaataggtttttacaatggtgtataaacggaagaggggtgctgttgcagagaaaaatgatgcagctaagataaaaaaaaaggattcgtgctaatattttctggttttgaaaataatatttgtaattccattcatttatttaattgatccagccaagccaatttcgaagcttatgctgatgcacataaagataaatcaaaagcagatgtgagtgacttggagtgtgtgatggatcttttattttttatcttttatttagcgtactttacttaataattgagagtcttaatattgcaggtccttgatagttttaaggagcaatttaagctgcttagtgaggaagagattgagaagtgggcttcatatgaagtcgaggcttccccctcgaaggttggtgttagagggaaagggaagaagttaaaggagacattatctgctgagccagggattgagaacaatgaaggggtaggggatgttcaagtttctggccgttgctccttcgaacgtttgggtagaatagtcccacttctcaacgacgctaaaaaagaaatggtcagaaatgccggtttctctacattcttaagggaggatgccccgtacatcgatgctaagatagttagttggctcatcgatcacgtggatccaaccacttctcggctggagatatttggaagaacgatccaactatcgtcgaagctgtttgaggatgtcatgggaatcagggatgggggagaacccgtggcaaccgaaag

SEQ ID NO: 234411 - DNA, 660 bp, Cannabis indica
acctaatacgacgttccaaaagaactttagaaaaaattacaccagtgtctattctaattttatttaaaatgattgtcatagctaccaaaagaaaaaaataagaaatctacaatatgtgatctcatttttattgagaaattaaaatggataatattttgtttggaaaaatactcgtggttcagagaatcataatcatcatagtcattcaacaatcactaataagcaaaggcgaaaccatgtatagccaagaggtggtcatagccccctaacaatatacatgtgcaaaaattgcatatatatacagtttggtttaaaaaatagtctaaactgccaccgcaaatatcaatattgattacttaaaaaaaatggttaaaaattaagctcagattcttgtttataatattttaaaaaataaaaggtctattttaccatttaataaaataaaaagtccaattaataatttttaaaaaataaataatctaaaatgatattaacctaaaatatacaaaaaaattattttaatagataatatttatatatgtatagaaaattgatagtatatatactctaaaaaggttattttggtatatcttttatttgttttgatatccgaatagatatgttctttttatatattattgtgtattttctatttattta

SEQ ID NO: 234412 - DNA, 622 bp, Cannabis indica
agtacaataatgccatggaagaaaaaaaatctaaattacaaaaacacaacaaatatctcacagccaacccatcatattgcttgtgccaatatatcactaatgatgctaactaaattataaatagaagccaaaatataaaggtacatgatatacatgcttttggtgctacccacacaaataaatagtcaactcaaagctacatgaaatatatgaggtatatatactattaaatcaaacaagcattatgtcttcacaagaagaaaaaattccataaactacatcactcccacgtgacatccatcccaaaacaccaaccaattctactagtatttggtaatgaggtgatttgacacaatgcattaacttgtagtatactctaagtgcccatctcatacatgcttccttccattcaaacataaagggacactcatcccaactaaacacatgtatatgattcccaaaaaatgacaagagaaaggtctatgaataggaaaaaagtctatgatgagagattactgtttgacacacacatatatatatatgtgtgaaatacctctttgactacaatactctacaaccaactttctataatcaatctattatattattcattcacatcaag

SEQ ID NO: 234413 - DNA, 788 bp, Cannabis indica
ttctatttttaatactaaaaatatagaggaaagttgttttttgctccattcttcatattctctatcatttctatattttccttccatccttcgaaccaaacataccttaagatgaggtgagtggagggagagatcgggggcagaatgacgggagaagataacgattgctcttgtttgacaagagagattggaagaaggaagagataattggatggataacaaatccttctaaaatcttaattttagagtctttccacttatagaaagatcatacactccctcttcaatggttggaaacaattatactcttttaatatggtattcataaagatatttaaaaatacaatataataatttcataaataaatattctttattctttcaccactacactatttctaccaaacaatttaaaatgattattactttactcttattttctcttattctacatctttcatcaactctacatttcttctaccaaacataacctaagaccaaaattaattagcaaagagatgagagaccaaacctaacaaacaaattcaacaaaataaccttattaattaataggaggttgtagaattggactgaaaaaagattaataaatttatttgtttattattattgttattgtaaaatagaatgcattaaacatgttcatatagaataaaagcgtggagagtaggggttgaaacttctgttaagaatatttatttaagaaatagaatagaaaatgtcaagtctctctttagttcacgaatcttacacatgaaaaaagaacactt

SEQ ID NO: 234414 - DNA, 1264 bp, Cannabis indica
tcattagtaagctttgaaacactaaccaaatttttagtgatagtaggaatttgtaaaacagaatcaagatttaaagaacaagatttggaagaaagagtagctttaccaatgttagaaataatcagtttcttaccattagccacagctacggtttcttggccagaataaggaatgatagattcaagattatcagtagactgagcaatatgatttgttgcaccagtatccacataccagccttcatcatcaccaaaatccggaactgtttgagcaagaaatgcttgaggatcataatcgatggtgtgttcagcaaggtttgcttggggctgagggtggggagcttttggagtgacccaatttctgtcatatcgtatagtgacaagtagctgctgtgtgtccaaacctcatacacacttgacacaaaggcctgttgttattgactagatctgaatccatagccaacgattaccagtttttccagcattatccgtatgttgaccctttccagtattgtgataatgtctgttacccccagttcttgatcccaaagtaaggtttgcagccattttcgtagagatgtccaaaaccgtggtgtgtctttcaagtcttgattcatgggacatcaagagagcttgaacttcttccagagacaagtttttcacttcgagaggtaatactagacaccacagaatcaaactcgggaccaagcccattaagcaagtgcaggattaaatcaaaatcattaactggatgtccagcaatggctaaagaatcacatacaaacttaattttgtcaacataatctgaaattgacagattacctttctgtagattggttagttgacatttaagttgaagtaatcttgccttagattggctagcaaacttctgttcaagtgccttccaaacagagcgcgaagtggagtagcatgcaacagtggccaagattccctctgtcattgaggatcggagccaggacaacaacaattgatccttgcgacgccattgcagatacaaaggattgtcgttgccaattatgagtttatcaggaggagctgaatcgctgagaagcaattcatcaagatcatgaccgatcaccgtgggtatgacctgcgatttccatgaaagaaagtttgagcgatcaagcttcaaagtcagagaagcagtgagagaatttgagaagggattccaattctgtgccatcgaggaggactgagccggcacactgacaggatcggaagctccagcttgagacgagtggtca

SEQ ID NO: 234415 - DNA, 1496 bp, Cannabis indica
aaaagttgaatatgaaaaaatttcaaaaatgggggaaaacaaaaaaaaaccgaaaacaaacctgcgatcgaagaggagcaccatcctaatcatttttttgagcaggagcatgagaaattttttcatgggcagcaacctttgatttctttttaggaggagctcgctcacgtttcgacaattgaggagcaaaatcggagtcatcgtcttgaacaacaggacgtttgcccttattcctattagctatagatttcaaccctattttagaagtacttttctttggcacaggggaaggagaagagttcagctatgtaataaagtgtgtattttgtatttttggtgtgaaaatttcataaaataattaggtatatatatttacatatgatctataataattattgtaatttaatagtgcaatactaccaattaagtacttttcctaattaactacttttccttatatcactaaaaataaacagaatcagttttatttatctgattatcaaaagtacacaattgtgataagaccgtatatatatttatagagtagggagggaacctaactacataaccctagttgcactaagtttactcagcaaatacttcagtcaactacaaaagctcacaactttaactagactttacacattcaaatgctaagtccattaactattgatcactaacaatatgactaataacacaataaaaaattatccaatcaatctatattttattaaaaccaataagattaaattatttcttacgacactgatcctctcatgttttatgaaacacattattgtaagttattatttatatatagctggtaattatctagttagctttttctccatgagagtcatgtgtatcaatacgattaaatatatatatatatatttcaaactaaaaataatgaagttcgagtatgaaagatttagtctcagcatattattatatttaggtttactatatactgatatacatataaaagtttttatatatatgtgtcaaagtgaaaaatttttcttatccatattatagcgggctatattgaattgacgatctgttcgatactttcctatttttgtttttgctgcattgtttttgtttttctgccataaaattatggtcactactaccaagtccaatcacaagataataaaaaacctttattaaaagcaagagaagaactcataaataaataaaacacaaagacataaggaaaaatgcccaatataaagggaataattattgatctcaatagctagagtactaaaccaacaacaacaaatgccccaaaggcactttttattataattactaattaacaaaccacaccatacctgaccagctagctagtacatgtcttaacatagagccatatggccgctatgcaccaatatataagaacaataataagaaacataaaacacgtacgtaattcttttattataataagatttaagagtaggtatgtaggtagtagagtactaataagt

SEQ ID NO: 234416 - DNA, 1154 bp, Cannabis indica
tttaccttttaaaaaaataaatatctaatttaaatttaaattaaataatataatatataaattaataaatatacaattcaaataaattaaattaaattaaataaactgaaaaaaaataatcattagatatttgttattgattgttatgggtgtatatgacgtcggttattggttaggaaccgatgccatatgtacccctatagcgtcggttcttagaaaataaccgatgctatagaggtacgtatggcgttagatattttagaccgtatatcgtcacttggatcagcgtcagttgcaaattttgctaaaatcgatgctgaacggccttaaaaaccgtctcttaaaggtatttttgtagtagtgagcactttatatattgtatgtaataaaaaaaaaaaaaaatttatatagttaattaagtacagagaaataccaataatgtatacagcatggaataagaccaatcatttataaattttttaattttacttaataataatttaacctaaattaattaaaaaaaaaaaagccatatagaacatacaattataaaaataaatgacacaaagggtttaaaaacaaacaattctcatacatagttaattaaagtacacatgacatgataatcatattctaacttgacaaaagagagaggaactctttatcaacttccaatttggccatttcatgtggactaaagcaagcatatgcctctattttgtcacattttttgttatctaaaaatccaaatatattaccataacacctatcagccgaacttacccaaataggctcaccatatccaaagtcagcatcataaagaggaaacctacacaaactactaaaggcaagagcaaccccttctcctttaagggatctctcaatagccatcataagagattcaaagtactcatctgatttctcaactctttgaagatcatttactaactttttatcaatctttcttaactcatcacctatcagcctcgccacctcgtaacacttctcattattattatcttcctcagtattgtaattgatggacgaaagtgatgtaacattagcaaaatagtagttgccgaatgagttttcgggcaatggcttatcaaacttggaacgaatattcacagggtgatagatagttaataattcgc

SEQ ID NO: 234417 - DNA, 801 bp, Cannabis indica
gttaattttcaccgttagatcattttcaacggtcaaaaatatcttatttgtattttccccctatttttcacatccagaaaaattctcacaaagtcaaagcttttctctccagtttctctctctagaaattggagcttctgacacttagtctttttctggaattaccatctcgtgataaataaattctcgaagtaaatgaagctccattactgtcgctatacatggagtgaactactataattttgttgtctctctcttaaaatacttaactactttttcattgcatcatcccagcgagcgggtgtgggttaaaagtctagtctagatttatgagtcaatattttggtgctttcattgaaagcaaaactcaagaaagttactaacaagatggttgcaacaattttgactgttgctgcttacactgttgataggtcttttcctacttgcattgttcttggcaacaactttacgatactggtaattaatctaataagactaaaagagtgtgttttctggcgatactgtatttttgagttctaaatttcttatttatttatttattttatctttttgtcaattttgtatggttacaattttgttttttagggttaagcaatgtttagagaaaaaaaagttggttttactgggttggtgaatccagacaacccaggattccgccccactttatttgggtaattggattattttctcttaattaagcttattttgatttatgagacattttactttattagattactatcatttctttgctaacggttcttgttgtgcttagttcta

SEQ ID NO: 234418 - DNA, 1521 bp, Cannabis indica
ttagtgtaattaagtaatgagttccatatactttaagaaaataaattttaagaattattactaactaattataaagtgtcaataaaaattattagacatcagtgatacttagcacctttctatatcgttaagcaaaaaaaaatatttttctatatcactaattaatcgtaaaacaatctatttaaaaatattaaacatcattactaataaataaaatatttggagggaaagaaaacaattaaaaaaggttggtggtgatctggcagtaataataattattatacgcggcaatgaatttcacgtgtccgcactatccatcctcctcattttattttttttcctaactttatttgatttatttatttatgaaattcttctttattctttttgtatagatttaatacactaaaatttcaaatagattaataatgcagcagcgggaccatatataattagaaaatcagtttctaattattaatttatattttagttcaacaaaatattgatttatcaaacattataaaaaatattcttagccaaaaaaaatttattacaaaaatattaatgaatataatttattagttcaaaaacaaaattcacttaatcaataaatcaataattacactaatttcaaagatcaaatcactgtgtggtacaggccatttccgtccaataaatttgtgtaatgttatttacaagctcatctaaaaaatggtggtgttaagatttaaggaagcactccaactgataatctttgaaacacaaagcgtttttctctctaatagactcatagctgacaatatttttgtcgcctttgaacttgtacaccacatccaacacaaggggtgctaaaagttactcgactctcaaattggatatgagtaaagtatttgaacaagtagagtgggcttatctttgggcaattatgaaaaaaatagactttgatagcaaatggatagctttgattcaacattgtttgtcatctacaagattatctttctcactcaatggtgaagttattggttatgtcaagtcaactagagaacttaggtagagggaccctctttccccttatctcatcttgatttgctcaaaagaactttcaagatactataaaatgcaataggtaatcttcaaagtttacgtcttactagaagaaaaccttcagtctcacacttactttttgttgatgatagcttgttattttgtgagatcacaaatacatttgctttggcaattaaacgagctttagacatatatcactaagcttcaggacaaatgcttaaaaatcaaaaatcgattatgcctttctctcaaaaaaactccaattacaacgtaagactttttcaatcagattttaaatatgataactagtgagtgccctgatcgttatcttgaattgtcttcttattcaggccaagacaagaaggagttattcagtaacatcaaagagcatgttcagaagttgatgcttacttggagcgaaaaattgttctatattggtggaaaagaggttttact

SEQ ID NO: 234419 - DNA, 1924 bp, Cannabis indica
ttaattttttttgcacattttatgtaattaattaagaaaatgtatacatttatgtaaaatgcccattattgaattagctacgattttttgaagtttgaataaaaatatctaaactgaggcaacacatgcgcgagcggattggagttgcacctcggtcaagaccgaggtttagacaacctcgtgattgaggtttctcggacaagatctacccgaagcagcctcacactaagccagctcggtcaagtaggttgttgcaccatttttgtgatatttcaagttttaaaatacggttttcaatgaaacaaaattcaaattttagtataattttgtgtagaacctgaattttcaaataaaaatctaattatcagattaaaattaattataagctactatagtttgagacttattattgattattttactagaaaaatgaataattctactgatataaaatcacaaaggccaatattataaaatataaaccattgagtaattcccttccaaaattgctaatactcgacaatattaatcatttttattacacaaaaattagccaagtacaacataaaatacagaccactgtgagacaacttcgtcaaaaaactgatgttgtttcacaaaagttgtatgaggaagagtaacataagttttatgagattttgactcaaaaagaagtatttggaagcaaaggaaaaatcagttttggttgaaagagggtgataaaaataatcgttatttcatgcagtggcgagtgctcgtaaaaggacaaatcatatttctaagctacaagatgagaatggtgcttgatttacatgggatgatggtcttcctcagttagtacaggagtatttccaagatctttttattgtcttggatgccgagtagggtaattgttgaaattttatgccctaaataaaactcatttcaatataatcagatttactaattaataaaagatcagaaatcatttaatgttacatgattcacatgatttatttcatgattatatgtttaatgtataaattctataaatctagaacatatagttattcatgattatagtgttgtctacatagtggaacataatcatgattatatgtttcaaaagtttatgtcccatgatttggaacataatcagagataaagtttacttactcattggataagtgttatgttctttccagaacattggtaaagtatgctagtatcggatgtatggagtatacatcggactggaccgatattgaacttgcaaaagatattataaacttaccgttgtatctttctaaatcaatatcacttagttgatcttagatcaaaagatcttaatcatgatatggttatgttctatcttaagagtattatttgtgctattagagttgttcgttaaagttgaccaattcgatcgatctaatacttacatcttgggaacatggtagcataattgagtgagagcgctaatcataaatatagaatctatagcttctatctagacatagaagtgaaatgatgattttcttttagcttggcttaatagagataaatggaagagctcttacactactacaaaattgggttttagctagtgacactctttagtgacccgcactaaaaggttaatgatgagttttagtgacacgcacaaaatgactctacaaattcagtgttagcatcttataatgcgtgtcactaaaaatatgaggtgtcactaaagagtaactccaaaaattatattattttttttaaaaaaaatatattggtctatagtgacacactaggtgcgactaggtaagtgtgtcccgacccacttggcgtgtcactgtatccaaatttattttttttaaatacaactgtaaacaaaattaaaaaaatatatatatttaatataataataataaaagtcacgcttatctgtctttctcaa

SEQ ID NO: 234420 - DNA, 1373 bp, Cannabis indica
aaaagtatgcactaatctacttcctatttgttttggtatacaggataattttttagtttaatttttttatgatcgggtatgtatattaaacattttgtaaaaattttaaaatattcataaaagttaaacacactgtaaatagggttcaaacaatctgttgtacatttaattattttattttttatacgtgtgaaatagattgttcgaacattacgttttatatattgtaaattattttaaatttctaaaaattttataagatgatttaaatagttataatgtatacgaccatgaaaaatttgactaaaaatctttttttagtgcgaaaacaatacgggatgcatctctacactcaatattatatacatgtaacaaatttaaactaggggtggacataatttaatccaatccaattgaattgaattaatccaattcaatcaaattacaaaaaaattggatatccaattaaaattggatattggattggatattaaaagttatattttaattggattagatcggttattagatgtgaatatcaaaatctaattaaaaatcgatccaatccaattacatctaatacatattaaaaattatttatatataataaaaaaaaattgatttgttgttttgtgtgtttactttcatgatattttgttctattttattagtttgtagtattgttttagttatttcaaacttttgatatagcattaaacttataaggatgatacatttatatagtattaaacttgtaaggataatatctatagcttttattgtattttttttctttcatattttttagataatattaaaaattaggtgtgaaatttaatatccaattaaaaatcgatctaatccaattactaattagatttgattgggttgaattaaattttgaggtctaattaaattagatcggatgataattttccaaatcttattactaagtagattaaaaaattattgaattaaattggatgtcggactctaatttcaattatattatagatacatatattagtgcactaattctatatttaatatttaatggaattaacaaaatagagcatttttaaattgatattagtataaaggctagacacacattttctattttttttccttttcataaattagtaaatttttgtacaattaaattcagtaccattcttgataaaaaaagaaaaaaaaacttgagtatccttaccacgttattaaagcaccactcacgttctattttattagtttaaattcttgattcatattttaatctattgtataaatattagcaatcactctatatattattttttatttttacggtttggttattccggtggttatctgatttaaatacgtataaagtt

SEQ ID NO: 234421 - DNA, 1701 bp, Cannabis indica
gccttaactcagaggttcttcccacaaaccaaaactctagagtagggacagggtcggccctgagcataggtgagctaggcctgtgcctaggacccatctagctcaagggaccaaaaaaaaatttatctctttctaaaattacagatattttttgtttattttatttttaaaaatatcatattttttttttttccaaatgagggtcaaaaaaaatttttttttccctatgactcactaaatttcagggccggccctgagtaggggtccaaattaacgatgacgttcaagctaatgcaaaaaagtttaatcaccctggagtcaaaccctcacaactaggaaacaaaagaaaagttgtagctgggaggctcgagaagaaaaatctcccaaaggcctgcacgtggtaatccaaacctctagaaaggaaggtttgaccaaacctcagaggaataaaaatcttttgtctcaaaactctctgtccctctcatcaaatgaggacacgtattaattttttttagggtaaatagtggcattagtacctaaagttttgggtttgtaagcggcataaacccaatgattttttttagtcggcacaagtacccaatgtttataaaactagtaattttctttgagtttcatcggtacagactctgttattgtcttaaacaggacacatgtaagactcaaattctagattatttggtctggacgaaaatatgtagtatcagttacatccaattttttttttaataaacataaacggagcctgtacttacgaaaatagagaaaaattacagttttacaaacattgggtacttatgccactaaaaaaaatcattgagtttatgctacttacaaactcaaaactttaggtacttatgccgctatttacgtttttttataaactcacgtgatgattaaaagacaaaactttgattaaccacatctacactctgttatttttttactttaccaattcaacaatttattatttcaaacattaaatttaatactaaaatttaaaaattatatttgaaacacttattaatcaatcttattaaattaatacaaacatttctttattaaaaaataattaatacccttagaaaaattataaaataataaatttattctctgatacataatgaattaaattattttgtaaaagaatattattttaaaaactcaatttgtcaaatcatttatatttcgctattttctgtatattttaattaaactaatatagtaatgtgagattgtgaattgacataaattagaggaatgtataaataaaagtttttaggctgacttgaatactgcagtgcagactgcaataccagccgatgtaaccttttttttctgcaggagagaaaattaatatttatattatttttcccattattaaaaacatagaaacaaaaagaatttttaacttatataaccattagtctaacacagtgttgtattacttaagtaaaattaacggagcgtcaaacagtggtggttaaccaaaaggttatttttaatcatcacgcgagtttttaaaaaaattgatacgtgtcgtcatttgataagagggacagagaggagacagagagttttgagagagaagatttttattcacctcagagaaaagtcaccaaccaatccataaatagggccccacatggcaacaagacctgtcttcatcttcaggcactagga

SEQ ID NO: 234422 - DNA, 979 bp, Cannabis indica
ctgcactcctcaaccgtcagtgcatgatttaaggaacaattttgaagaggaatttaatgcctcagatactaaagagactctaaatcaaagtcacatcggatcaacttcaacagtcaggacacgcgtcacccatttggacaagcttccaagctgaatgaagtccacatgtgaccaagaaggtcccacgcacacttcgggggaaaatgttatcttattttttctactcttatgtggcatctacttcgatgacacgtgtcttgcattttccaccttgggtagatggttttactcctagcaacccacaagaattgatatgaaggtccaagttgtacatacataacaggatgtctggatagagtcatcaaaggacatccgactagctcgattgtgtgatcaactctcatgcactagccaagaaatgtgagttgtcaatttcaacagtgatcgatgatatctctaagcttgcatgacccgaagtaatctgtactttcatgagattgattcgtaccttcagagaataaaggcaatcagcctgaacttgcccaattcttttattgtaattatggaaacatattaatttcctatttatttcttatacattaagggaaaccattcctatataatgagcccctataaaatggtaatctcacctcactattgcgggacacgaattgtattagagagaacactcaagagagaaatagtgatctaagagagaattacttaaagatccattgtcagagctttagagagagaatacgttgttctttgtctcataagttaatacaatctacaggggagtggactattaccactatcacagggttgaacctctaaaaattctggtattttttttatttacagttctttgctttctattatttattttatctaatcgctttaattaagactcaatgttcttacctagaagcaaggttaacaatatagtagaccagaaattggaacgaagagaaaagag

SEQ ID NO: 234423 - DNA, 1066 bp, Cannabis indica
atagtgtaagttttttttaaaaaatataggagttattatttttttcttgttttctaaatgaagttgttttgacgttattgctacaagaaagaaatgtgattttgttttacaacaatacaaagttgttagtttttttttattatttcataataatgttgtttcgacgttgctactacctacgggaaaacagaatgaaagtaatgtttttctcttaaaaaaacaagtagaaacctgtaaaccaaaatctgtaaaaacgtaaataaataataaaaatatgcgtaaaaatataaaaaaaaaaaatcaattttaagtatatctaaatttccctaatttgtagtgtatttagtaatactcctattccaccatatccaaagtattatattttatatgtatatatatactaggttaatattacgtacttaattaattatatttttagtttttatttttgttaaatatatttttagttgtataatttatttttttggatgttattcaataaacatcattatttttagtgaaaaatatttaatttaagtgctatttataaaaagaacataatattgagtaaatactattttggatcatgtgttttgtaaaagttacatattggactatgttttgttaaatgacaatttggaccctaagctttttaaaatagtacaaattaaatagactctgaactcaatatttgttatttttttaatataaccaagttgaaactaattttaagcacgaatagatgcaagaaaaaaaaaatgaaatcatatttgtcataatacctctaggtgaagttattattaagttttaatttgacgaaaattaagttcaggatctattttatactattttaaaaaatacaaggtctaaattgtcatttaacaaaatagaaggtctaatcagtaacttttgcgaaacatatagtccaaaatagtatttacccaataatatttaaaatttcttgttagttataattttagtttaaacataatacttttaattctataatacttttcatttttttttaaaaaaacatcttacagtttttctatttttttaaataata

SEQ ID NO: 234424 - DNA, 695 bp, Cannabis indica
aagtatttacttatatgtttagcaaaaataagtatttacatcaattagcttataggagaaataatattttactacgttattttttttgatggttttagtttattggaaaatctgtaatttatttgttattagagttataaagttattaagttattcaagttattaaattatttgaagtatattgttccaggatctattgctgtcatcgtatctgacaagataagttttcttattttttaattatgactattgttacaatttatcaatatagttattaattaatttgtagtgaaaatattttgttaattttttatataattatttattatgattattattttttatttctatattttctttactgattaatgtatattttaattttgcagttaaaatatttttctttttttgagggagtcatcttcacaagcacaagattctctctgttatgcaactaagacgatcccctcccacccaaagttgttctttgctgggtctttatttttctttgtggagagtgatcatgaagttgtcatgattttagcccttttttttttgaggtttgtgtctaggagaagctgctttttagttctattaggtccttgttatctgtctttctgggtgtatgtcttcaacatgtaatagacgaaatggtaaaaccgcaaatacatggtgagattatgcactacagatgg

SEQ ID NO: 234425 - DNA, 520 bp, Cannabis indica
aggcaagccaattattttggacaacctttttttttttcttttgtgttgaaatcgatgattacatttttctataagtgaaataaaagggttttgatcaagttgacaagtatttacagctacacatacatacatgttcaatataatcaagagttattatgaaaagctcaaagtagaaaaatgtactatttttagctttgttaagttttaagtgaaatactaccttttgttttctttaaattgagaaaacaaatggtagtattttgcttgaacttaaaaatctaaaaatggtattttctcttctcaaatcatcccaatccatcccaagaggagatacatatacactacacaaatacatagatagatacatatagaaattatgaaccacaaccaccttcttcttcttcttcatccatctcatcaattccaacccatctagtaaatgcaaaaagaaactctttgaagttcaccattccattcttatcccaatccatctcctctgcagatcccaacatcatcatca

SEQ ID NO: 234426 - DNA, 980 bp, Cannabis indica
gagaactgtcattggaagtgcagaaccagctattgcaggtcaaaatgatgacactaaactgtggcatctcagattaggccatgtaagtgagaggggaatctcagagcttgacaaacaagggttactcaaaggaaaattggacacaaaattcccttctgtgaagaatgtgtatttggcaaaagccgcaaggtgaaatttaccacaggtcaaccaaccaagaacaaacttgattacatccactcagatctatggggtgcctcaagaaccaaaaccttgggaggagcaagttacttcatgagcatcattgatgattattctagaaaggtgtgggtgttcctgttgaaaagcaaagacttggcctttgaaacctttgttaactggaagaagttgattgaaaatcaaactagtacgaagataaagaaacttagaattgataatggattagaattctgctctgatatgtttgcagaatactgcagaaaagaaggaattgccaggcatcacacagtagtcaagaaccctcaacaaaatggccttgttgagagaatgaacagaaccttgttggaaaggataaggtgcatgctcataggagctgggttgggcaagcatttttggggtgaagctctgaaaactgcttgctatttgataaatagatgcccctctacagctctaaacttcaaaactcctcaagaattctggactggcaaagcacctagctatgaacatctaaaagtgtttggttgcactgcctatgctcacatcaggcaagacaagctgcaaccaagggctctcaaatgcttatttcttggctaccctgatggaatcaaaggctacaagctttggtgtttagaggaagggtacaagaaatgtgtaattagtagagatgtcaccttcagagaagatgaaatgccactaaaaacaacaaaggaaattcccactacctctgatgttgttcctaggagtgttcaagtggaacttga

SEQ ID NO: 234427 - DNA, 699 bp, Cannabis indica
tcttgcctattctttcaatgtcgggacttgggttgataccccaacaatcctcccctcaaaccaaggaccacatactcgtggcctccccttcagtgaaactaccttatgtcgtcgctatcaccaaaggaactcgccgcctgaccatcacctttgtcaggaagactttcgacacaggtcctaacaccgaccatatactcgtggcctcccctccagcgaaactaccttatgccaccgctatcaccaagggaactcgccacctgaccatcacctttgtcaggaagactttcgacacaggtcctaacgccgatctccatcttataccgcaaatgcattaagggtttcttccacacaccgcaaatgcagtccactatcctagcgcttgaacctttggttctgataccacttgttgggccccgttctttcaccttatcgggccgttatctcaccttgggagttttgtttttgaacactttttcaaaagacctcatactaataaagtaggtagaacacttatattcaagataattctttcctattcgataccccaacaacattcaattcacattgtgtaaattttatatcaaatcaaatttatataataactcaaatctaatctaatccaattataaagactcctacttgtctcttgtttctcgtgtagcaattaacgctaggtagataaggcaaatagttaatggg

SEQ ID NO: 234428 - DNA, 633 bp, Cannabis indica
ggactcatggcacttggagcaggaataactcatgtgtttttactatcagatagcctccaaggaagaggtgcccccaccatcgacgaatttatgaagagggcccaaaagtatgtaaacattgaggaggccagaatagccaataacctacctcttcgctcaacacaacccgctccagttaatgccacaatgaattccacaaatgcaaaggcaacaactaccaaccaccaataattctgggcacaataacaagaaaaagggcgacaatggaggagatcaaaaaaatactaagaggagcaaaggttactagcccatgttcacaatatactatgaactggtggagacacaagaaaccatatatgtggcaaacgaacatcgggtagcctttcggatacctaaatctctgaagggaagtcgtgcgaagaaggatccaaccaagtatgtcgtataccataaagacatcaagcataccactaacgagtggttgaacctgagagatgagataaagactcttcaatgtaatgggcctcttgcccactatgcaaggaatagtcaatacaacccacaaggggctagtgcataacaacctataatcctacgtgccaatgtgaaaccacacgtggcactaggaaataa

SEQ ID NO: 234429 - DNA, 1476 bp, Cannabis indica
gatgccttggcctcatgaacctgctgctgaagatcacaatatgcttccctgtttaacttcctcaacctctctttgaattgctttagcttacaaacaacttgatacattggattccctgatattttcaagctccagatatctcttagcatggaatcatatttaggatgagatttccacatcctaaaatacttgaatggcttttttccccccaccacttgaggatgcaaagaacgaactactggagaatgatcgaatagtccctcgttaagaaatacagcttcaacaaactcatattttccaatccaagcttggttggccatgatcctatctatcttggaatatatcctatcagcccctggttgtttattcgtccaagtgaaaaaattcccactagctttgacatcttcaaacttacaataattcacacaattaaggaaatctgaatctggatatgaccttactcgatgccccactctctcttctttagctagaatgtcattgaaatcccccatcacacaccaattttcatcagagtataaatcacacaagtccttccaaagtactttcctctctcccctgttgtttgaagcatatacaaccgtaagcagactgttgaaaccttcaatagttgaaatcctcaaatgcattagttggctagtgcacttgatgatatcaaccataaatctataaggattctaagcaatcgcaattttacctcccgaatgccacgcaatgtttgaggaaaaacaccatccatcgaaaatattagagtacaaggctccaagctttggagcctttaccctagtctcgaggagacccacaaaattaatcttttgagaaattataaagttctttattagttgttgtttagattgatgattggcccctcggacattccaacataacaatctatccattagaaagagagggaccccccccccctcttgtattgtcattattctcttcatcagttgtggccttgtcatcaccatattcagcattactttccccattatttcaatcttgttcctctaaagtaagtgcctgaaatgtgttcaccacccttactgcagcagacacctgttgctttccattcatgtccattctcggcccttttacaatcttggtaaaaccatcagcatctgcagtaggaatgttattctttctattgtcattcttcacaatccactgatgcttagcaggaacaacagcttttttacattcctctgcagaatgtccaactccagaacagtgggaacaagtaatcggcctccattcgtatttgacacaaattgaggtattaaaatcatattcattttcaaattcaatcaagttcgggagttgttggtccatttgcacttcaattagcactctaacatagctcagcctctccctatctttagtgatagcatcctccataagaggcttgccaatttgcccaacaatcttaaaaagagacctttggccccaatattt

SEQ ID NO: 234430 - DNA, 1391 bp, Cannabis indica
ttttaatttttttttctagtgtaactctatttagttataacttctcaattagaatataatttacttggtcctaagtgtattcttggatagaggttctactgtatattaaagtggtgcgtgttattaatatattgcaattgtggaatggtttataatattttgattataatttggatgagtgcaatatgtcaattaatttattttcttggtaataattggaaagattagataagagttttggaattgatgaaataataagtcaaacaaaagtggcgcatgcatgcatgcagcgtcgtttgatttattatagatcatcaatgcatgcatgcatgcatgcagtacgtactagctgatctctttttccaatcaatttatctatgatatatatatatatatatggatattattattgggtaccaaaccatatggatcacaatctgtgttggtctaatttagaggttgacacaattattccctaacaaggaccccatgaggatgatgatgatgagaagttgaagcaattaattcgtggttaattatttggatcatattaatatgtactcgcagagccaacacattggaattcaaccaaggataattaaaagaattaatgtcaagaatttaactttgtgctcgaatccttaattagcttttaaccgtatgcaaattaatgtcattagccaaggtaagtaacaatgttggaaagcatttcattacttgcttttacttaaggattcagttctcccttctcaatcatggataatgactatgcaagtctattaattcatttgaacctcgttacttgattattaagtatagtggtataattattggtgtcccaaaatctcaatttcattgggatttaattactaatactgaggctccaaccaaatggttctcagaattatatttaagtaataatgtaatcaatgattttcttgtttaattagtgaaagttgagcgtttatgattaaattattccactcttcatgaccaaatttaaaaacatatataatttatatgatcttatttcaattctatgtgttgtaatttcagcggaaataaccttgaggattcaatcataaaatctgcaacgaactcacaactttgacagtaaaatgaacataaaccaattaatctccacaatgaatcaaatccgaaatcaaacaaagaacaacacacgattttatcctggttccggtcctagagatcaatatgatccctggccatactccagctgagaaacatcaccaatcttcattaatatgtgaataagagagcaacagtacaattacaataacctgagcaatcacagctcagatggtactcgatacacaccagagaaaacagtcacagttttctctctatcaacccgagtacaccccttgttc

SEQ ID NO: 234431 - DNA, 881 bp, Cannabis indica
tcttttaactaatgattaaaggtgcctttggctgactatattaaaaaaaaaaaaattaacagatgtctttgtttggccattggatcctaaaaattatggtcatgcatcactcatcatgatataatctatttataatttgaaacctgtttgaagccttgatggaatcttgacatgttgtgtttgtgattatagtaatatcacgagaacgaaagaacctcatccccatgatcaagatatctaaggttatgacagggttgtgattacttgtccatgtcgttttgtttttagcactaagtcatctaaacaataacagtactttgaatctattcctatataataataatactactgtattttgtaaatttattatgacagaggtagaactgtagaggcatcagtgatcaaaattaaacgtaaggtatgttgtgtttgtcatttaacaacgcattttacgaaacaatacaaaaatgtctactttaaggtcatagtactgagcacgcactaactattgctaacataattcccacattcggtcttgtatatttgaaatgatattttctagcaaatattacaaataaataatagtaaataaaagtattatttatttactttttttaagatgaagataaataaaagaattcttttttttttccctaaaataaatgaaagcaatattcttagtatcattacttaactttgctttcgtctgaaaagaataataatacaaagaccattttaaattaaataatataccaacaccaaaattaatagctctattaaatataaaactttagtacaatcgcgggcataccataaatttaaaatgttagagatattattacaatggaacaaaatcaagatttattacaactctattgtaa

SEQ ID NO: 234432 - DNA, 806 bp, Cannabis indica
tgatgatttagcctcacttgattgaaagcttgaagtatgtgagaagtgcttcaaacagttgtagcaacatgtagatagactttatgtctccatgaccaaaaagtaacatatcaaccgcaaaactcaaatgagttaatccgaactccttgtatcttttcgagagagatattacatttttaaaataagagtggagagacgggatccccttgttttaagccttttcttggttcaaagaaaccatgttaagatccattacaaagaaggctaaaatacggggttcaaatgcctactataattcaccgaatgaattatcttggaaactgaagtgcttgcatcatttcctctataaaatctcaatcgattgtatcataagtctttttcagatttaatttcaacacacaagtagctttcgaattttttctctcgtaatgtccagccatattctaacaaatcatgatgttgtatgcaatgaatcttctttgaacgatatatataaatatacataagagaatcttggagctccattttccatcgtcgagcaatcgatatggtctggcccttctctacttttcaccgtcgagcactccagagccccagcgagtcgagatctcagccacggttagaagactagggccatgactttaactttggtttcagatctcggtcttcaactttgaccacccacctgtacgtgagagagagaagaaagaaaaataagagataccaacttcgatttggtttatcgatgcgcgagctttgggatcccatcctcgtcgaacgtcccgacgagaccccaaacttctaca

SEQ ID NO: 234433 - DNA, 940 bp, Cannabis indica
tttgtcagactgaaaaagtaataaccacacacatgaagtgtcactatatctttattttttttttaatttaaaatttttagagatatagtgacacacaaaaagtgccactatattaaatatttttctttttattaatattgttaatttttatttatttatttattttattttgatactaaaaaataaataaaaatccaattaaatattaatttaaaaaatttaatatttaattattttaattcaaattttatatattatgataataatttatattaattatatgcaattataattaaatataactataataattttaattaatcagaaaaaatataaattacacaattatcataattccaataacactcatatctattactaaacaaaatattagaagacacaatatttacattattatagagctcactaattcaacaaacagtacctaaacattaacccaatttttttttttttaaaaaaacaagaagtatataatattataataaatatatatgaagaaatgaacctcttagcctagcctcggtgctttccatgtcgggacacaatatttagaataggaaatatttagaatgtaaattgtgaaaaatatatataatgtatgttattcatatggatattaaaaataggatgactatatcgtcatgtcaaaaagatgaaaaaataagatagtatttactgggaagttttataaagtaatagaaaatgaaaaccaggactttaattagtagtgctgatatagtatgtaaatgtgttttggtgaaatataatctcaaacaaattaatataccgttgttttattgatcaaaatcaaaaaagaaaatacaacccagaaatagaccattagaaccaaaaaaaaaaacctaaaacaaatcactttcacggcaggcttcaaacgaaccatgggccgagatccacagcg

SEQ ID NO: 234434 - DNA, 650 bp, Cannabis indica
ttttttttaaaaaaatctaaattctatatgattatttctttatattaaattaaacatataacaccataatctatattctttatattaaaataattaaaaaacattagtttcagatctaaaatataaaagtcaatctaaaatctaacaagtcattcatcaaatttcatgtccataaccataatgtctaaagtaataactaaagtctagtcgataatattactatatatccataactataatctccaaacaaaaaagtatttatttatttatttttttgacaaaatgagaaaatttcattaattcaaatcgttcatcaatacagaaatgaactccgcgggagcattactctcgcgtaaaatacgatcagctataaaacaagtagatctcgctagaaagtgagctccattgtttgcagaccgtttaacaaactttaaagaaataaacttatgcttcaactcaattaacaaatccttgcacttagaaacaactctaccaaagtaagaatccatggtggaagagctacgaatggactgtatagcaactaggcaatcagattcgacttcaacatccctccagccctgctgctttatccaactcagggcttcaagaatacccactgcttctgcaatttcaggcttgacagcaccctg

SEQ ID NO: 234435 - DNA, 1671 bp, Cannabis indica
tgtgggcctgagtttcgggtcccaggtctgagtctggttcttatgtcgtggggtcgggcctagtttttgggtcagggtttgggtttcggtccgggtgccggtctgggtccaggtcccggtctttgtttaggtcccaagtcataggtaccgatctcggtccatctcccagtatgggttctagtttgagtttaggttttggtttggatcctgttactgtcccaggtctggtccgattcggattttgggtccgggtcctagattcaaacactgactacgggtcaagtccaagcctcaggtccagattcagatatcggtctaggatctcgttcttgttccagttcgggtcccgggtcttgggccgcgtcctaagtttggatttaggtccgagtttggggttgtgtcccagtagtcaagtccttggttctaggtatagggtcgggtctcgtgtctcgagactgtggtcgggttttaggtctggtccaagtccctcatctagctctggatccttaatacaagtctgggtctaggtttaggtcttggcccaggtcccccatctaggttcggatccttggtctcggtctaggtccaaattcatattcgggtttggatctcgagttttggtgcgagtctaggtcctagtacgagttcgggtttgagtctgggtccgggtgttggtcgaagtccaggtccctgttcgggtccgggtcggggtccagatccagttcctagtcaaggtctaggtccaagaccaggttctggtctgggtttgggtccacgttcaagtcttgagtttgggtctaggttcgggtctcaattcgggtctgggtcttgcttctaggttctgatctcggtatgggtatgggtctaggcccgtgtctaggttagggtttagggatttgggtttagtgtttatggatttagggctaagggtttaggggtaagtgtaaagagtttaggatttaacgtttagggtttagggtttaagggttcgcttccagttccgattccaatttcaggtcacaggatacgatttaaggttcaggtgtgggtctgggtttgagtccttgtctgggtctaggtccgtattcgggttcaggtttgagtcctggtcccaaatccaaacaccaccacttgtcgagtctagttcgagttctagtacgggtatgagttttggtctgggtctgggtttgggtcaaggtccaattcccaaatttaaacaccgactatggggtcgggtccaagcctctggtctttggtcctgggtcccaggtccaaatccagatcctggtcaagatctagctcatgtcttgggtcgacgtttgggtctcaaatcaaggtttaggtctaggtttaggtcttgggtcctgggtcatgggtccgggtccccaattcaggttaaggtcttaggtccttgtctgggtaagggtcccagtcccagtgcaggtcctggtccatgtttggtagtggtccttgtcttgggtcttggcctggtctaggccttggtcactgttccattctcaggtcctaggtccgagtatcgggtccaaggtcccactcccggtcccggttccaatatgggttctgttcttagtctaggttcaggtctcagttgtagtccgggtctgggtcccagtcctaatctcattccgtgtcctagtctttggttcgagt

SEQ ID NO: 234436 - DNA, 973 bp, Cannabis indica
taaaatattttttggttgctcacattccccggtagggaactgataatattctacatggttattttgcaagttctataactgcttgttgcatgttggatgaaaagggctcaccaaaacctatttaaggctatttggtaaagcacattctcatatcaccacttatactctctctcttcaagaaaggaaaaagagaagctcttcacttcccttggagcctgatgcccctaagtcccccgaatccagatattcttgctttgtttaagcttcccataggcttcctcaaaagttttcactattgagtgagctttcaaatcctattctctactttttttcttgaattttccattgttgtgttcaagctttttacattcttgattctcacgttagattgtagtattgtttgtatttatccacatgatagttttaggatgcataatgtatgatttcatgatgaaaaagattcacttttgagctttgttgtaacgccctaacttgtaaggacaccaagtgtgtgcttttataatttagtttataataatgaactaatgattttaggaagaaaatgggatttaattaaaacttctagaaaataaatttaagtataacttaaactctttttcaaaacattactgaattcgaggatccccttagttacatacatttaagtataacttaaactctttttcaaaacattactgaattcggggatccccttagttaaatacttttactaaaaacaactaaactagcttgttacaaaatattattacatattaaaacgttacaaaagacatatcctgtccattgaaaacaaaaatatggtgggttgttatgtacattgctgggagacctctgactcgtcgctggttttgtttcccctttcccttagctgcaccctaaagcatccatgagtcataaagactcagcaagaaaagtaggtaaaacacaaacatcacatatagcacaaaattta

SEQ ID NO: 234437 - DNA, 1083 bp, Cannabis indica
cttgagaatttctgggtcaaataatgacccttctcttcttattttgtcgatttatgggtaggttcaccatgtcttcttcgtcagagcaagttgggccctctaacactgcgagaggtagttcttttgctagaaaaaagcaaaaactcgtggtgactgattttggcatgggaggatcgggggatcaccctcggcctccttacacctgcctcatcctggatgccaaccgtggggttggccttccccaggaaggtcatccacttcaaccctctggagatgcagagggagaaggaagcgaacagggccctgaaagggtatcttgagtcagagaaactccaagtttggtgacggcaagccgtgatgtctactttttgtaaggtggagattgctaatgacatggaaactgcgcctccatcgggaaaaataatggaggttgaagccctagagaacttgctggcctatcgtttggggggagagatcactccgtttgttaatgagcttttggaccaagtggccgaaagtgcaacgaaactactgacggaggtttgggcatcttgcagcagtgcaatcgccttcgcactggcccactatgcaaagaggcgggacatcggggtaaggctttgaattttttgcttttgattccgcttgccctaccccatgttcttgagtcttcagcttctctaactttgccttgttgtttgacaggcggccctattggcagaaaggactactacagaggttggcgcacttgtgacggagctggaccaggtctgggtggcaaaccgcgacttggatgctaccaacgagacccaccaagctgagcttttagaggccaaattccaaatttggggtctgctggaagccaaccagcagctggaggaggagagtgcccgccagacctgcctcatccaaaatatgtaggtcattcacgacctttatatggagactatggggcggatgtctggttcaggtccatcttcgttaggtggtgtccaaccgtaatcttccagccgacctatttcaaaatttatttgtttttttttttgtatatatatcccatttttaactacacatttcaagccgcgg

SEQ ID NO: 234438 - DNA, 602 bp, Cannabis indica
gttcaccatgtcttcttcttcagagcaagttgggctctctaacactgcgagaggtagttcttttgctagaaaaaagcaaaaactcgtggtgactgattttggcatgggaggatcgggggatcaccctcggcctccttacacctgcctcatcctggatgccaaccgtggggttggccttccccaggaaggtcatccacttcaaccctctggagatgcagagggagaaggaagcgaacagggccctgaaagggtatcttgaggcagagaaactccaagtttggtggcggcaagccgtgatgtctactttctgtaaagtggagattgctaatgacatggaaactgcgcctccatcgggaaaaataatggaggttgaagccctagagaacttgctggcctatcgtttggggggagagatcactccgtttgttactgagcttttggaccaagtggccgaaagtgcaacgaaactaccgacggaggtttgggcatcttgcagcagtgtagtcgccttcgcactggcccattatgcaaagaggcgggccatcggggtaaggctttgacttttttgcttttgattctgcttgccctaccccatgttcttg

SEQ ID NO: 234439 - DNA, 646 bp, Cannabis indica
aaatttaaaaacaaaaatattacaaactattaaaaaaaaaaacaaatgtataaatttttcttcacaaaaatatataattaggggacatggcacccgaatgagtcccctagctcagtcgttgttagttacaccaaatgttagacaacatgatttttataaagaagaaaagaaaccagaaataaaactatagaaccataactttaaccattattattaaggactttgttctctgtgagtgtttgtgctatcctgattttattctgggcttaaaaaaaagccatttatgtataaacaaacgaagtctcaaactcgaaacaaaatggggaaacacagtgagtttggttttgacaggttggacaaagacacaagcctttaactcaatcccacacgattaccaagcgccaccacgtgtattcccatttccacaactcgaacaccacaggagactcccgcttttttactttccccataaatatatattactcaattacacatatttgtcatatatatacatacatatatgttacaaaacacttctatctttcctttcttcccttctctattttacctcttctagttttctttttctttcttacacatcatctttgtagtggatctcaaaatcttggcttttgatttgagaaac

SEQ ID NO: 234440 - DNA, 669 bp, Cannabis indica
caatatttgatatttcatataaaaaaaatgttgatatatggtattatttaatgatttaatatttaaaatgtcatgtggacacatatgtataatatatatactattataaagtatgatataaaattaagtgactatgttatgggtttgaaatttcagcagtactgggagtggggatcgaagacacatccaagtgataggaagacgactcgataaaagtctatactcaaaaccgtacttgcatgtgctcatataattttggaaatttgttttattgacgatgactattcagaaaacatgtttgatctgttttgtgtacaaagacaaaaagacaaaaacaatatatatatagtatgtgcatgctttggtttgaaaaaaatcatgtatatagatgatctagagtaattaagtaatattaattgctaaacctataaatatatacactacaagaaatgtcaaatatgttgggaaaagtttgtattgcgctggtaaaataaaatttacttgtgatgtgttgcgaaaggaggttggcaaatcaacgtggtattagaacttttgccagcataaaatgaaaagcgttggcgaaaaatgacttttctcagcgcgtaaatacgctggtaaaagttagattttagccactcgcgttcgtataaaactttgacctctttgcca

SEQ ID NO: 234441 - DNA, 1671 bp, Cannabis indica
tgcattttgatctggttatatccagaatatgcgtccatgaacgtcattagctcgtgttctgtagttgcatccactagctagtcaatccttggtagtgagagaaaatcttttggacatgtcttattcaattctgaaaaatcaatacaagtctccaggtgccgtttagtttcgggacaagaacaggatttgaaatccacgaggggtaaaaggcctcgcgtatgaagtcattcttcaataagttgtcaacttcttcttcaagtgccccttgtctctcagagtctaagggtcgttgtttttgtccttttgctgggtaattagaatcgatattcaaatgatgatagatcaccttaaggtcaatccctatcatgtctgaatgactctaggcgaattgatcatagtttgcctccagaaaattaattaactgctattttagtttttcatccaaatttttcccaataaacacacatttagtgggattgtctagatctaaaataacctcttccagttcttcaattggttttaactggttattctcgtcttggattctagggtccgggtcctcttctttcttcttgccttcttctattatgaccaccattaattgatggttggctcttttattttgaagttctacgcgataacattcacaagccaataattggtcgccgcgtaccacacccagtcctgctggtgtttaaaaccttagagataggtttttgattgaactgactgcccctactccaatcaatgcaaggtgacccatcaatatgttataaactgatggtaggtgaacaactaagaactcctgcattagtgttgtagataacgtcgactcccctacagttaatgggagtccaatgatgccttggctggcaacactatcacaagtgaatctgcataagctcaccatgcagggttttaattttgcatcttctaatcccattttcttcaatgtatccctatacaggatatttacagagctcctattatccaccaatactctttttattctcttgttggcgagctgaattgtattgacgagaggatcgacatgtggatacctcacgtgctttgtatcttcctccaagaatataatcagaggttcttctgttttggaactttttagtggttttggagcaaacaccgattgctcattctttatttaatttacatatcttttctaggcattattactctctctagcgagatgcgtccctcccgagataaccaatatatcctcgccctcaacatggggaggttgcaatctttggttatctgggttgttgggctggtttggttcgttcccttgacgcttcacatactgtctgaaatatccacgcgagattaggctctctatctcgtctttcagttgccgacactcctcggtagtatgcctatgtctttatgaaatcaacaaaagtttgttgaatctcgtttatgtctcgcatgtctcattggttcaggtttgcggaatgcaaccctgtgctcatttgcgagaaagatgttttcacgagtttcattcaactcggtgtacatggtgtaaatcagaacatatttgtcgtgcttttctatttctttatttttagacgattctctcgtgtcatcctttcttttggtgtttgaaccatttggattatctgattttgttaagacgatacttgttgtggtagt

SEQ ID NO: 234442 - DNA, 1847 bp, Cannabis indica
atgaattacttcttagatagagtatatggctttatcaaagtagaagaagctgtaacctgagccaagggatcaaagggtagcaagaagaagtcaccagacttccagatccaggctacgaaggcgtaagctaatgggaagaaaagaggatcaaatagagggaagaaagccaacaatggtggtaagccaagaaactcccctggtagaaagaagcacaagactgggggcatgcccttacgagagtatgagccttgcttcaccacctactccatcctcttggctctaagagaggagatctatatgattacatagtgaatagtgtcataccgcaaacgtcttcccttcaaaaagtcaaggaagagagacatgaacaaattctgttgctaccacaacaattatggtcatgacactaatgagtgtaattagttgtgggataagatagtagttctcattaaacagaaacatgctcctcttcagtggtatgtacgacctgaagctgctacaaaggcgttcttaagcctcatacacgtgcacctctctctccctctctcaagtctcatatctcatccacgccacttagacactaagtcacatattcttaagtctttcacaagaactcattagttattggtctgcaatatattattcttattattatactattcatagagagccactctagaaattacaaggtcaagcctttaatctaaatggtattatctctcgaattaatacaattaaaaggggattaggtcattacccactaaacaagagggtcaaacctctataaatctctgtatcttttttatcatttatttttcttatttacacatggtgattgtctgtcataaatacggctccattgctagttgacaaaattctgagtcaacaatttggttcttttactaagagcattttcctgatcaatcaccatgattctaaatagaagaacttcccctttgaattctcatcaggatcccatgactcgaaatcctaatgctagtgttccttccacaacagacgaacctaccaatctagataacactgtcaatacaaacaatcatgtgaatcctattaatctccccattcctccaaggatggaacaacccgtagatctcacacagttgggctagtcaacatggagcaacctccacagagcacaactagggctattcaatagtgctacgtagaaaaaaatagtgtgaaggagcggcgaactatttattgttgagcctcagttggcactgggagacgatattgagctggccaggctcaaagaatctgtaggccagttcactcagaaaggagaagaaccacgcactggtggttgttatactttcgcctagtagagatgcgaattcctaagaggacaagaagaactgttgctggttgtgatactttcgcccatcagatatgtgaattcctaaagtagagggattattatgaatacaccctctgcacctgccaagcagaagtaaactatcgtaatcaggaggacaatgacctgattcccgccaaaacttttgccagagcgttacatcgccggcaaaacgtcgtcagagacacatcagccggcagacctattaccggcgagtacgttatactggcaaacaaatgcgctggtgtaaatacttttgccggcgcaagtctttatgtcgccggcgaaaggtcattcgccgacgagccattgccggaagcttttgtcggcgaaagatggcgccggcaaaagtttgccggcgagttacacgtacttttgccggcaagcttacgcgctggcaaaagtagcttttcttgtagtgtgataaggtagttcaatgagagaattgctagaagaggttaggatatgataa

SEQ ID NO: 234443 - DNA, 793 bp, Cannabis indica
cgttccccgtacccccccccccccaatcggactcgataaagcttaattgtgacgttagagtggggttggattgcatgtgtgcggcggttgttgctagggagcatcttggtaggaccatctgggtccagacctcttttttggagtatgtcgatgctctttgtggtgaagcggtggcttgctgcgttgccttggactgcgaggaaccgaggagacaagtttattattgttgagagtgattcgagggtggtcatcaatgctctcaatagggagatatcccgttgggagattgacaaccatgtctcattttgtctgcaatcctcttcttattttgctggttgtatcttttcgaatattagtagaaattgtaattatactgcctataatgtggctaagtgggcgtttacccacaagacgttcggttttatcccgattttctctatcccgaaacatttattttgtaatgaccgtgaggtctaactgcttctaaatctaatatatctactcttttcttcaaaaaaaaaaaaaaaaacgggggcaccttcataatccaaaaatactaaaataattttcttatttttctcaactaccccgccagtagcgagcttgcagaaaatgccgttcgtcttcttcttcttcttcttcttcttcttcccagtactggttcttctgcactgataaaacctgacctgtgggattacaaaaatgtccctaaggaatccaaatattctccgaataccttcagtcaactgttcctccctccgatgctcatcttgcaatcaaaagcaatccaata

SEQ ID NO: 234444 - DNA, 1182 bp, Cannabis indica
gttgagtctgatgctttagttgttgtccaagcaattaatagctcagttcatatgccatcactagtttggtttgttggttgaggactgtcgtactattttatctagtttgaataatgtccttatttcttatgttaatcgatctgcaaatagggctgcccattgtgttgctagggcgtcttatttatcgtcaggttgtacgtataatgagctgaatgctccgtcttttttgtgtgacattgttaaggctgatgcctgttaatcttaatgaaatttccttattcaaaaaaaaatagttttagaaaacttgagccaaacaccattagatttttaaaatagcaaaaaattgttttctattctcacttttaaaaacacattctgaaaattaaaaatacaaccaaacaacctctattacactcttttgattgaacataaaataagtgggtaaatatcattttggatattgtgtttttataactgattagattctttagagcttgtattttatgtttttatatcaatttggattttatgtttttataactggagatttttttgtaccagttcttgtgagaaatttgcgtcaggttggttatactaaaaaaattaacgaaaattgagttcatgatattattttgtactattttaaaaaatacaagctctaaagtattatttaacaatatccaataaataactatgataattactattttttatgaccttctataacaggttattaacaggtaaaaatttatttttagactaaaattaattatatacttaaataaattaattttttaatttaaaatatttaataacataattttctacaactgatgattataaattattttttattttattattcataaggaaataaataaaattaggtaagtatcatgttacagataatttatttataatttttaaataatgacaaccgtttaataataatctaacaactaaaataaatgtaaccaccgtaattacatatttaataaaattattaaaacttcctatatatatttataggatttttttaaggtgtggaatttaaaaaaatatcctatttgtagaatatttaatagtttattctaattggataattacattgtaagacaatagtcttgaatgcaacatatttaaactaggattgatcaaaaaattttcttattcaaaaaaaaa

SEQ ID NO: 234445 - DNA, 1814 bp, Cannabis indica
cttaaactcttatctgtttatttcattgttttagaattcatattaggatattaatgaaatatacatggtagtaaatctagatcgtggtaaaatatttccaacagcaacaccatccaaaaatacatttcatatacctccttcgaattggaagaactcatattataccattaatgaaaaacattcacaagaccatctggtacgaatagatgttttggaaatatcctcttctcgagtcttcaactggtaataaccatatcgttgactgatctcagagaagacgacccttccttaaaattaatcatcataacttctttctttgacaaaagaatacttactcttcaccatgaatttatttaatttccaacaatcaatacacatttgtaaaatttcattcttcttcttcacaaacaaaactggcgtactccataatggggtactcagtctagcaatttaaagcccaacatccagcatcccctgtaactgaaccttcaaccatttcaactcaacaaatgccatccaatacagagtttaagatacagatttgctccaagtactagatccatttcaaagtcaatctcccacttcggtggtaaccccagtaattcccctagaaagacatttaaaaacactcagaccactggaacgtgttccagtcccatgcgtattcttcacaacatctacctcactggctaagaaaatggcacatccatctcacagcaaattttttgccttaaccactaaaattaatggaatttaggatccctaaaccttggccatgatcacaaatgagtcctcattttctagttcaagagttaccattcttcttttacaatcgataattatattaaactttacaaattaatccattcctaatatatcctcaaaattctcaaattttaactcaactaatataaccaagcattccctttcttccacaactcaggaagggattttaacaacctgctagcaaataactagttctccagtaaacagtaaggtactggaaccacttggtaacacctcgttaactttatacaaactttccaaacacccttctcaaaatctaggaatacgttgcaccaaaatctattaaagctatcaacaaagtatgattaataaaagttcaacttatcacaatagaaagactagcaccagtctcagtctaggtcaaacaaacacccaaacaagaattaaaatgccatcacccctctattccgttcgctgcaacgataggcagcttctttctaaatgacctactaccccacattagaggtaggctcaaatttagcattcactttgctaatgtcttttgcatctcgaccctctggatgggtttgtaaatcttcgctcccaccagtcagattctttggttacattaaattttcttattaggacccataattggtgggttgttagtccttttccgtgagttcactagggtctacacccttatcagatccaacattggacattcgatttcatcaatctttcttcataatatatctctgttgatctgatccttactccctcaacaataggtgttagctcaaccacctgagcataaaacgaaacaactcgtagttgtttaaccactatatccacattctgagcgatacactattcctaccttcgattggattcaacgttcctagcagtcttaacagtcgcttcattaaaaaaaaaactttaccaatcgatccagcttactgatattctctctcaccatgctgcccgggatcatccatgtatgctctactaccttaccattcaggtaatctcttacttcatggcatacattttctcctagccttgtg

SEQ ID NO: 234446 - DNA, 1634 bp, Cannabis indica
tcgttgtttcgcactagcatagttgggcagaaagttatagtgtcgactgaccatgaattcaattaccaaatatttcaacaagaaggaaaggatttccacatttggtacttggagactttcaacaagattgtgggtgataaccaaagcatgctagcttatcaaggaacgtttcacaagtaccttaagaacttgattttacaccttcttggccctcaaagcttgaaggaacgtcttattcttgagatgggtgaatccactcgcactcacatcttttcatggcttactcatcatggtggcattgtagacgtaaaagaaggagccttaaacgtataacatatatatttttacaactatatatacattttatattaatagatgcatgcatgtcaaaattgatctataaatttaaaaatatattttcggtttataaaaattggcagatggtatttgaatttgttgttaagaagctcctaagctatgaggaattgaaggaaggaaagaaattgaaagataacttcaacaaattcatggatggccttatatcttttccattaaacatcccaggaactgcttttcatgcatgtataaaggtatacttttatatttttgttgttatttttataatgaattaaatatatactaactaataatcatatataacagggacgacagaatgtgattaaagtaataaaagatacttttaaaaaaaggaaagcatcaaagaaagttgagggtgatttcttggaccatttacttgaagaaatggagaacagagatgagaaatttctaaatgaagcgattgttgtagacatgatctttttgattctctttgcttcctttgagaccagttcatcagcaattactttagcaattaagttggtttctgatcatcctcaagtgctagcacaacttacggtactatcttcttcttctactcctcaactactttcttttttctttctccaaactcactcacttcactagctttttctaattttttctagttcacctaagtattattttataaattaattcttcctttgtactatcattaattactactgaaaactagtgcacttttttaagaggtttttaacatagacattcttcaattaagttttactttgctcatgcaattcagtaatatgtgagcttcttttttttggtaattaaattcttgagtttcaaaaatatatgatcactttcaaactaccatgaaagattttgtctctttattcctcacaatgttgtaatttgtgatgttcttatttcatatcttttagtatatactacgtactggttgtttgttttgtttagctctctcgctagctcctaggactagaaactattttctttctagctttttgtcatatagttagtgacattatgtgtgtcagtaaattataaaataataaaataaaaaaaattagcagaaagagtacgagacaataataaaaagtacgaggcagtactgattttcatgtaaactctgagctcacatgggaagaatacaaagcgatgacttttacacatatggtgagtttttattatattatgaacattttaatttatttaaaattacccacacagtgattctgggtgaatcattcatttatggggttattcatttgtac

SEQ ID NO: 234447 - DNA, 1541 bp, Cannabis indica
tttattttttaagtttttaattataaaaataagagaaattgtgattctaaaacaacaaaaaacgtgtcacatttatttttattttcagttttttattttatttaagtcgggtataggtcccagtttaggatcggggctgtggtccgagtccaggactaggcccggggttgtggtccgagtttgggactgggactgggaccggagtccttgtcccaaggtccaagtaagggtcggagttcaaaatattgattagaaaaattgttttaaaaaattttgaaagttatttttaatttgttttcaaaacttttaaaattttgattatcaatcaaaaattaaaaagggaaaacagttatatagaacatgttttttaaaaatatttttaattttccaattaaaagaataaaaaaactgattaaaaaagtgttatcaaacacaccttaaattagtacaaaattcatttaaaaaaactcctaatactcctttaattgataattcttattctagaatgacattatatatttatactagccaagcaatataatttactaataaatccgtaatgtaatgtataagtagttaaactaaagataaattaccaaaataaatcagtaatatttaatatatatatatatataaaaattaatgaggaatatatatatttatctatctatctatattattaggcatgatgacatgacattttttatgagctttctttttatttctttgctctccattaactaaatctaagagtggtgatgcgacattctatattttttctaatctatttttctaattttgtgagtgtttatcttttgttcaaagttaaaatgtatatcactctcaattcttcaatatacaaaagtcccacattgttgaataactatttataggtgcttattgtagtatataaataaagcttttattttttacacattgttttgtctcaatattaattgttaaattttatatagatgattaattattatcttactcacttagttttatttttctagttctctttatatagtgtgttgttttcaaaaattcattttaaaggggctattatagtagggatttgatattttaggtatcaataggattgtaatttatagtctttgattggatagtaatttatagcctttgatttaatctaatggctcaaattaactcttgaaaactacaccataattaatatatattttttatttataattaatctaattaatcttaaatattatgttctttctattttaggttaaaattacacaaaataaacatttatatcatttcaagaaaaaataacatttatattatttactaattacaaaaatactattttattacaaaaataccatagagagataaattctaagtataaaaatagagagtaagatacacatgtggataggacaagagagtgagactcacacgcgagtggagagagtaaagagatttactgacgcgtgcagaactacagcgctagaatgtggcagggactctgcgcctgccacgtggccgtttgaatgaagtgaacttga

SEQ ID NO: 234448 - DNA, 1049 bp, Cannabis indica
ctttcttcacttactccacctacacaacaaagacaattaaagcagttatttttctacgacaaataagattagacaatcaaggcaaggtatttcaaaaggctaaaaatgcagcaacttctattcagcaaagacaacagcagtctcgaccgcaccaatctagctggtaagtcccacttatttgtacagacacccacacagggacttgggggcaaatgttatcctgatttttgcccacttgatgttgcagtgcttacatggacaaaattagtgccacatggtaatacagctcaccaacaagaaggtcaaattagtacctaagtaaatggggaccctagcactcaaacaggcttcaaatgatagaccaacttcctcacagaagttggcctgccagcttcttgacaacaccatggttggccagcctgctccctgcaggtgtctagccagtcaaggaaagaacttggcaggattttctatgcaattctacacgtggatagtatgattaggctgtgaaatgggccttaaaatcccattagaatagcttaatattatctatgttcaagggcattttcggtcttttattttaactaatttaatatacaaatatctacgatttcaagttgtaaattatggtttaggatttctatataaaggccttaaatctaacctagaaaacctaggtctgaaagccataaccaagtcactaagtgagaactaggtctaaaatctataactaagtcgttgaatctgatactagcctccaagctctaagcctaagtctgataactctcttcttcactctctctcacacacccatacaagcatttttaacacttgagatttgccaacattaattcatactttgtatacttaagggtgctatatcagatcccacctatagtgatcggaagagtcttaacccttggtatcaatacaactaaaaggggagtaggtcattacccgctatcaaagggggttgaacctctataacaattatgtgtgttctttactttttcattctcattgtgtaacacgtggcaagcatcagatcc

SEQ ID NO: 234449 - DNA, 992 bp, Cannabis indica
ttacaaaacacaaggttcaaaatcgtattaaacgtattcacaaatactgaaaagaactaaatatttttattattattattaaacaaaacaatatatttttataaatattataaatatagataatttttaatatacattaaatttaattgaattgaattgatttttgattaaattttgagattgacattcaataactaatttaatctaataagaatctaatttttaacattcaatctaatttaattgtaattgaatatctaaatttttacaattaaattgattcggttcaattagattaaattgaattttgtccatgagttattgctatggtggcttttgatggcatcaatatcatcatatgggttagttgagggaaaatggtcttgttggaaagttgctgtattggttgttctttatttagtgttttggaccttgttgattgtaattttcactggattcctaagaactttagtaccccatcctttagggatttaacacaaccttttttttttttttttttgtaaacacacccttttgttttagttataatgaagtttcttctttaccaaataataataataattaggggtgtttatttgaccacattcaatgtattttaaatctttctagattcaatataattatatattaaatgttagattttatcactcgattcgatcaaattaatatggatgttagattgtattgattctatccgttagatatattccatgtatatctattgatttaattcgtatttatctaatatttattggatcgtatcgaattcattcaatgttttagatccatctattggattgaactggatctatctaattcaaaaaaaaattaatattatatatacatatatatatttttacgtataataacataaaatttaatcactcattcaaaataaaaatattaattagttcgattgaatgttggctgtattggatttttaggcaccacatccaacatccgattcgacc

SEQ ID NO: 234450 - DNA, 1146 bp, Cannabis indica
ttggagtgtccaactgctagcacacgaaccaaagcacattttttaaggtgaagcattaaatgctcaaaaacatgaagggacagctctatttaccaacctcgtagtctgagcatatgtctccccattcacctagtatgtagtctgagcaagtccacgcatgaacaaaaagttcccatgcagacttgggggcaaattttgtcccaaattttgcaccagttgatgtgatgttcatctaggtgacacatggaacattttaagacttggacaggtgatacctcctcggcatgtcgtcttgagtgggttattcctcaaatagcttatttaaagaaaaagttggagcatccggacagggtaaatgacactgttcgactaacatcgatctcacagtaagcccgcatatactggatagggtaaatgcggttgaaatatctttagggttactttccttatttattttattaattaaatttctattttaatgggatttccatgcgttattatttctcatttatttgggaaagataattgatgtgtttcttccttataaatagagaagccatttcattattcaaggatctgaattctattcttcaagagagctcttatgctgtaaaattgtaagctttcgagagagatcaaggaactcaattacttctcttctcacaagtaatacaagtaaaaggggagtaggctattaccactatcacggagttgaacctctataaatctctgtgttcttattgcttgattttatttaatacttatcatttattcttatccctttaattgacatattttcgttggctaaaagtgaggtcaataatatattttgtaataaataattttcttaaaatttattatttaaataaattggaaaaaagacaaagtattatcaagacaaagacatcaccattgtctggttaagataatggtggcgccaatcactatgtaaggacacattgataggcgtctatcaggtaagatgagccccactagatttatttttagattaattaattaattaatttataagattaatatttatttaaatttgaatttaaaaagtggctacaaatatttatggtggttgagatattctctcaaagttgttgagagattctctcctgatggttgagatattctctc

SEQ ID NO: 234451 - DNA, 1171 bp, Cannabis indica
ttgatccaagtttgttccacaattccaatccagtctcttcatctacaacttctcaaaggacttcatctcctaagcttaacaaaatggcactatgagctttcatctcagtttattaagaaactttcttggcttcttctccttctttagagacagcttccattatggcccttgcaataccctaatgcacgagcagtgccttcatcttgattcgccaaagaccaaagtcattggattttgtaaatttacccacttcaaatcttgcagttgccatctttgttctttaactttgattatcacgttcttagtttcataatatcaacatgtgctttgattccatttgtggttattcaatcaccctccaagaacatacaaatacactgaaatcaaagaataacaaagaaaactaaagctaacaatgcacagtatgaagaaaagataaaaacagagtataggaacacttgaattacaaggttcgatcacaagcagaaaatcttggatctactccttgggtggaactaccttgaggctttgcttttattaattgaagatgatgctcagagttggtacacaacagggacagaaaaacatgaacaaaatggagtcttgctcctactgaaatggctcactcgagaaacaagagttatacaattttcagaccctttaaaataacacacaccctcaaccttttctctcaagctactaaatagcaaatggtcttaatatatagacctaatacaagtgttcccgagccaacaaacttaatagaatttaactaacaaaattctaactagcataactgtctagcttgcacaagtgtgtaaaccccatagaaataaactgcagatcttttttgttgtttgagaacgacttcgattattgatgcttgatcagtatgtgaatgaagcttttttgctctttaactttagtttttttttgtgtgtgagaatggttcgagttgtaaatttataggtttcgtttatgcttttgtgtttcacgtgctctttaaagaagctagtcccgtgattaatagaagattgtgttatgagattgcatgtcatttttgagatagtatgggattattttgattttacagtaaagatgtgggcgtgttacgttaatagaagagtattaaattagggttaatttcacaaatgcacaaaaacaacaaaaa

SEQ ID NO: 234452 - DNA, 571 bp, Cannabis indica
tgtaaggtcgtatactgggccgtagtcagttgaataattccttcggacgccacgactggtgtgataggtgggaagtgtcccacggtggctgctggtgttgaagtttccccagcatgaccggtggcttctggaaacaggttgaggggagtgacagtagtccgtcctaccccaccattgattgtgtcaaatgggattcactctgtttcctggaagtggaacattcattgttccaacattgaaagaacttgtgttgttattttcgttcgtctgatttccagccattttgattttcctccgaaatcaacagtaaaaattcttcccatagacggcgccaaatgttgttggaggaattttgacaacaacgaataaaaattaaaatatagttattaattaaaatgcgcgagtactcaacctagaatgacgagtattcaaagaaaagacactcagacgtactcgaaaatataatgaacataagggaattatagtggttcagtcagatcacggtctgcttagtccattgttgaaaggattttctctctcctttattgatgttggatcactcatttatata

SEQ ID NO: 234453 - DNA, 1042 bp, Cannabis indica
aaatgtgttagaaattaggaaaaataaaaagaaaattttataaaatgacacataaactcttctgctttcctttatattatatatatagatatggatatatagattgacaaatattgagaagtacaaaaatatattttgtattcttttcagaaaaaaaataaaaaaattgaaactaattaggcaaaataaaaacttgagtaagaaattaatcaatcacccataaaaaaataatattttttagacaaaggaaagtattgtaataagaatattatttataacctacatagataaaacctaaacagtttttaaacaatgtgggacttttagtttgtttgtgtggtttagttttcaaacaaaataagaaaatgtgttagaaattaggaaaaataggaagaaaattttataaaatgacacataaactcttcttgtgctttcctttatattatatatagattattgatttgttgtaaaattaagagacaaaatgagaaaagaacaaaatgagaaaagaataataaaaagaagatcaagagacaatcatacaaattaatcttttttgcagagattgagaaaacaaagcttcaccaatcaaaaccttcctatttcagagggagccaagcaagtggatcggagggcagtggctttgaaagctgggcaattcgttggtgtagagagagagagataaattaggcaatttttttttcctttcataagaagagtttattaacgtaaaaataattaaatgtgaaatgaaagaagctaaataatttattttttaatggaagttattagaatgaaaagtcactgaatttttttaattaaataatactaaaaattaacaaaaatctaaataaagtaaaaaaataataagagaattgaaaaatagaacgaaagctcatacaatatgccatgtcatctaccctaacaacacaattatataaatatatagatagatattaaataattttaaattatatatatttaataaaaaaataaaaattaatatagaaaactttatagaattctaaaaaaaaaataatac

SEQ ID NO: 234454 - DNA, 997 bp, Cannabis indica
tactttttttttttcaaaaaggaattttactgattatattagagagtgaatgaatgatgttaaaacaacctttagatgagatttgagcaattttgatttgtcattgtggaatggaaaagtttgtgtactcatttattcttgaagtttttacaaaaatgttaaattttgggtaatatttatagttttaccgatacggaattttttttatagaaatactgtttttgtgttttataaaataatgtaaaataacaaaacaaaaaattaaaacaattaaaaataattgtgaaacaataataaaaatttaacacaatatagtatttttgaaaaaaatttcttttattcttgcaaaacatttgttattatgaatttcttcactttcataaatattagccaaaataataataataattataataataaatacttctcttattagatcattcacaatcattctccacatcccaatcattcaagaaatatcacttgagaacctttatttttgctccattaattggtttgaatatgagtttgtttctctaagaactctcacaacatcttctataggaattctcttcatttttagctaaatgtgataaaaaaaaaaccttcatgagctccttaaaaatttgaatcgtgtatgtatgatagaaatttactataattaatattttatttatgtatattgtctatgtgttaaaaaattattatctttaatagtatagaaaataaaaatagtattaatttaatgttatagagacaaatataaaaaaacagatgtatataatgtaaaagtatgttgtaaaatagagaaagtaaaattttattatggttacgtattttaaaaatagagtagagtttcaattgggagtgttctactcaggtcagcttctctactctattcttcaaagtacctcaccaagatattattttttttatattacttcacacttttacattacatcatacattaaatattattttttaatatattttatta

SEQ ID NO: 234455 - DNA, 1533 bp, Cannabis indica
gataaaaacaaagttggtttcttagctggtgaatgtgagcggcatgccaatgaggctgctctctacgacatcgactttaacttgaatgatgatgtcccgaacgtgggggaggctgcaggagttgcaggctacaaccctgagcagccaaacatgcatgctctcgaagatgcaccaaaaatgactgcgacacatatcaaggagcttctgcaaaactagatagcagttagttttttcaaggatgttgtcttagtccttttttttttattagtatttagctttagcgtgttaaaatattgcgataaataatttaaaataaaaccaaatatagcaatttataaaagtaggataattatacaattttatttaaataataaataaaatttaatgcctatttgaaaaaatttggtcattaataaccaaaataaaatttcaaattaaaatctaatagtattcttatttgaaaatatataggttaaattagaatcttatctcttttaaataaaatatctaagataattttaaatataatatttaaattttaaaaggaaatttaaactttaatatttataatgtttaaaatatttgatcttatctttataataattaaattttactatatttaaaatatactaattgattttaagttaataaagatcttaaaatcaaaatacatcttttattaattaaaaattaataaaaaataaatttattctaattttactattttttttgacgtagtgattagaattacctatgaatttacgatgcagatatccataaaccgtacaggaacctcctcgaactaagatagctcatcgtctaactgaagagcatgcttgtcaaaccatgaaactgttaaaataaacgagcaacatgagacaaactgcccccgaaaatttagacaataaagctataacgtcctcaaataacacaccaaaatggctagatcttcaactagtaacatcgaaaactacacgccaactcgtaaacatatcaaacgactccaccaaatatctacaaaataaaagataaagaaaagtgaattaccccctaataatgatattaaaaataataaaaatcttaatagtaacaagatgacaattcttaaataaattatatttaacaatttatcagcaaattctctgtaacagtaggccctctacaaaatcgacctacaaaataacaataaaactctattaccacacaatttaataaaaaaatatgtaatttgaataaagattgtaaaactcaattcatataataatatcaaaacttaaaacatttatctgtcaaatctcaacagtcgtttgcggaagtcatgaataccaaatatgaaacctttctcttacccattgaacatactacaaatctaccctaaacaattagggacaagccataaacatgacacgaaagccatagaaagcatccaaaccatcaaaaaaatagtgcaaaaacaaatactaataaagtactaataaaagtatctgattttactattttaaacttgaataatgaaaagtttatgaaaaatta

SEQ ID NO: 234456 - DNA, 767 bp, Cannabis indica
taacactagtggtttttccatatctagaacaacactaagctctttcaagaactttcttagcgagaacagttccatagcagcctcagtaatagctatgtattcagcctccatggtagagtcagatattgccgattgcttgaaacttctcaaaacaactgctccacccccaagagtgaataccatcctagatgtagaattcttgtcatcaagacaagctttgaaatctgagtcagtatagcctaaggacttaaagaaacacccttgtagactaacacataatcccttatcctctataagtatttcagaatatgcttaactgcagtccaatgttcctttcttgggtttgattgatacctgctcataatgcccactacatagcgaatgtctagtctagtgcatagcataacatacattagacttccaactgctgaagcataaggaaatttcctcatatcttctatctcttggggatcagtgggacacagttccttagatagttgcaagccatgtctagaaagaataatagcccttttggcattggtcattgagaagagctctagcaccttatcaatgtaagctgcttgcgagagaacaagtggtctgttcttcaattttctaataatttgaattccaagaacataattagcgtcacccaagtctttcattttgaattgagtgtttaacaattcctttctgtcaatcattttcttgatattgccaatgattaaaatgtcatcaacataaaggaccaggaatattaccatttg

SEQ ID NO: 234457 - DNA, 6493 bp, Cannabis indica
  modified_base (4358)..(4359): a, c, t, g, unknown or other
atttgaaaatttggctgcaagagccaatgtgtttacaagctattaaagatagttgggtggagtcttctatggctggaattcaagagagaatttagttgtgtggggtggagtttgataacattgaaacattttagaggaaatttttatcgatgatcgttggtgtttggtgggacgatttctaaatgctcgatctttagattttgatactataagacacactatgattagtctctgaaaacttggataaaggtttgtatgtgaaagaattggggcctaatttttatctattttaattttatcgtaagattgatataaagcgagtaattaatgggagtctttgaactttcagtaggttattgttcttgtttgagagggtgcctcaaggtggtgatcccaagtttgtgcagttgaatacatttgacaattgggtgcaagtgcatggtttatcatttgactttatgacaaagcatgtggttaaggaagcaactaagactatcgatacgtttgtggagacggatctaaaaaaccataatgggctttggcgtgattatttatgagtacgtgtgactgtgaatattgatgtcccactggatagatgaatgaggatgaagaaaacaggtggggattggttctgggctaattttaaatatgagtttgcaataactttttgctatatttgtggtatcattggccatatagaaaacttttgctataagttgtttgatacccctgaggaggaaattgttaagccttacagcgagtggatgcgtgctcaacctcgatgaaagaattatttgttgagttcacaatacttgaggaaaggttcggaatcatatggtcaatttttttagtaacagaccgatgactgaagatggtggttctggtggccgatcgatgaattgtgatggtggcgatgatcgtggaaagcagaagttaccatgtatagaagattccaggtttaatgtgcattcaaattctcctagtggtcttcctagagacttaggtggaattcaaaatcctaaaattatggattctttagttggaaagtctaatatgattgagaatcatgtttatggccataatatggttatgatacaacatagtgataagcacgtgcctcgtgggatttcttcagattctaaaaggcgtaggcccaatgaagtagcgaatgtagatggtgggcctcttggcatggaagttgaagttataatgatgattgctagtaataggctctcaaaaaatgggctcgaggtgggtcttggttttcaggcccaccagacattatgagtatcctgagttagaattatcgtgggtttgggattccacaggctgtccaattccttaaggatcttgtaatccaaaagaagcctaattttattttcttatgtgaaattcttagtcgtaaggatgtggttgaaagagtacgtgtctctttagggtttgatggtcttttttcggtagatgcttgtggtcgtagtgggggcgttgcattgttatgacaggatggaggtgatgttaattttcttcagtatgctaataactatgtggatgtggaggttattcttcaaagtaaggtgtttggcggctcacatggctttacggtgaaccaaatcgtaatgctcgatcttctacttaggatcaacttcaatttctttcacaagcttctagccttctatggtgtgtaataggttatttgaacaatgttttgtctcatgaagataagaaaaggggacttccctatcctaattggctgattgaaggattttaaaatacaatttttgattatggtttaattgatttggagttaattgggcatcaatttacttagggaaaaagtcgaggaacgaattcttggttggaagttcgtctcgatagagctcttgtttctagttcttagctccaattatttacagcagctaagttgtttaacatggagctaacctcatctaatcattctcccatattgcttgatcctctttgtattcctattgttccatgccagagaaggtttatatttgaaaatttctcgctgcaagagccaatatgtttacaagttattaaagatagttgggtggagtcttctatggctggaattcaagagagaatttagttgtgtgggtactaacttatacaagtggaataaagactatcttgaaactttgcagagcgaatcaagttctggcgcaatgaagccaagaagttcaaaaagggtcaggatactacatcaattcaaaagtttaaagaggccgaaactaatctgtttaaggtgctgactcaaaatgaaatcttctggtgccaaggttcgaagcaattgtggcttcaagaaggtgaccaaaatagtaagttctttcatgctaaagtgacttctcgtcgacgatctaatactattaataagctgcaaagggaagacagtagctggggctaattaggatgtaggactttcagaggtggttgttgattattttaaatatttgtttactagtttagctagtgattctactcccgtgattaatgggattacaccatctattctaccccactaggagctatcacttcaaagtgcgattctatcgttgtaaatcagggtttattttagaaaagttttgtacagctataaaaatgtgtttgtagttgtctccatggtttctatgttatataaataagaccaagagagcatccaaacaaattcaccttttctaatttcattttctatattttcatctttgtgagaaacgagtttcatttgaaaaaacctaaaaggttcaactaggttttggttttcttgtaatgatctcttgttgttcatagaatagagtgaagagcttcgttgaacaagagaagaagtctttaggagaagaattgtccaagacttactttaagaggaagtaagcacactcatatcaacagctaaagggaattcattatttggtgttttcagtgttagcctaagatatatttccaagagggggtgaattgaaaatttaaaaaccccaaagacaattcatgtaatattcaagtttaatgcaataagaaagataatcacaagtataaacaaatagaacacttgaaatgtaaaaattttagggatagaaatttttgttaacccagaaactttttttggtgatatggacatcaatatttgacatgtggcaagaaatatgacatcaaagagttgagtagacctgagtcataccagttggcttaggaggggtccctagccctgcgccaaggttgacttcgagaaattcgagatggaagtttagaatttgttaacttgttctcaactcagtatctttaagtattttgtaccatgaagacatggagcaatcaaatataggcctcgggagctaaaattacatgaacctgcaccccaaaagtcaacctcgacacctaggtaccggtcgtgagaaaagagcttgtgccaatagtaccaaacttcagccaccaagaggtagcaaaagggaaatctaacagagcatgggaagtggtttcaggatggtcttgacagataggacaatgatgagaaataatcacatgtttaatgacaagattaaggcaagtcgggagacaattggtcacaacacaccataggaaatttttaaccattggagggatcttcagttgccacaaatctttctaaaaaccagagttatttactcctggccgtggggccttttgatcttgcagcagttgatatgcactttctacagagaaatggccatgtttttcaccagaccaggaccatcaatcatccacaatgttcaaacttaaaggaatgacgagaaccaaatttgcatctcgagaattgaacatgtcttggactaggtcaaagttcgacctacgtaaatcaaaatcaaatagagaacaaaccaactgattatgcagaccaggattggaagaagtcacaaaggggttttccttgtctgggagccaaggatggtgcaaaatagaagtagaagtacctacactgatagtacgtcgagccccgagttttactagagcttgaacactccaaatgttgcgccaaataaattgtggcctagctcagccgtgatgaagtctaaatggggaaaatactatgctttataaactcgaaccctcaagaggattaggattacatagaaatgccatccttgcttagctagcatagcaagattaaactcatgtaagtgactaaatcccatacatcccgaatatttatgagtagccatacagtcccaaacatccaaattatgccattacctttacttgaatttgttttccaccaaaaccgtgcgataagcttctcaagttcttgacaagttccagttggtattaaaaatacactcatggcatatgttggaaagttgatttaaaannacgacacagttttgaggaggatttccttacctatccaagaaaaaaactttccatgccagttgttgattcggttaacaactttatttttgaggaaaccaagtaaagctttcatgttttgaccaataatgttaggtaagcctaagtagaggctcccttcagatgcttccaccatgccaagagtttaacatatgctattacaaagagtatactttgtgtttggactgaaaaaaatatttggctttgtggcattaatcttttggccaagtgcaagctcaaaagaatgaagcaattaaaataagcacactaggaccagcccctatggtagcttgacaaaaaaggtagctatcgtctttaaaaggcatatgagatagaaggagccccatgagcaacccaacagccttgtaaaacacgttttacttcaaacttttggatcaaagaagataacccttcaacacaaatgattaaaaggtaagttaagagcgagttgccttgacgaatacctcgggtgggaacaactgtccccataacatttcctccatggataatagaatatcgaactgaagagacatattacatcacaagatttatccatctatccgcaaaccccatacgagtcataatgacacaaaggtaatcacattcaactcgatcgtaggcttttctcatgtcaagttttaaagccatgtaaccttttctatccttcgtcttgcgcttcaaataatgcataattttgaaagccaccatgatgttatctgagataagacaacttggtataaaagcactttgagtgtctgatatcacatgatcaatcaagtttctcattcggtttgcaaggacctttgaagccaccttataagaaacattgcagagagcaataggtcgaaggtcgctcatggttgagaaacttttcttcttaggaatcaagacaatatttgtatcatttatgcctattggaaaaagtccccgtatcaaagaagtctttaacaaattgaatcatggcccacaatatccaaatgtttttgatagaaggccaaccccatgccatcaagcccagggccttattgggatgcatttggaataaggcttgcttaacttttttagtttgaattggctttaataggtcttcattctgtaagtcattaacaaaatatttcactccattaccgaccatatttgacagtgagccaccagcagaaaatagatcatcaaaatagttaacaatggcttgatcaagccctgtatcccaacccttccaaactccatttgaatcttgcaaagtctgaatctagttgtttcgttttctggaattggcataggcatgaaaatatttgctatttttatctccagcatgtagccaatactgtttggatctctgtttctagtaaattcttgttgggctaaaattttgaagtaagtgttctgctcaatcacaaactcctgtgtagaggcaacatcagattgattttttaggcaagataaagcttttttcttgcagttaattcgttttctaaagctaccagtaagatctcgaccccaagcttcaaggtttttgccacatatttttagtttttcctaaagaggaagatggttgtttgattcccaacaatctttgacaatttgagcacatagaggctctctggaccaagcattctcatacttaaagtggtgagtaaaattctcagtttgattaacattaggttcaagcagaataggggtatgattagatggggaaaaatcataatttgacaaaatcgcatttcgaataatatttaaccattgatcagtaacaacaactttatctaacctggtttcgacacacttagtcgtgtctttccctagtgcccaagtgaaaggataccctttaagttctaactcacgcagctgccaatcaagaagaagaacttgaaaaccttctattagagtatttgggtatgagcgacctccttttttatcatcttgagaggcaatattattgaaattgccaatgatacaccagggcagatttgttgtggttgcaagcgtacgcaatagagtccatgtagttgtttgagagattgattggcttctgcatagaagctagtaaggcaccatcaaggcttactaggaacttgaatttcaatatcgatgtgatgtg

SEQ ID NO: 234458 - DNA, 1653 bp, Cannabis indica
acctcgagaaggcgaaataattccatccaaaagctaaaaaatgaccagggagtttgggttgattggcataataatctttctgggctcatggttgattattttggggtttgttctcatcatcttcaccagatattgatgaggtaacaaacgatattcctagagtcattacggaggatcaagccaatatattgatggaaccaattgcggaggatgaagtgagacgagcactttttcaaatgcaccccgataagtctcctggcccagatggcatgacaccaggattctttcagaaatattgggatgtggttcgtcatgatgtaatcactcaggtaaaagatttctttgagtcaggttattttcctccagttttgaatgaaacaaatattgtattgattcctaagaagaaacaacctgagactatgagtgatttgcgtcctatatcactgtgtaatgttgcttataagatcatagctaaggtgttggccaatagacttaaaggtgttcttccttatgtcatttctgaaacacaaagtgcgtttatacaagggaggctaatttcggacaacatcatgatagcttttgagataatgcattacctgaaaaggaaacgaatgggtaagacgggtactatggcgctcaagcttgatatgagcaaggcatacgatagagtggaatgtttcttgagaagatgatgattcaaatgggctttccttggaagatgatttctctgattatgtactgtgtctcatctgttgtttataaagttactcatggtgggaatgttatgggaccaattaccccgagtagaggaattcgtcagggagatcctttatctccctacttgtttctcatttgtgctgaaggttttacttctttggtcaagatgtttgtgcaaaaacagtggttgacgggctgtcgtgttgcaagaaatgcgcccattgtttctcacatgttattcgccgatgacagttacattttttgcaaggccaatgagtatgaagcggctaatgtgctacgattgctccaagtttatgagaaagcttcgggccagaaaatcaactatacaaagtcggctgtattcttcagtaataacatccaagatgatatgaggattcgtttgtgtggtttgcttggtatggtggttgctaataacaatagtttttacttgggactaccgtgcactatgggtaggaacaagaatgctattctggggtttttgaaggaaaagatgattaaaagaattcaaggttgggagtctaaattcctttctaaagctggtaaagaagtgctactgaaatccgttgctcaatcgcttccaagttatgcaatgagtgtattccttttgactaaagaaatctgctcaagcttagaagccttgatggcaaggttttggtggaagtcacaatccaaaggttcaacaaaaggggttccgtgggtgagttggagtaaactatgcagacataaagatgctggagggttgggatttaggagcttacgagagtataatttggcgtacttgggaaaacagggctggcgttaaattacgaatgaggagtcattggtcgctaagctgtataaggcaagatactatccaaaaggcaatttcttgaatgctgagttgggtccgaatccaagcttcatatggcgtagtat

SEQ ID NO: 234459 - DNA, 2207 bp, Cannabis indica
ggtttgggtctggatcagggtccgggtctgggtctttggttttgatctcggtatgggtacgggtctgggtgcgtgtccaagttagggtttagggttttgggtttagtgtttagggatttagggtttagggtttagggcttagggtttaggggtaagtgtaaagagtttaatatttagggtttagagtttaagggttcgcttccaattccggttcaaattttgggtcacagggtaggtacgatttaaggttcgggtttgggtttgggtccgagtccttatctaggtctaggtccgtgtttggagttaagtccatgtcttggtcccaaatcaaaacaccaaccacatattgagtcaagttaaagttcttatacaggttcggttttttgtccgggtctaggtccgggtccaagtccaattcccaaatttaaacaccgactatggttcgggcccaagcctcgagtcttgggtcctgggtcccaggtccgaatctagatcctggtctagttctagatcatgccttgggtcttggttcaggtctctggtccaagtttgggtataggttcgggtcttgggtcctgagtcattggtctcggtcctcgattcaggtcagggtcctaggtcccggtgtgggttagggtcctagtacgagtgcaggtctcggtccatgttcggtactggtccttctcttgggtcttaggtccagggtatcgggtccagggtcccagtccgggttctagtcccaatcaaggttccggtctcgatcctagtctaggtctgggtccaagtcctgatctcggtctgagtccgagtccctggttcgagttcgagttctggtacgagtctgggtttgggtccgtgtttgggtttgggtcatggtttgggtctgggtcttggtctgggtttttgtatgggtttggattctagtataggtctcgggtcacggattctgagttaaaggttctaggtcgtaggtcctggcgcaagtctgggtctaggtacgggtctgggtccaggtatcgatcccgatctgggtctgggtctaggttcgtgttcggttcttcgtctagatccagttttgggtccaggtccaattcatgttccagggtcttgattcgagttcttgtaccgattttgggtcgagggttcgagtttgggattgggtcctggtctggaaatcgttccaagttccggtcttggtacgattcaaagatctagagaccgactgcgggttatgtccaagcctcgggtcgtgggtcaacaatcggatcccaatcttttgtcccaatctcgttctgattcagatcctaggttccagtctgtatgcttgttcgggtctgggtttgggaccgtgaccggggtcgtgtcttgggtcccagttccattcctggatcacaattctggttctaatttttaatttgggtcccgaatctaggtttgggtcctgggtccaggtgtgagtctccaatcctggtcctagtcttgggttcgggtatgggtccatgtctgagtttgggttcgatttcgtgtcctgagtcccaatccgagttttgattcgggttcacgtcctagtcagggtctaggtctaggtcctagtcaaattccaattcccgaactctaacccatactcggacttagacccagatcttgggtacgggtctgagtccgagtccgggtctgggtttgtgtccgggtatgggtccaacatcgaaacactgactacaggacaagtccaagccacgtgtcctgatttggatcacggtatcgagtcccagtctagttccgctttgggtctgaagtcctgatcagggtcctaggtcaggctctcggtctgtggtcgggtcctgggtctcggtcctagttctgatgcccatgtctagggtcaaggttccccatcctggtccgagtcctaggtcctagtccgagtgtaggacctagtcggggttcaagtcctagttcgttctgaaatcatgttcttatctcggtctgggtccagatctgggctcgatagatccgaatcctaggtcccggtctaggtcgaagtttatgtttgggtttggatcccgagtttgggtccaagtctaggtcccaagactggttaatgtttgagtcttcctcctggtgccaatttgagtccaagtccccattcgagtctaagttggggttccgattggggtcccagtcaaagtctaggacccggaccagttttt

SEQ ID NO: 234460 - DNA, 358 bp, Cannabis indica
agacgacttgagagacgagatttcgtactcaaatcagaggagactaagactttgagagagacaagattgagaggtagagagagaggtgtagagaaaagagatagattggatttggattttgtaagaagaaacttctgtagatgaagaagattcttgggtgaaagtgtaagagttgaaacactttgtgagaactcctcaaagaatctcgtctcgactgtattgtacctattcatactcaatacaataaaagaaaggaattacagtggtagttcggtaacgggagtagagccatagatcacatcaatctatcggacttgaactagtatatatcttggttttgattttttattttctacat

SEQ ID NO: 234461 - DNA, 1081 bp, Cannabis indica
aaaaataatctcttaattacaatccttttgtttaagggaaataccctttgattccaattacgatgatattaaagatttcaaataatttaggaaaatttggggtaaatttggaattgcggctgaacttggttaatttaattaaccgagctgtctacataccttctttgtgaaggatcaagccacttgtagttcggagtgcggtattttgaatttgaatataagaatttcggtagttgaccactttcaggaattttttgctatttgaaaaattagaaaaaatttctaggtctatgaccttttgtggaattttgagatgtgtgttttataccattttacggtatcggtgactgcacttagtcttagcaactaggttgcctacgtatccttttgtagaaatcaagtcaaacgtagttccaagttttaacttttcttttttatgaggtgaatgacctcttttttttttggaatgccatttaatttattatggctttgaagtttagtgcactttttaattttaaggtaaaattaccattataagatttttgtgaggttaatgacctctttaaaatttggtgaggtgaatgacctctttaatattccaagattaattttagtgagctcatttggaattttgtgccattttgtatggctttagaattttaccactttttttgtgataaaattgaactttgggatctttttattatttttttataaataaaaagattgcttggctgacattttaattatttattccaaaatttgaggaataataattatcttttatcaaatactatcttaaatttaaattttagttaatcaattaaaatttaaaatagtatctaagatatttattttacaatccaattactattttttttaagggaaactgatacaggttaaaataacaaaggtaacaaagttatgcaaccaaaggaggattttcttccatctataacaattcattgtctatcctaagggcgtgcagagataccccaggagaactagacaataaaactataatattagaaaagaaaacctcaaaactgagagttgcaacttccgatccactagtagaaca

SEQ ID NO: 234462 - DNA, 615 bp, Cannabis indica
gcaatattatttcttttatttagtagataattttatatacgatcaaagataaattgcaaagactctatgatctcttgttttttcaatttgatattagagatgacatactaaattaaccaatgcttccttagtgcttgggtattatatcagtttatatactataatgaaatcaatagtattctcccctgttttttaaccttttgacaaaaagaaaagaaatagctattttcataacattttcttgaaattttttattggctttgcttaagagcagttgtaaaagggaatctccttaagtgggagaagccacaatcttaaatctttgagctacaaactcaattgttgagttgtcttggatattttggaattgaatttcaataatttatgtgtttgatttgctgctgctgcgctcctctaattagatatgcaatagctttgatatgttctaatatcatcatacagaagtgaagatgcttagtttttttttctggatttttgtattttattttcttgtaatgtttgttaccatatacattgtctttaaaatgaacaaagttttccaagttaatggcattggccatagtagtagtattgaatatatactttagttatatg

SEQ ID NO: 234463 - DNA, 1705 bp, Cannabis indica
ccccatcaccactattatagtgggaaagtgatgatagagcagatgaattctgagcttttctccaatgatcaagggtggtggaggctgatgctaaaacatcgttggtagtacatcttcgtttcttccaaagaacttggtttcgagacttccaaatggcccaaacaagcatagaggctcggcatacctgttctgaatcacacaccagcagcatgttttcgaaccagctgccaaaactggtaggtgcagcaacatttataggccaaccaaacaatacccagcaggagtgagcaaactcgcaagttaatagtgaatgaatagctgtttcgggatgccttttgcaaactgggcattgactagagataggtacatgttttgttacaagattcacacaagtaggtagggagtcagagataacacgccacagaaaatttagtacctttggtgggatctttaagtgccagagttttcgccaaaaccccgagttatctggtgtgggggctgctggtttctcattctgcagcaaagagtacgcactgcgcacaataaaaacacctctgtggtctgctgtccatgaccaaaagtcggcccctgcagttcgacttaaaggaattcccaagattatgctagcctcatgagaaggaaacaaatcattaaccacttcaatgtcccaagcgcggtcagaaatctgaaaaagagagctgacaagattattttggaggcttggatgagtggaagtaatgcatttgttctgttgattcggtagccaaggagttcccaggatacttgtacttaaaccatctccgatagtgcgaatagcaccaaggcgaaccacatgttgagcaccccaaatacttcgccaaacaaagcttgggttgtttccaagatcggctgaaagaaagtttgaacgtgggaagtactttgctttgtacactctagaaacaagtgaatcgggattacacaaaagacgccatccttgtttggcaagcatggcaagattaaaatcatgtaggtgtctgaatcccattcctccttcttccttgggctttgcaagccgatcccatgacatccaaataattccacgcccttgattagtattggatttccaccagaagttggccattattttctctatctctgtacaagtgtcgagaggtagaagaaaaacactcattgcgtatgtaggtagcgattgtataacagttttgagaagaatttctttcccggcacgagataagaatttgccatcccaactattaactctcgcaatgactttattcttgatgaagccaagtattgcatttttattacggccaattatgttgggaagacctagataaaggctgccttcagtagcttcaatcatgtggagagtttagcaaactcgttgtcttgttgggccatctgtattggggctgaaaaagatagatgatttggatggattaaccttttgaccagaagcatcttcgaacaaacgaagtagattggcaatactaacagctgcgttctcacttgcttggcaaaacaagtagctatcgtctgcaaacaacatatgggtgattgatggagcacgttgagcaacacgacaaccttgtagtattctattagcctcaaatttctgaattaaagcagagagaccctcagcgcacatgataaagagataagttgagagggggtctccttgtcgaattccccgagatgggcaaat

SEQ ID NO: 234464 - DNA, 1072 bp, Cannabis indica
tttcagccattttcagcaaactatcaaagtgacttatctctctcaatctggctcctcttatcgaagcatttgtcttgctgctgccaggagctcgtcggcctccactgtgctagaagtttttcatttaaggtaagatttcttttctactgttttgtttgtccctcacccatttatctttcctgggtattttttactttgtcatgtaattcaaatatttgattttgtttttgttttcattttttatagattcacgttttaaaatctaacaatttgatttgggttttcatttttcagcttttgagcttttgggcttttggagtctaaacatcactagtattggtgattgcctctcactttgaaaatgtctttttctgcctctctttttgattattagggactcatcaaaatattttagatttgatatagtattcaatttaattcggtcactgtacaatgaaataaaaagatccttcataatcccaattaagctgaaaacaagagaagaaaaataagttgtaaagaaaaataagaacacccttagaaccctagaacccgtgttcgttcgtagatgaagaaggaaagaagaacataagaaaattcatacaaacctttgctgccattagaagagaagaagagacattttcggaaagctctaaccttagaatttttctttcagagtggctgtagcaagaagaagaagagaagaaattttcttaacccatacaacactagctgcgttttgatttactaatttaaaaataaacattgcaaaacatctgaaatataatgataaaaaggagaaaacatcacttatttattgaaaaatctacttggatcgctggctcatcgcttcctcttcagtctccacttagctcttatgatgaagatgagatgaattggtgaataagtgttactgttagtgaagaaaattagtgtttcttgaataattttcaactctttgtgtgagaggatagtggctaccgagtataagtgtttaataaagtttgagataataccttatatatatagggggctattatggtagggattgggtattttacctatcaatagg

SEQ ID NO: 234465 - DNA, 1744 bp, Cannabis indica
gctccttggttatcaacccaaatcactagagtagttgctggtttaatgtgaagttcagacagtaaattgagcagccatttgatttcggcagaggtgttggcaaggtttctaaattcactttcagtgctcgatcgtgccacaacattctgcttcttggcagaccatgaaaccaagttgcctcctagaaaaaccacataacccccagttgatcgtctatcatcaacacagctggcccaatcagcatcagagtaagcacaaacctccatagtagctactggtctgagaagtaagccgtgagatagagtgccttttagatacctaagaagtctcttgcatgtttcccaatgattcacagtaggagcatgaataaactaacttagtttattaatgataaaggcaacatcaggccgtgtcaaggtaagatattaaagagccccgagtgtacttctatacaaggtaatgtcttcaaatggttccccatcagccaaagataacttctgtgttgaacttgttggattgggacaacttttgacaccatctagctgaagccgaacaagtaaatcagtcacatatttactttgagagagatacatccctgcagcatctctatatatctcaatgccaagaagataatgaataggccccaaatcctttaaggcaaaagacaaattcaaatcagcaataagtttggaaattagacttgaatcgggtccagtaaccaatatatcatcaacgtacactagaaggatgatgagagttgacttagagccatagacaaatagagaagtatcggatttggaagccttaaacccccactgcagtagtgtgtgccgtaatttttcattccaagctctaggagcttgctttaaaccataaagagctttatgtagtttacagacatgagttggtttggtaggatcctcaaagcctcttggttgtctcatgtacagtttcttgcaaatcaccattaagaaaggcattgccaacatccaattgtctaaccggccatgctgaagttacagctagtgttagaacagttctaacagtaactggtttaactacaggactaaaagtctcttcataatcaataccaggtgtttgtaaatatcctttggcaactaacctggatttatatgtgtttagagagccatcggcattgagtttaatccaataaacctatttattgtcaatgacatgcatgtaaggttgatacggaacaagagtccaagtattatatcggattaaggcagtattttctttctgcattgactgaaaccactttgggtctttgagggcttgctgaactgtcctcggttcagtgggaatgagagattcaaccaatggatgtcttgttggtaagtaggcctttggtttgtagattccactttgagaccttgttttcatgtgatggattctagataggatacttgagtcatgtgttggcccaccaggctgctgcatagagacatcagaaggctgaactggattctgaggttgctggtatgatgaaactgcctgctggtgtgtttttggtggctggtttgggtgagtagggtgctgattagtgtgtatagggtgcgggtttggtgtttttggttgcgggtgattgtgtatgagctgctggtgttgaatttctggttgctggttattgtgtatgggctggtgtgtggtgagttgttgctgctggtttggttcaggctgctggttcaggctgctggtgagtggtgttggatttaagggtatg

SEQ ID NO: 234466 - DNA, 879 bp, Cannabis indica
ttggacctgaactcgggacccgatcccaaagccaaaccaaaacttgaactcaaacaaggactcagaccccgacccagacttagacccagacctgaacccagacccaaaaatggaactggaattggaactagacaagtaatgggacaaggaccaagacctgagactagaattgaaatgaaagcgaaacctaaacccagaccggttgtcgtatcggaacctggaccgggacctgcacccagaccgagacttgggaactgggacctagactgggagctggacctgaacctggacctagacctggaatgggacccgagacctagacttgggacctggacttgggctagggactgaacttgaacctcgaattacaactgggactcggacccagacctaggcctaggccaaaatcaaaactcgagatccagacccagacccaaatccgtactcaaacccagaccaagacctgtagccgaactcaggacctgaacccagacccgaacctaaactcggacttggaaaaggacttagaccacgatccagaccttgacctgaacatggagttgaactgaaaccctgaatcgaaattggaattaaaacttgagaaggactgggaccaggacccagacgtggaactataaatcaaatgaaacctgaaccctaaccccgatcataacctgaatcgggacctagacccagaccaagatttgggatcgagacacgaactcggaccgggacccaaacccagaccaagagctagacccgaacttagagcaagacctagactgggacccgagacccaaacttgggactaggacttcgacttggaccctaattcaaacctggagtaagaattcagtcccggacccagactagaccgga

SEQ ID NO: 234467 - DNA, 2021 bp, Cannabis indica
tttcgtttttttttttttaatttttttattttaatttttcctgctttgattagctacctctttcttttttactatccttatctttttcttttgtttcttttaattgtttcttcttaataatctctttctctttttttaattccatttattctccatatggtccacaaacattctataaatacaagaaaaaaaatacatttaatctcaaatactataatatatattatttatgttataatatttagtttataatgaactataaattatataatttttcactaaatactataatatatattactcttataataatatatatatgtcacatttaaattaatattatattattaaatctaaaaaaactcatattaatttaaattatttttaaattagtatttaattggaagaacaaatgtacatggggtatatttactgtcaattttatttacataaataattaactgcaacaaaattcaaatatctctttttttttttttttattaaataggtaactgcaacaaataaaattatataaaaaaaattgccccaattatcctcttattatataaaattatgcaaaagtggagagaaaataaattttagatatcatggcaagtgtttggatttaaaacttaatcatctctcttttgctaaaaatatattactcttttatcatggtaattttaagtctatctattatcccctttaaggccttaaattgttttcaaagtcctctaatttgtttctgaatgaaatgaaatcaacattatattgttgtggcatgaatgaagaagaaattcaaataattttggatgcttcagggtttgttaggaacaatcttcctttcaaatatctggagatttcgatatgtgctaaaagactttcagtttcatattgtgaaatagtagtggaaaagatagtgcaacgaatcagagtatggggttctcagaatatttcttatgctggtcgaattactttgattaatgcaattttgataacgacacatttatattgggcgcaaataatagttcttcctaaggctgttctaaagaagataaatgcgatatgtagaacttttttatggaaagatacatctgaagcgaatgcaccaagttaaacaagacaatttatgagattgttgggttcatataccatttacataaataactcaagttggtgaaactatcaattaaccataaaggttatattacaacattcatttgaatgaggtgtattatagaagtacttatatttttttataacaaaaatttaactttataacaattataaataaattataaaacaatcttaaaataattataaataaataataaaacaactataaaaataatttattattttcactaaaaagtatttttataaataaaaaaaattataatttttaaagtgaaaatttaaagaaaaaacaaaaaattcccattttaattaatatttctggaactaaaaagtacagtagtacatattgaacccttgaatttgagagttgaaacttgaagaaaacccttctttgggtgtaagctggaactgaaactgaacctaacaaaacaactccactctctcccaaacccaaacatgaggttatctttctttactttcatttcttgttctggtttggtaatcatggatattggataaattcctgttcttgttttctttctttgattaaagtaaaaaagttgttttcttttttctgggttttcaacagccggcatccggaggttctatgggctcagagatcggataaagtttacctgacggtggctcttcctgatgccaaagacatcaatgtaaagtgtgagcctcagggtttgttttctttctctgctttgggagctcaaggagaaccctttcacttcactttaacactttatggaactatactccctgaggttagtgagtgagcaataatacccatttctcaaaatattatctttttgttgttttaatttcttaagattagtacccatttatacccctattcatgatggaggtgggttttt

SEQ ID NO: 234468 - DNA, 969 bp, Cannabis indica
tttttttatcaagaagaagaaaacttcattaacaactcgcaaatacaaacaaaataaacttctcaaaggagaagcaacaaccacacaaacctaacaattacatatcaatctttgtagtaagttcttctcctctctagaacatttcctatctttaatcaagaagagtctatatttcacatcactttaaattttgttcactaaataattaacagagttagaataaaaggaaaacaagtaagtgtttcagttgctccataagtggtagatcgcggctgctaacattagcattctcactctgtccatgatgttcgacctagtactacccaaccaaacagtccagctttcaaagttcttagacaaaccatcaaaccccagccaaataaagatcaaagaaagcacctgtcgggaaaagatccagctgaaagaaaaaatgtggttgtggctcttagtttcaatgtcgcaaaccacacaatttttgtttgggataggaatgttcaattggcacaacatatcccttgttagaagcttggattgagcagcttgcgataattgaaaagcatgttttggtacattaactctgcaccagattgcaccagtagccgagaactcttcttggtgcaacatgctttgttacagcctgctaacattaaatttttctccacctgtagcaataatttcatctttgttgtaagttgtacgaagcctacaaagcttcctccaataccgactcgtatccatgctaaacttataagaccaaacatcactccctttgagataaatcgacttaatccacttaacctaaagcatgtcttttctattcatcatgtcccataaaaatcttgttaaggaagctttgttcactttgttccatccttaaacccaagacctccataggcttttgtgaggcataccctctcccaacttatcaagtgggctctagttcgattatctttcaacccccaaaggaaa

SEQ ID NO: 234469 - DNA, 952 bp, Cannabis indica
gtctagtgttgggtgtgtcatacgagaggcaagtggaagttgtgtatttgcttctgctactgttctgccgtatgaggcttcccctctccgtgttgagcttcaagctattcaacttgggttgcagactgatatacaaaggcgtttaaaccggtttagtattgagtcagattgtcgggaggctatccagctaatccataataaggaggaggcctgtagggacatcgatggaatactaaacaatattagggacttgatgttagatacttcagttgctggaatttcctttgtatatcgagaggcaaatgaggttgcaaatgtattagccaattacgctttgattaacaaagtgagaactatgtgggttgtggttgatcccccttgtgcaaggcttgccctattgcaagacttgccaaatcctttgtaatgttgctactatgaatgaagttaatttttttaaaaaaaaaataaataaataaataaagtaaaaaatacatgcagttagaaaatgattatgagaggtttggccataaaaattgtcatgtattagattttgtagatataattaatctatttgaatttctatgcacatcaaatttaaccagacatcaagtaagatacagtatcaactaccaaaataaggaatatcactgaacaaatgaatagaataaaaatcactattacgatcctcccactcccactataaattgtttttttgttaaagttactattaaaaaatttctatttaatattagaatatctttattattagtacaaaattatttaaatcgatttgctttatcttacttactgcttgttgactgtatattatcacaaatcaaaatgtgataagagtgaatattctaaatataatcagattatgatttactaattaatttatttcttaattgattaccaaaatattctgacaattaacactacaaaaaatagctac

SEQ ID NO: 234470 - DNA, 1779 bp, Cannabis indica
cagtaagaaaagataatcataaacataaacatataactagactgcaaccaagagcccatacacgtgattacaatacactaactgagtcaggaacattcccgacaaagtatgactaactgcgaatccctcctaactcagtactctaatcgtactgatgtggtagcagataactcatactatctgatagcctagcatatatatgtcggcatctcagtgcaactctacgtagacctcactgatgccctaatatgctaatttgatggctatagatttgcatattctgacggcaactaacatgtacgttgaacatgtatacatatatgcaactattatactaatcttacctcgtatccaaattcaggtgtgtcgaccaacctgagtggaatagctactcgacgtattacaggcccctaaatcacattattcgtaaaattggtgagtgacacactaaattacttttcggggacttaaacttgaaactaaaagtttcccaatcgataaataacatggcaatactctaaatattgcaaaaatgggaaaaactagggttcccaaaaatgccccaaccagtagaccagttcacaactgaaattctggttctgcatggtttcctagggaccaaccagttgaccggttcctacaagtccccctgaaccagtcgaccggtttactgcaagaaaatcttaaaaatacactactctctcaaatcaaccccaaactttaccaaaccttccagacctgcttaatataccataataaacataagtcaagcaacaaaataactccacaagctcaaaaccaaaaattaccattaaagaccaaagtttgagttctaaaactcaaactttgtctaacaaccaaatcaaaccaccgactagcttccaaacatctcaaataatctaatcttaacctcagaatataatcgcaaacaacaagaattatcacagaacctaacccttagaaaaatcataatatacttaacttgaaacttaagaaaaacaacaaaggatgagctacaacattaccttgggttagaaatttcactaagagctttctagaaatccttaaattcagcagaaataaagaaataaagctagtgttttatcccaattaactaaagttatattcatcataataaaacttatctaaagctcacaaaaggataaacactataagaaaaatggactatttcaacacaccaatcttggtgggcctgcgtgtgtgtgccgagattggtctctatctcgacgagctcttgaaaaactaccataattgattagaagaatatactttttttgaaaaaaattataaattttagaccctatctcgacgggtccagcttggaccgctgagattgggcacacggttgtacccaatctcggcggtccaatttgggcccgtcaagatatgcccaaagactaacaaaaagtagacaaaaccctaatcatctctaacttctcagccgcacctttattcactctctttctctcatcttctcccttacaccagcagacaacaggtctcaatggagtcctccatatctttcttctttttgtttttcatgtgcggtggtggcgccaatggaaggcaaatggctcgacatcgtgaacggtagggggattagtccttctctctatgtgtttatcgttttattagttttcttcttcttttgtattttcttttcaggctgacgcgtacgccggttctagggagagctgctccaaagatgacgccagagctagggacgcactgatgttggagttaagaaatattgccctc

SEQ ID NO: 234471 - DNA, 1603 bp, Cannabis indica
ttagccgatatagctgtgatgtcccattgtcgatgttgatcaataagatcagcaacctgtagagaagcatcagatcctgtgaaggagaaaggagtgaaagtagtgtgaccaggaagccatgaatctgatttacaagtgatgttttcaccagaacccactctccatctcaaaccttgaactaaaagctctttcccccaaacaatacttctccatgttaaagatggagtagcacctaacccttctgcaaggaagtccccatttaaaaaatatctgtgatgtagaacacgtccaagtagagagttcggagattccaacaatctccaagcttgtttagcaaggagtgcctggttgaaatgtatgaaattctgaaagccgaaaccaccatgaattttagccttacaaagagaattccaatttttccaatgaattgcattaccagatgatgttgatccccaccagaagtttgacatcatgctttcaatttgattacacaaagtgacaggcagacggaagcaactcatagcataagttgggatagcttgcacaaccgctttcaatagaacctctttaccaccaactgagaataattgctctttccagctgctaagtaacttccatattttatctgtaatactgctaaaaagctttgttttatccctaccagcaaaagatggcaaaccaagatagtcctcatgacaaggctgtatcggcatgttgagcagttgttggaaaaaatcttggttttgagactttgtatttggagagaaagaaagcacacacttgtcttggttaaccacttgacctgaagcccttccatagatgtctaaaacatgcttaatagaccttgctgattgatgatttgctcgacaaaaaagtacattatcatcagcaaaaaagaggtgtgacaccgaaggagcagttctagagacttttaacccatgcaatgatccattttcttctgcagtttgcagcaaccttgagagtccttctgcacaaattaaaaagggataaggtgagagtgggtcaccttgtctaataccacgtgtaggaactaactcacccagcacttgtccatttaaaaggaaggaatatgtgactgattgcaagcagcgaagtattaagtcaatgacaacagatccaaatcccatttttaacattacttgagcaagatagggccactcaacacgatcgaagacgttcgacatatccaatttaattgcagcataaccttgtgtgcctcttttacgattcttaagggaatggagcaattcaaatgcaacaaggacattttctgttatcaacctttgagacagaatagcactttgatactcgaagataaccaaaggtaagaaaggctgaatacgcagtacaattgatttagatattagcttgtaaagcacagtgcacaaactgatcggcctgtattgagtgatgagctgtggctttttgacctttggtattagtgtgattatggttttattaaggagtgtaggatccgcaccattgttcagcacatccagaattgcatccgtgacaagtgaacccacaatgtgcaaataattggtaaaaaacatgacggacataccatcaaccccggggcttt

SEQ ID NO: 234472 - DNA, 1311 bp, Cannabis indica
aatactaaaatacaaaaacatcccaaattataaaatgactaatctacccctcccttaaagcttaagttatcacttaacttaagggtattttggtcatttcaactcaacattcgtacttcctgatattttaacctagtctgatataattccaattcaattcatcttttattgtcgtgacatttctgacctttctgtcaagttccacagtttcctggcccaaaatattttattcaaattatggtatctacgatacccacatattccaatacaatctccgtaattaataaattacgctttattattcattaattcatatttccctaatcaactcatgattagtttaagtaggattataatcctactctaatacccacataatcacatatttaataaaatatggccaaataattatcaatacaattctcgggatattacatgtgtacttcatgatgtaacgcttaaaattgttttctctcacatcgggacttcaaccgaacccatcaaagtcagctttttattgtagtggtatgcaagagactgaaatttagaggataatcaatggaactggatttggtaggcaagttcttcctttcaagtacttgggaattcctatatgtactaagaagatttcagggaaagaatgtattctacttgcagaaaaaatggcagctagaattaaaacttggagtactagaaacatctcatttgctggaagagctgtactcatcaactcggtcttactctccatacatacttattggagtcaaatcatgaagctcccaaggaaagtaattactgaacttgaatcaatatgccgagcctttctttggaagggtcaaagtatgatgcaaggtgcaggacttgtggcatgggagaaggtttgttctccaaagaaggaagggggtgttggcttcaggaaaataccagaatggaatcaagctgctttatgcaagttcgtgtgggaattaacaaataaagaagataatttgtgggttcgatggatacatagtgtatatattaaatagggagattggtgggaatataagttcccacaaaatggcagctggtattggaaataggtggtgaatgcaaaggaccaaatcaagagcatgatggatattcaacggtttgttggaacccgatataccattgctgaagggtataagttgctctgcccagttcagccgaagatcacctgggatagagaggtttgggaaggctaaatgttcccaaacattgctatattttctggttagcaatgcacaatcggttgagaacaaaagcaaggttgaaagctcataacatagtgca

SEQ ID NO: 234473 - DNA, 899 bp, Cannabis indica
aaaaattaaaaaaaaaaatttgtggtaaaaataaaattgaatttgatttaagtattttatatataaatatatttttgatatagtataaaaagtgatatttttcaatattttgttaattaatagttaaattaagcataaaaatataaaattttcttttattattcgttattgaattaaaatttaatagtttaatattttttatatcgaaaaaaatattacatatattagggtcagccctaggtataggtgggctaggcccgtgcttagggcccactaattttaaaggcctaaataaaaatatttttaaaaatatacatatttttttaataatttttaaaaatactatttattcttatagtaagggttcaaaatttttgtttacttataacctatttcaactcaaggccggcctatatatatatctatatatatatataaatgaaaaatcatgacttcaaatttatattaatacaaacctttggatgatcgatgttgcattggaaactaaatgatgatgcctcttttattttgtcctaagttaatattattcacacacacacaaaaatagattaaaataaaaatttgttcatattattattataaagtttgctgatatgtctcagtcaaaaatctcagcgccccattaggatgacttagatatatataatacattggattgtgcatgagattttatttcattaaaaaaaagtaataacataatttttttattataattttagacagatatatgtatgagtatcacttttattatcttcttttaaaattatgagctcatttttaggttagttatattattattttctttttgtctaaaatctatttaaaagttatgattaacacaaagagaatatcacatacttatcagaaaaaaattagac

SEQ ID NO: 234474 - DNA, 1730 bp, Cannabis indica
ttctatgcatttatagaagatatggattatgtatctatgattagagctcccactcaattggactaccatgttctcaatatgtaagtatcgggaagatccaattgttcaactttaatgaataaatcaaagagcacaaataatacaattgaactagaacctaaccatcttaggattgagatcattgatctaagatcagctaagtaatattgacttagatagatattacagtaagtttatgatatcttatccaagttcaatattcgtccagttcgatgtatgtaatgccctgatacttaggcgcgctacaatgatttttcaattacattgccatctttgctaatcaaagaaaatttcttgaaaatcatgtcaaattaaaattttagatttaattactaaaatttataaacttttatataattatttgcaaaagctgggatcccgtatttaaacttttacaaaagattcaaaatatatttaatcaggtcgcacaacaactacaaaataaaatcccaaatgtcttgagacagaacaatccaggtcgcgtcgccatgacatgtacaacatcatcttagctcgaagcttactcctgttcagccttcgccttttacctacacatgaaagtaaaactgtgagtcgaaaaactcagtaagaaaagcatataacaaatcatataatatcgacttgtatctagacgcccatacacctatttacaaggcttaacaaatgagtaagaactttctttactagggtacaaccactgtaccacatacactacgtattgacactgtatgagtgttggtagggtttgtttcgtaccctggtaacaccataatgtactctctaaacattatacattataccaatacactctgtaccatttccgtacaagtgttggtaatgtactaaccataacaagcatgcatatatatatcacacatacatacattcgcatatatatatcatatgttctacgctattcatacctcgttttcgaattcaagtgagttggctgacctaaacagaaaacttcatgctggatggatgccctaatcacataacaaaaacaggtaaacaacacgcctaaaactttaattcgagaaacccaaaccttcaactaaaggttctaccatagacaactgaaactacaacaccctaagtaaaaaggaatcacccaaccaaggctctaaaatggacacgaatcgacgaaatggattgttcgagaaacctgtcccagaaccggttaaccagttttacaggacctggcaaaccgttaaccggtttgcaccaggtttcccgaaacaatccaaaacctactcaacccatgtccaaacctcacaaaaacttccagaacaccaataataacatcaaccaacataatcaaagcaatagaacccaaaaattcacacaaaatcaaaaagtgccatggatgaaccaagcttgaaattcaaactcaaacttgtgcgtccatcacccacaaccccaaattagctgcaagaactccattctaactaaaattaaacttagaaactgaattataaacaaatctaaccctaaccagcccaaaattcacaattttgtcatattcaaaccaaaattaaagcttcaataacacatagggttacctttgcttaaaaccacttgaatcttagctcaatacacataaaacacaagaattggagctagttccttctagtttggagtggccgaacatagaaagagagagagagaga

SEQ ID NO: 234475 - DNA, 1630 bp, Cannabis indica
atgtaatattttcctattaatataataggtcttttactctaaaaaaaataaaaaaaaaaaaaaaaattaaatgacatctttaatttcatagagtttgacatatttaatttaaaaagaaaactctttataataaatagtattagttttctcaattaattttcaaattttaattggaagatttatcaagtaacttataaagtaaattataaaattctcttatacacttataattttctttagctcctattttttttgttattttttgcttagttttgttaattttgttttttttaatcaaataatagctttgaatatagtggcaactacaagtgagatacggtgataataacggctttaaaattatatgataagatatctctattttatgagaggattcatcaatttttaatattttctttagtataagatatctctttaattaaatgattacaaataattaaaattaaaaatcaaataagttgattaaaatttttaaaatataaatataaatttgatcagatacaattctatttatttacccattattaactaatagatttatttagtatatttcttaatatatataactgtaaatttaaagtgaataattaactcattgtttatttgtttatttattttttctaatacaaatctatttttcttttttgattagtggttaacctgggaaccacaacccgaaaacaacaaacatagaaacagaccaaacaaaggccaaagaaactacaacaggccaaacacagccagcccctgctaactaaagcaaagaaaaagagagagacaaataaaagaaaaaaaaaccgaactaaaaaactagactaaactacaacatgaccatctgcattaaccagttgcagggagtcatcaaaactggccaaatcgataacccaaaacttgttgttacgatttgcccattgagccacgagatgggccacacgattgcaggatctaggtgtccaaatgatttcccacagattgagattagcagccattgaagagaacctttgaaccaggtcctggatgttgtaatgcaggttatgtatctcaggggatgtgctttttaatgctgcgacaacatttagagaatcacattgaaacacaacatttttgtcaccgagatccttggctgctgccgcaccagcacagacagcgtaaatttctgcaggaagggggtcgcaatgactcattctgcaggagagaattttctgctagtgatctcccgaattctaatacaaatctattggcaatgatagttatgagcaaagtgagatactatgataaagatgagaacgaatttgaatgtaataatgaccacaaatgagatacggtgataatagtaattttaaaatcatatgataatgaactttctataaatttatcaattgttatacaatttttttgaattctaatttaatttattcatacaaaatatatatttaaaaactaatcatttaataatatatctataaataaaaaaattaaattaaaattattatttattatgtttaaaataattaaaaaaattaatattctacaatattaatttattttagctatattactaagattaaaaaaaatgaaagtttactaatatttttttaaaaatatattt

SEQ ID NO: 234476 - DNA, 686 bp, Cannabis indica
cataaagaaattaaaaaggaatagagaaagaaattgttggtggaatgactctggatcttcattttgatttcctctgctcttcctgccgctttctgctgtgttttagggttccaaatcgctttccctaatttctaattgcaattttctatttataactaatctttagggttcgttggatgattttgcccctggccgtacgggatctcgccgcggccacattgttcctcgccgtggccagataggcttccaaaaacacgtttctgtagttccactatggccgcggcgagggtgtatctcaccgcggcgactagagcttcaaaaagtgtgctttctgtcttcgagatatagccgcggccacactgatctagccgcggccacactgatcttaccgcggccaaaattgcattaatctgaaaaatagcgttttccttggctccgctcgtcttttactgtacttttgcatcttgaggcctctgttattcctaagaacctgaaaaacatagaaaacaagcgtaattccgtcctaaaacagtgaaaagtggtcataaaattgatctaaaatatgggctaaaaatagcctaacaagcccctactttcgacaaaggcgtgttgttggtattatccaaccactaatagccaatctgactaaagtagaagtacccaatccaattctgctttggagcaga

SEQ ID NO: 234477 - DNA, 2802 bp, Cannabis indica
gatggtaacaacattactgttgtcggtgaagcatggctgcccgatccccacaatccctttgttagctcttctcaccctgctctttcgggtgtcaaagtgagtagtttgatggttccaggttcgaggtgttgggatgttgagttgattgctgacttgttcaatgaaagagataaaagtctcattcttcagattccgttacaagtcgctgagtgcatagatcatgtgatatggagttctgactcttcggggctttactctgttaagtctgcttacaatctcttacagcaaattaatggtcgctggagcgaagaagaagcctcagctttttggaagagcttgtggaagttaaagatccctccaaagatcaaaaacttaatatggcgtgcaggcacaaactgtctcccaacgatgacacaccttcgaactaagcgtgtggaggttagttttctttgtcctttctgtcaaagtgctaatgaaactaccctgcattgtttggtaacttgtcaagtgatcaccctggcttggaatcgtgtggggataggcactcaagtggccgaggacaccagctttctcgactggtgcaatgcggctttttctggtgcagacagcgagaagagggggttaatagcggctgtttgctgggctatctggggggcgagaaatggggtggtctggaacaacaaagctgtaagaatcaacgatattgtctcggctgctacagtctatcttaaccaatggagaaatgctcaaaactctttgatagagtcatccgaaaatggttttataccaggagatggtttggagcattgggtgtcacctaatcacaatagtgttaagattaatgtggacgcggcattatttgagagtaaccacagctttggtttcggcatggtactgagagacagccgtggggttcttgttcatggacgcacggtgctcaaacaaggcgatgtgaacccagctttagccgaagcaatgggtgtgagggaagccttgagctggataaaaactctctcattacatcagtgtgtgttggaaaccgacagcctagtagtagtccaagctattcggagctccattgatatgatttctttattcggtttggtgattaaagattgtaaagaattgcttgctactttgagaaatgtttctatttttttcgttaaacggtcagcgaactcagttgctcatgcttttgctagagcttctagttcttatcctgattgtgttttcagtttgggggatgtcccaactgagttgcttcctagtttggttgctgaagttcaagtttaataaagatgaatttcaattcaaaaaaaaaaaaaaaaaaaaacaagttaccttgtatttgcttatgatagatgataattttagaaaaatccaaataaaagtttcataatagagccattagtgttatactttatccttcccttaattatctaaaatttttaaaccaaaatccaaaatttaaaggatagcataacaaatttaccattaaagaatctaagattaccccatacaaaatttaaaaataaaaaaatctattttttttggcactttgaatggaaataatttataagaaaatcccaactaaataattataattatttataattttttttattgaattttttccatcataaataattatcatgttaggtaatcattcattttaagtaataaataattgtcactcaactaaggtcattatcatatttagatttgataaataaaaaataaaaacccaaatttaagtctgaaatcccaacttttgtttttcagcatattattaagtctctatatctatactaattattctattttaacaatttatagactttcacattttgacaatatgagttttaataaataacaaaatttgcatgattaggaagtcaacaattttatttcaaaaacccaaatttttaagaaagatttttaaagtaagttagaactagatcaattagttaataatataaatcccctcaaaataaaaagaactcaattttgtatttgatttcatctttctccacaatattttctccatggaaagtttgtagagaaaaactcataaagataaaaagagactaggaagagaaggagatagagagatatatagattgaggttaatatttttggccactacatggttagttaacaaacaaccattattgcatggtagtcacttaatagagataaaactaatattttagtgtataaaaatatttatatatattttttaattttttcaatagtaaataatataattttatcaattataatcaacaaaactaatgaaaaggtccattaggttatcacattttaagatgcaaaatggtttgaaggttggtatctcatctcaatatacaccacaagccttggtataaaatttgtcagaaagagaacatattcttcatagtaatcaatctaatctaaatctattgctcttcacatcaaaaaatcaaataaagttgttccatatgtgtgattgaagttggctttttattagacctatataataattcaaaatagaacatggaaactcataaatgttattgattctgaaataatattttttttcacttctttttataaagtagtgaatattaggggtgggcatccaatccaatccaacctttttttcctcatccgatccaatccaattagtaattggatttggaaaatcatcatccgatccaatccaattagacctcaaaatccaatccagtccaatccaattactaattggattggatcggttttttaattggatatccaattacacacctaaatttcaatatt

SEQ ID NO: 234478 - DNA, 644 bp, Cannabis indica
aattattgaattattttttagccaaaagtttattgcgtgatctaatcaaaacaaaaaaaaaatagaaaagaaatgaagtatacgtccacgcaaggtacaaagtcgatggcagcgatccgtactgtatttctaagtaaaattattaattttgtattactaaatttattaactttttactagtaaaattatttacacattgcacaaactaaccctgtttttgaacaggatgtccttgaagaccatgcaatttatgcttggaaaaaacgccacttaaaaaaggaataaacacttggcttagcgagacatgccgagaactacatgtaacttttaatttttaatttataatatttttaaaatgaaggtaatattatgtttttaacatattatttaatcacgagaaaatgaatgaagaggttgtcaacttgacagaaatagaaaatgattccagcgatggattttctagaaaattaaagtaacttaaatttcttggggattggtcagactattgaagaggagtgagttatagattgaaaaaaaaaacgatattaagttctagtactcaaagtcaagctcaattacaaggctcttctccatccattagtctagaagatatgagagtcattcctgagttgatgttaaaagtg

SEQ ID NO: 234479 - DNA, 1044 bp, Cannabis indica
cctttatatttatatatagatatgattatcaaatctcataaatgttgtagaataagaaggtaattttttttagaaagacttatttatggtccatcagattaattgctaattgtttgaaaattcccttcaaacattttctcatataattaataaaatatgacttttttttgtcaaaaagaaaaaatattaagtaaaatgtcatttgagattcccataaatattttacataaatatataaatgagtaaggttgaatcatcaatcaatttatcaatatatataacggtgcatttttaatgggtattattgcgaaattttatgtttttacattatatgagttagggttcttccatcagccgaaaaaaattaagaaaaaaattttttcgaaaaaaaaaaaaataaaattaagtttgacttaagtattttgtatataaacatatttttgatatagtgtaaaaagtgatattttttgattttttttttttcaattaaatacctaaattaagcatataaatttaaatttctcttttattattcatcattggatcaaaatctaataatctaattgttgttacagatttacttacatacccttaagttgtataacactactcatagggtttgacaaatataccctttacatcaaatacaacaaagatcaaggctaaagaacataaaattagttataactgaaacaattacaaaaatcagttacaaatattacactagggttctaccctggaccctggcccgaaccatgacctggacacgaacacggaccttgaaccggagccggacccagaccggacccgaacccgaccacggacccggactcagacccagacccagacccgagacccagaaccgtagttggtgttgtgatcgagtgtattaaaaatatattataactttacacaatcaattaatacaagtcaatgccaaacattgtattgtattaaataatactaatacaatacaatataatataatacaattttacacaatacaatacattaaaataaggcgtaccaaacctataagtcatg

SEQ ID NO: 234480 - DNA, 873 bp, Cannabis indica
aaaataatatttttttataagtataatttttttccaaaacaaaaaaatttgcccgctaatatttccactgttgattatatataaaaaaattacaatttttgtcaagcatcaaaacaaaaatgctatgagtgagagtgagtaaattaaaagtagaatgacgaacgatataggaaaaattatctaaaaggccaaagtttttctcattcccacatcaacttctttttttatgtggttcaaaagcagttgtctgagaatggttcggttcggctacgtttcagatttttgttttcatttattaatttactattattagtttaattctatttaatgttttttatggggttagaatagggagttcattccttaattaattttaatgttgtgatcgtgtttatgtgctgaaactaatttagtttttccattagtcttgtcttttgacatggttctttagtcttatcttttgacagggttttttagttttttttggttttgagtcttgtcttttggcatgggttttgtagctgagaattatcatggtgctatggtagaagcattcaagaagggaaagattggatgtgttcaacaagaaaatgctgagataatatgcattaaagaagcattgagttggattgcaactcattcgtgggatagagtcatgttggaaacagatggtgtgtgttcaagcgatttagagcggtattttatgcttttacaatttgtgttttggaaaatgatctgcaaataaattggctcattccttgacaagagattcttgtttctctatagatcatgtgcttcagttggagactgttcctttgaagtacgttctattattttgaataaatttattaattaatagatcttatgattttt

SEQ ID NO: 234481 - DNA, 1017 bp, Cannabis indica
attaacaatacacaaacaatactaggaaataaaaaaaatatgaatgaacagagtattaaaaccacaaacaataaagtaataaaatcaacactaaaatatatattggttcaagtcctctagattgatatgatctatggctctactccagctctaacaccaccaaatcttctttattgattaagcaagagtagcgtacaatacagtcgagatcgattctctgttggatcctctaaaagtattttatctctcacactcttacccaaaaatcgtcatcatcaagagaagattctacatacaaaattcaagcctaatctctctcttttctttgtacctctctctctttacctctcaatccctctcttcaaaatcatctcacaaaacttttgatcacttgcatcaaaatgataaggtaggtgatatttatagattaaggatatggatctcaaagtcggtggttgcgatttaaagctgttaagttagttacgatttaacaaacataacaaactcctcgtaacaatatctccatgttagcttaagttaaagtgcttctggatggacttgcgcttcctagaagaaagaccaaagcttacactgaagggactttctagataggaaaagcaacaactagagtcgattatccggaactctcttccaagaggtaacagctagccattcggaactcatttacggaggaagactagctttcctgaagaatcttctagagtggacaagatagacttctgggaactcctttttggatgacatctatctttctacaagactcctttcgggtggacaaattagacttctgagaacacccttctgaatgacatttaacttttcataactaaaacaacttttggagattttttttatcaggagaaactataccacaaatataaaactagagattaacccatttcattttattaaaaattataagttcacttaatgccataaacaaaataataaataaataaaactcatacgttaaataaccacttgtattaacatata

SEQ ID NO: 234482 - DNA, 1461 bp, Cannabis indica
aaaattacatatatatgggttttgttatgtataatttaaaaaatttgattcaaaatgttgctcaatttttttattatatttatattcatacaaatatatatcaacaaaattgtaaaacatatatcataagctataaaatctaactatcatctctagcctgcatggtcattttggtttatacaaattttatttcatttttttattctcaattattaatccgataataacaactatagtagtaattacaaatgagatataatgatagcatcagttttaaattaatgtagtagtaactacaaataaaatatggtaaggacaacaattttaaaattatgataaattttttatagatttgtcagtaaattttttgtagaacttattttttttttttttatatatataatatataaaaatattaaaatttaaaatttaatataattttttaaattaattatcgctaaaaataaatataaccgcacacaaagcgcaggttgttttctaattttaaatattaccgaacaaatcttaaattgaaccaaattgtccatagctgcaatgcttatgtgggattgaaaataatttattagtgtttgcatgaaccaattaatatgctataactaaactaaactaaaataactaaggcaattattcatttggcaaagacgctcaactcatcaactttggatgtaatattagcaaaaactaattagccctaacaagttttttttttgttcgtttgaatttctcacctatattattttgacaattcttagcctaaatatgtgacacaaaagcaagaaccataatttaattacatattggcatatgtcacgagattcacatacaattttctgtcttgaaatgtgaaaacccaaatccacctaatagtggtcctatgtatatatcgaccgaccaactatatgatacacatatctaaattttgttttaagtaataatttgtcaatatctaaaaagagccatactttcttaaaagttaaaacacaagtatggataataatatatatacatgtggcaattaattccaaaagatttttatcactattctcttccaaattgatatatataatttgatacataccactcaataatattaacattgtcattatttttgtttaacatgctttttttcttaattattattattattttgtttttttcctatatataatatacatatacatagtagatgctaaaacttttgttgaattttgtaaaatgagtttacataaaagtaagagagttctactttattatatttgcagttaaataatttaatcatgaattgtctttgtctgccttgtgcatctttggtgtaacagaatcttttttactttgactaatagtttacaactttatatatgtattatttctttggagtaattcttatatacaaattgcttaaacaaagtatttatacaaatttatatctaacatgcatta

SEQ ID NO: 234483 - DNA, 2566 bp, Cannabis indica
ctggttgtgattgctatggttaatttctgtttgtatcataagatattatgaatgaaacccaattcatagctcaacagcatttcatatctagtttgatacatattcgtttcttattatcatttttcaccctgttcagttttggataattaagcacatgagaaaaatattgaatatgaagttttgatttatttaattatggactagttttccataagcaactgcctgtaatgtttaattattacttctaacccagtgaggaaaatgctggcaactaatgcatgaagttaaagtttagcagttgagttaagtttttttgccaagtctagctttattacatcaaggatcagtgtgctgaacatattatagcatcaataaatctgggaattttcatcattttagcaatttggaattttctatactgtagtccagaatgtagtgaaaatagaatacaaattggtgcttaaaaatcgtaggtgcatcttctaattatatggtggttgaaggctactcataattgaatatagtcaaggtaatctttatgaaatcaagtttaagctaaaaatatataggctactcatattggatgatcatgtgtttctacttatggcatttagtggtataatattctttgatgatgattactaaacaaagtaactttaggaacccgagaccaagagtttttggtgattctttgtgaagtctttgttgaaaatcttagatgataagtttgtaactgcgtctttaatttgttgatagttcattgtttgctaattattgagaatggtgagtttgacataatgttacctagttgattattggggatgatattccctataaaaaagtatatgttttgacaacgttctgtcttgtccgtggtctagcattctttggtgaaggcaaatgtgctcttttgcatttgttttttgttgtgaacaataatgtgagttaattttgttatcattgtgactttaggatctcaactcaacagtggtgaagaagggtggccttttctatggaaatgttgcttcaaattataagcacaagaatgctatggttgatttccatatttacacagaatcagaggtagttactcatcttccttttcttttagaaagtttgattcaccatatttctgttgttaatagttatctttttgttgagcaggtctccacaagatttaccatcgtggatatcctgccatcgacaaaaaccattgcctcaattaaactccctgattacaaatcgggcaaggtatcaaagctattagcatgttaatgggcatgaatctacagtattgcttggattttaaaatgtataataacaaatttcttcttttttgcagttggagctacaacatctccatgagcacacgtctttcactgccgctattactctgaatcagtctcctgctattgatttctctgcaaccattggcaccccaagcattgcttttggtgcagaaggtacttacttgacaggttctcggaaattccttaaatataatgctggtgtaagcttgacaaaatcagattcttctgcttcagtaattctgtaagttcttccctgagatcattcaagtttatagtttgcagtcctctggtgtgtgtgtgcacatgctatggtctatcgtctatggtctttatggaataatattatatttgttccccttcaccagaatctgtaaaagaagccagattcgtacttggcatgaagttcttgctaattgcctctttttccttttgtagcgctgacaaaggtgactcactaagggtattgtatttgcgtcatctaaattggctgaatgggggagctgctgttggggaggtcactagaaagttttctacgaatgagaatacgttgacagttggatgctcttgcgtggttgattctaacacaacggtgaagacaaagcttgacaacaatggtaatcttggggctgttttactgcatagggttacacctaaggccttcttgactgtttccggttcatttgacaccaaggccttagagaaggaacccaaatttgggttggcattcaacctcaagccttagcaatttaagttttaaatacataatctgcacacatatgtaagcatatattttttcattttcctttttcaattcacatatcttccctcattttgcaagttcgattctgaatgagaaagttaggtaagtttgtttgtttcctatttgcaatctctttcttcagtgttgtgcaagttattttcctggagattgtctattgttttgggtggagtgactctgtgtgaaactatgatacactacgcagttgtagtatggatatttcggaagaggatactacctaacctgctccgaaaataaagctttctaagaagtttgtcgtatggtaccatgaaattttcaattctcaaagagtatccaaaatagttttaggtaggactgcaaatttgtgtattcgtgtcgtgtttcaggttggcacgattatgcttaacacgaacatgatactattaaataatgtttcataacatgttcacgacacgattataaataggtcaatccatgacacgatacaattaaaacg

SEQ ID NO: 234484 - DNA, 2098 bp, Cannabis indica
ttaggcataaaacccaacaacaataatatacataaatcatgatcacacgactctcatcaataatcaatataaacagattcaggcaaacaaaaataacaaaagaacatattctctatttattttagaaaattcagcagcataatagttgtaatttgaataaacccaaaaatcataacctgcataaataattttacaaaaatatatttgatactttgtgccctataacagtcctgaaaaatttacagattaagttttcaaatgttcaaacattttatagatcataaaaattggaacatgtctaatgttattcaacacataaaatcaagtccaataacaatcaagttgagtctctatctccttaggatcgtcaaacttttttcaaaaaagacgcacctaagctcccaattcttaagctcgaaatagcttagtcagctcaaaagttactttgtcctacactctttaattgaataaataattatcataattataatgtactcttcaaaccgagtccaacgacatataacatgactatatttgaagtttgaagttctaaaacctcatctaaacagtgtacaaaaaggcaatcggtggcggtaaaaattagtgtaccgaaactatcgccaaaaataaggatagcatatatcaaaataattctcttgacaagtaaatgacggatgtacaacccgttagccgaaacaagcaccaaaattgccagaaaatactttctaatgggcagagagagatactcaaataccaatcatttttcaaactaggttaagataggaatatttcttgtctcattgcactcgtcccatttaattttatttattttgtgttattatacatatttttttttatgtacttttataggttatgagttatttttaagaatttttaattttattttgcatagtaatttatacatatagaactattaacaatttatcatttatatttataattttaattttaattatttttatgtaaatgaatcctcatgggaaaattacgagacccaccccaatagagaatatataggaatgggggtagagccaggaaaatatatactaaatggggagaaggggagcactcaccccaaaagaaaagaaagtttatatatatttttttattttcaacatttacttaattatgaaattaattattgattgtcaaccaattaaataactcattaataatttcattttattgaaaatccctaaacaactttattggtaaatagcaatacagtatttggtgtattaataattgtttaagggtttgaataaaatgaaattattagtgagttatttaattgattgacaatgaactaatttcataattaagtaaatgttgaaaattaaaaatatataataggctcaatggatgcatggtgtcaataacgtaataagattcattaatttggggcctaatgaatgatgagtatagtcagagtaatatgtgtatgtacacatacatacatgtatgtacatatatgtatataaatatatatatgagtgattcttgcttagaaggtaatataagagggtgaaaggaaaaagaaaggatatatatagcataaacaaacgcaccgacttgcaataataattaaagaaaaggaaagtaaagtaaaagaaagtaagaaaaggccatgcatgatgtagcttgccccactacaactctcttctgcaaagaacttgttgggtgaagctttcatgcaccacaaccatcatgcttgcgtttaaaagttgtgaatggaaacaccccaataattttttatatatactacctagctagctaataagagagaaagagagagatattatataaggccccacaaatagatgaaatgaaacactaattgggggcagtactgagatgtaacatagccaaaaattgactaggtggttggggttaaggggcaaaaacgggttggaaggccttgccggctatcttgtggcacaaagttaaggcactagggccccctcccatctaactatattatgggaaactttacacccactactgattttttcccatttttattttatttatactgtgccacgctggaaacaacatttattactgttttttttttttt

SEQ ID NO: 234485 - DNA, 790 bp, Cannabis indica
tcttgtaagttttttttttaaaaaaatgacatgtttagtgtaattgactttttatgccatatatatcaatggcacatttttataaatagccctgttaaaaatctcacattgagggtaaattcctcaagaaaaaggccttgcagccttgctttatcctaagtccaattttgtattttttttacgaagcccattgtataagcccaaacccattttgttagggtttgttcactagcagactaaaaggccccaaagaaaacctaccttctaaatttcatatcttcctttctcatagcccaatcaaaggagcctagcttctactataacctctctctcagttactcaaatctctctgtcgacctcattgggtttcttcgaggaattacgtttagatacggggttggtagcataggtcgttgggttgtcgagcttgggttcatcaccatatgcgctgataaacaatcattactttactcacaggtatgaattttggccactgcttgtgagggttggttccagaaaaattgtgtatctgactcgtcgtattttttcttcgttcctgtgtatacaatataatttggcttttcttacgggggtggttatgaggattctaaggagtgagtaggaaactacaggtctatatttcgtactagtattcatcttttaatcatagagagatttcgttgtccctctaaataattttgtggcttctctccttcgattctgttttatttttttttatttatttcgaatggtactatctccattagttagttagtttaaatatgatgta

SEQ ID NO: 234486 - DNA, 855 bp, Cannabis indica
tggacgatgggcctcctccaactttcttttcaagtcaacatacgaaatgatggagctccaacttaccgatctagcacgctgcaatcaagtggtgtatggctgcagtttgtcgtaatcgatgtccatcacccttcaacgccatgataggctgatcagccctcaatgacttgaaagcattgacatccatctaccacttatgcctcaaatttctaacaaggcatggggtaagttgcgtgaggggagaccaacagtctattggacaaggagtgcacccaagtgctcaaagatgagttcaagaggccaacagcccatgacttcataacggaggcattctatccactatgggcacccaacctagtactggtgcgcaagcccaacaaaaagtggagagtatgcatccacttcaccaacctgaacaaagcatgtccaaaagactactttttgcttcccaaaattgaccaactagtagatgccacagttggccatgaaatccaaagtttcatggatgtgtattcagtttacaatcaaataaagatgcatccaccagattaggagcacactagctttatgatatatcaaggcatataatgcttcaaagtcatgcccttcgggctctaaaatgttagggccacatatcaaagactggtaagcatgatttttaaagatctcataggtcgggacatggagatgtatgtggacgacatgcttgtcaagtccaaaaatgttggggacatgtggaggacctagatgagtgcttcaaaatccttcgtagctacaacatgaagttccaccccctcgaatgctctttcagtgtaggctcgggaaaattccttggcttcatagtcaatgccaggg

SEQ ID NO: 234487 - DNA, 1196 bp, Cannabis indica
gtttttggaaccgtcttagtgcagaatggtcaaaacttgcattgggatatcaactagacaaacaacgaacatatttgaggcagtagaatcagaatcagagcaagttgatttttgagagcacccaggttcacaatctatcaatttgggtgccttccaagtgtttgattggagatccaacttttgcatataattatttttcatcaaaaatggggaaacaggtccttctggatgaatgacaacaattcttaggcacaaataataaggcccagcggccaagttgacagtcagggctagcactgagcaaaggttgacattttgtcaacctgggccttttaaaatggagttttcaagaattctttttagcatattctcaatcttcaaaaaatattgagattcaactattttcggggaccaaatggaattttcaaagggcaaagctgggaccgagcgccgagattgacacttggggctgggcctagcgcccagattgacatattgtcgacctaagctgttttcaatcaagtttagcaaaaagtgttttgggcatattttctatcataaaaaataacaaatattcaagtaaactcaaggagaaaccacaatcttgagtccctacaaataggcccagcgcccaagttggcctagggcttagcctagtgcctaggttgaaaatcaacctcacacgctacctttaattactcaaatgccaaatttgatgtgaccgttgaatccgacatggtcaaaaatgggggtggagaccccttcctcaagttaagaagccttgggagtatcaaaaatagaatctcgagagctcagttttaagggcccaacgccctgtcagcaaatgacctggtgtgctaggttctgtttatcccaatctgatgtcgtttcaatcgtctgtctagtttttcacaaatataatgatctatgaaattatagaaataaaattcacaactttgcatttctcatttccaacacacccagaaatgaatattttcgagtctcctatttctgtaaaatagcaatatctctgagaactagtgaccaactttgccagaacatataaatggactaactggtgtcagactatcacttagacattaaaaggaaatccctttgacgtttctacacttacccaatgtccaaattgatggtagatgtcaacaggggtgctgggatgtcaacgtgggcgctgg

SEQ ID NO: 234488 - DNA, 604 bp, Cannabis indica
ggtctccccaagatgatagggatattcttgtcttcttccatgttgaggactataaaattagcagggaatataaatttgtccaccttaacaaggacatcttctattactcctcttggatgggctaaagaccgattagctagctgcaatgtaacagttgtaggttttgcttctccaagctgtaaccccttgagtactgagaaaggcataacgttgatactagcccctagatcacataatgcatgtatcttttcaatagtcccaatagtgcaaggtatagtaaaactcccatgatctttcagtttcgaaggaagtttcttttgaagaatttcactacactcctctgttagagctacagtctcaaattcttccatctttcttttcttagacaaaatcttcttcaagaatttgacgtagcttgacatttgttcaagggcttctgcaaaaggaatattgatatgcagctttttgaatacttcaagaaacttactaaactgcttatccatgttattcttgcgcagtctctgaggataaggaatctttatgtgatggttgatactaataggaggagaagtttctttttgtggaagaccatcagtagtcttct

SEQ ID NO: 234489 - DNA, 634 bp, Cannabis indica
tctcgttaataaaccaaacaacaatttgcatattttttcctcgcataagaccttatagtcagcgagttgccaatatgctctgctacttatgcaattaatgagttattccataaaaagaaatttcatcgatccatattccctttatcttgacacgtgtcctccactgagatgtcagccgaatttcgagtataacagccctgatcatagttttgcctctgaatatttcttgtttggtaaagcttaaaagttagctgattttataccaagttgtcttatcttagataacattatggtagctttcgaaataatgcattatttgaagcgcaagacgatgggtaaaaaaagctatatggctttgaaacctgacatgagcaaagcctatgatcgagtataatgagactatctttgtgctattatgactcgtatggggtttgcagacaaatggataaatcttgtgatgtaatttgtctctttagtttggtattctattatccattgagaaaatgttatgggttcgattgttcccacctgaggtattcgtcaaggcaactgcaataccctagaattatgagattggattagcaaaacctaattagataattatgtattactgtgaaattatattattatataa

SEQ ID NO: 234490 - DNA, 1704 bp, Cannabis indica
catcacagggaacaactctgccaaactcgagcagtttgctaccaaacttaatcaaagatttgccctgaaagatcttggagagttagaactatttccttggaattgaagtatatcgaagacgacacaggtatttatctcagccagtcaaagtatattcgtgagctactggagaaaactaatatgctgcatctaaaaccttgttcaactccctatagactgtgggaaaaaccttgtctatttcttgatggtgaatttcttgataatccaaccgagtatagaagccttattgaagccttactaatatctaacaaacactagacctagatctgagttttgactgttaataaactcagtcaatttctcgaggcacttacaactgtacattggtgtgctgcaaaaaggatacttaggtacctaaagggaacaatttttcatgtttacacattaaggtctgtgacagattgaatttgatggggttttcggatgcagactgggcaagcttccccgatgatcgaaggtctacagccagatattgtgtttatcttggagacactcttgtgtcatggtcctcaaagaaacaagcagtgatatctcgatccagtacagagtctgaatacagagctttggctcaagtttcagctgagatagcttggatccaatctctccttcaagaactaaaatttcctctacccaacactcccatcacttggtgtgacaacatgggagctagcccattagcatcaaaccctgtttatcatgctcgcactaaacacatagagttggacattcattttgttcgagacaaggttttaaacaagcaattagaggttcggtatgttccctctcatgaccagacagtcgactgtcttacaaagagtttaactggttcaagattcagcttcttagttgacaaactaggagtggttcaatccccactcagtttgagaggaggtgttaagaaatgaaaatatgcatcagcccctgcttcatacattcctctgccatctgtcattgtggtcctgaattcaatatctgacagctcattatttctcaatcattaatctctgattttccatatctttctgttattaccttttgtacgaatattcccctttctgttattacgtttggtgaggtgtaatatttctagaatcatcttttaatgaatgaatgaaggcaaaagctcactgagctgaatattcaatcaaatccctttgtctataatttcttactgttttatgttacaataatggctaaaactataggacattacctttgtctatgtattataattcaaacttttcatacgacgatatataaattataactatagtatatatcaatctaaccagttgtggagagtgacttaaaaatagttatcaatgcgttcaataagaaggagtcttattgggcaattgagaactacgtctcattttgtaatagatcatctctcttgtttgtaattaagttgtattttctctagtattaggagaacttataattttgttgcctacaatgtggctaagtgggcgtttacccacatgaggtttgtttttattccgttagcttctatcccagacaatttgtattgcaatggtcgtgaggtctaactttatctatttatataagcacgaatttttatatatataaaaaaaaatcttaccagtttttaaacaatttcaaaaaaagaaattagaatgttaa

SEQ ID NO: 234491 - DNA, 671 bp, Cannabis indica
ttttgctttacttttttagtaacacacaaaattctatttttttacaacccatctaacttgctttaccatttcagcagcatgacatctaattgaattccaaagtaagtcatttcttgctctccatattacataaaccattgcagcaagagctgccattttcacactcttgcgaaatttggtttttgtggactttcagatccatttcagcaatccataaagtgtgtccgattgtacctcccagtgcaaccagttcttcagcaagttcaagcaatcaagtgtaatttcacacttgaaacataagtgttctacacgttcaggaaacctgctgcaaaagagacaatcgggagagtcaatgatgttgaatttatgaagtctttctcgagttttcaactgattttgcacaaccaaccatatcaagaaactgtgcttaggagaattaagcctattccagacctcattgctccaaacaactctgccaaaatcaagagcaaaccagctatatctgatgctgatttgataattggcagcagtaaactgtcctggttgctgcacctgcttcaccttgttctttatttccaccatattttcctccagtaccagctactggttgtgggagcggtgtactcccaccattcttgttgtttgatgtacacacaatgcacccatttaac

SEQ ID NO: 234492 - DNA, 1828 bp, Cannabis indica
ggactactgactgtcacacaatatggctgtaaaattttgtcacttagttgtaggttgtgtaaggaattaaaagacaactaaaggtaaattgtggcaatctattagcagttctatattcagatgactatagaagcttatcaaaatctaagcacatatacattaagtttctagttgttaaagatatagttccgagtaagatagtgtatatagagtatataggaacaaacttattcctaatagacccactaactaaagttttgacacccaagatctttcatgagcatattgcttataggggtgttattttattcgatgatgttcaattttagtggaagtttgttttcaatattagttactttgttgattgacactattacactactttagctaggtttagttttttgcataataaagttgatggttttattatctttattgttctgaatgtgttatctttctattgtggtttgacataaagtttgaaagactagggattcatctcactaagaaataaaggattaattagaaataggcacgattaagatgacattgcatgtaatttccagttacacatccatacttaatttatgccattgaatatatttaatatggtgatcattgatggttccagtttcgataaatataattaaagccgatttggtctcatattggtataggagatggaccaaatcattttacagagaatgttttgagaataactatcaagtttgtgcgcacataaggttatcaaaaattgttgtcattggtattaatttgtagcccaagagagattgttgggttatctttaataatccaatatgtgggcttataaattaagataatttatttgagctaatattctagtttgggctaaataagtgatctaattaaatcaacctaataaacatcttatttggtataggtaatgtgtaatacacaatagtaaatggggctctaattagttttctatataaagaacataagggtttggtccccaaggctaatcccaaccactcttctcctctattcccatcaattgagtgagaacccatggaggtaagattagtttgtggaagaacacactacaacaattttggtcatttgtcgcggaattattagcagcggagatggcacgccgctaataatggcagtatgggcagcggactctaaattccgccactaatagtcaatttttatttttttaaaaaaaaaattattagtggcggaggtccgccgctaatactattagcggcgggtaagtgggcgagaaaattcctgcctattcagttcatacatttttaaatactaattagcggcggggcattagcggcggaccccgtcgctaatatgtctataaatacccccaccgacccattttccctacttttactctcagctctttaaatttcttcagctctctctcaacccttctccaccaccaccaccaccgaataacaccaccaccactaccactaccgagttctccaccaccaccaccaccaccgagtaccaccatgcaccaggaaggataccacgcaccaccgagtaccaccacgcaccaaaacccatttcatgtaagtaaactttttttaaagaatttcagatagatggttttttatattttaaaaattttagggatatatattattatctttttatatatatatatatatatattgctctgtctcagctggtctcctatgttattttctcttggtgattcggtactagtttttatttttgttctttatttgatgaggaagaaagagtggatgagtttggtgtcatcggagttgtattgttcaaaacctggcgagggaacaatcga

SEQ ID NO: 234493 - DNA, 585 bp, Cannabis indica
acttcaagcaatccttccattctggaaagtagggttcaagacgtgccatacaccctgttatctttcttgcaacaaaaaacatcgtgcatgcgagagtcacgtttaaatttttataaggtaagcttcggcttccgtgaaataaggttgaagttgcataaaaattcaaggttagattttaggagggttgaagacgtgccatacccatagtgatctttcttgcacgaaaaatattgtgcacccctgttatctttctttcacgaaaacatcgtgccagcgagactcacgttcaatttttatgaggcaagcttcggcttccgtgaaagaatgctgaagtttcataaaaattaaagcttagacttcgtttgaaaagatcatagggtaaaagagtcattgggagtaaagctgacttcaagtagtccatccacttcgggaaggagggttaaagatgtgtttcacgcacggagagtgatgcgcatgcatctcttgagctccaaggagctccaagagctacatgcacgcaccccaggttgttctgggtattctatttccttcggtgaactacagggcatctgtaatacccggaat

SEQ ID NO: 234494 - DNA, 1573 bp, Cannabis indica
tcaatatggtgataataagaactgaactccctattgttatcactaaaattatcgttgtctaagtattaataaaaaaaattacaatttattgtgattaaatgtgcttttaatgaaaaaaataattgtgtaaaaaactaatttagttacacattgtacttaaatattactgtaaaattacaagtaacttttagttgtaactaaaagtgattaattaatgctcaaatttatatattttaggattttaacattgtatatttaaatgtaaataaattatttaaattgaatattttcatagtcttagttgtaaaattattttagttgaaaatatttaatttattttaattttgtgtaattttttcaaatgtgagcaaagttgtataaatgaaaatgatgtcttaaaattggaagttgaatagaatgtctagcatccatttacattagggattattttagaaatacctcaaaacaaccaaaaatttacgtaaaaatggaatattattgttttctttttacttttttatattttttttttccttacacaccgttacttcaagttgttctaaaaaagatattgattacacgtttatttttacgttacgaaaatataatataatattatggtaacatgaaaaataccaatccttaaaatgttaaaaaataaagagttcgattttagatactttgggtgtaaattaggagatatctacattatatatccattttattttatttatatctatttttacctttatttttattctttaagatacacctacttttataaatgatgttccctattaccccttaggttaatataaaatatgtgctagacttaaatggagactaagaatatattttaatacttaaaaagtaggtatattttaatgaaatataatatgagagtattttttattaatagataaaaaaaatattcatcaacttatcccgtaaattagtgtatgtcttcacttatgaagattaggcttgcagcccaaaatgaaataactctttagtagtaggcccaattcactgttagtttctcagagaaaattagattctatatcctttttatattgtcctcttttatttttatcctattttttaaagtctatcattataacctccttttttaaatactttgtcaattttgctcctgtcacttcaatatactctctatatgactcccttatattagggtattttgggtataatacatataaaaaaaagtatgcttcaatcaaatataaattagaggtagatttagttaattgataaataaaagaagtatttttcaatacacccccatctcaaactcagaagggccacagcgcggtcctcctggaaattttcaaataactgcatattcttgactcagttttcgctactttagcaaggataaaattgtgttcgagcaccatctctttttgaagatagccgaattcttctcataacacacgcatgctcaatacatgcaatgcttccatggctgtgtcctgtaataaccgcgagcatggtatgcagaaaacatgtacttacatgttgatatgtcaggtgagattttttctcagtacat

SEQ ID NO: 234495 - DNA, 530 bp, Cannabis indica
actcgctgctcgttgtctatcttagtgaacttctccttcaaacttttaaacttcgccacacctgattaggaatatttgattattatgtaaaaattgcttctatgaatttttttattagcaaaataattttacaaaaaaatttattagtaaaataatcttgtatggtcgcaggaccaatcataagttgcatttgatcataaactgctacaaatttatactgtgcaaccaaagattttatttaatgatcgtgagtagagtatataccagggacaaaatctaggtggagagttgttccaacaccgccatcgccttcaactacattaattttttcgataacagatttgagttgttcctcgatgagctttactagacgaagagtcccacagagctcccaaacttgactggctggtgccttgaattctagctcatggcaaagttgaccactcaccatgtttgtgctcttttggtttgattatattgtaattgtgtttttgttggatagaatagatgattgttgtttggatatatat

SEQ ID NO: 234496 - DNA, 964 bp, Cannabis indica
aagtatttcgaatttgacatgtgcacttttctttttgaaaaaatttacataatagaccaaaaaaatttaaaaaatattacaaaaatacgtcaacacggaaaaattttcattttcactttttgaacatttcaaagtaacaaaaatactttttcagtaaaaacaataaactcttcactaaaaatacttattcttgttgatttttttttgctaagtaaaatgtatttttataatttcaaaatcttactagcatacttttgtaaattaaaactttaggccatgtaaataaaacataaaaaaatagtatttttgaaaattttaaattacttttttgttgttggtgaggaattgagaaatatcaaatttactaattttaagattaaaaaaatatcacaaattttatttttaaagaaaaaaaaaccaatagttataagtaaataactattttaatattagttcgtaaggccctaaaaaatattttactagaaaaacagtttaaaaatttatttgaataattttttttttttgtcaaattaaaggcctgattttattttttttagatcctataaaagctagagacgaccctatatctatgcagacccacttttagagcacatgtaaatgagacaagtctatcttgctctgtttcgcacaattttatttatttcttaaatctagatgtgaaaaatataaaaattcagtttctttttttatatgacagaatacattataattatagtagttatactattcgtttttaaaaaaattagatatgatagacaaaatagaattatatataaaatttgataattaagattgctgggagatattgaaagtttatgaaatatgcactgatgatgacaataagaaagtttaagtgataattataaagtattaggtggttctacaatatatacacatttttaatctaatttttttttatttcatgtatattatagttatttaa

SEQ ID NO: 234497 - DNA, 1974 bp, Cannabis indica
tggctttgaaaaatacaatacttttttttgtatcaattaatcaaaaataccctaatattatatttcattaaaaagtactcacttttgtgagtgggttgctcaatataccctcatcctctacttaagtctagcacataatttacattaactttaggggtataataggaacatcatctataaaagtgtgtatatcttaaagaatatcaaaataaatgtaaaaattaaaacaaataaaataaaatggatatacaatgtaacttctacaaatattttttagtaagtgttgatgcgtaatggtgaaccgacaacaatgttgtttaataaatgacagatgttatataaaagtagtaaataagagtaatggacataacaattttatagtagttcggcccctttcaacaacaatgacttaagtctacgaagacttttattatgacttgttgttcgtgtgcgtttgatctgtagccattttcgattctcctctacaatcttagaaatataatgtttcccacagatggtgtcaaatattatcagaggaatttggacaacaccaaatattgttaatattaaaaaaaaaatattcaatagcagttatgctagtactcccttagaataatgtgaatattcaatagcagttatgctggcacttaaatgtaaaaaaaaaatcataattgactaagtcaataatgtgaatctaattaattaaaataaattaattattgagacttattatttggtatttatcgtaaatattgtggggatcatgagtccacaaaatttaggctcctaataagtagatttaaaatttaacaaattaatttcttaacttattaattcatcatgactttactatagatacagaatggtactcctaattaaatggaatgttctatacacataatatagatacactgttatttatctataatcataagcataatcataattgaaaattagaagagtttaagaagaaaaactagatgtgggtgtggattctcctcttctcttgagttctcaccttcaaaaccgcagtctaaatgtgttaaaaacaaactctaaaagtctctggccgccctaacaatacttgtgttgtcggggcagtggatcctgtgaaattgcgtcgcgtgctcagatcaatattttagccataacctcttcaatataactcaaaattagacgtttcaagatgtttctaaaagctaggaatgagatctacaactttcacgttgagctcaaggtccaattatgcacttgaattcgtaaaaaaaaaatcttacttatgtgtagttttatcaaatcaagctcgccaacttctactattttctaccaaaatatgctaaaatccctccaaatgactccaaatgcatgattaagtcttcaaaatagcctaacaaattaaaattacactaatcaataatttaaaaaataaatttaggaatattgatacataaattggctatatttatataaatttaccatatttataagacaaaatatcgagttatcacacttactctaagaaagacaagcatttctctttctctattgctgctctgaacatttctttaagtttttgtattgtcatattttcatcttcattgtaagtcttatgtttgagtttgatttttcggctttaagttagtcgacgagtttttactgtcaacaatttggcgctatctgtagaaacgataagctcaagtgacatcgtttcattacttgccactgctcaaagacgcctagatgctctagtcgtcttcaggacatcaatattaattcatctagataacactcagttgatcatctctagaagagagccacctacacccaaagttgaagaagtttgccagaacactcaagtacctctaacaagaggagacgacgactatcgcgaagagacagtggcagaaccagcccttagtcttaagaggggcctaagtatgttgattttttttagcataaggataaagatttttt

SEQ ID NO: 234498 - DNA, 689 bp, Cannabis indica
atggtttggaaccataggaacaaacaaatttttcaaaacaacaagactcccctgaagcattggatcccgtgggctgtggattatgttgctcatgccctgcagaggaaggaaatgaatctgaatgtcaagacggagaaggagaggaagtcttggcaggctcccccgactggaacttttctgctgaactgtgatgcagctttaaagaaagaacaggagggttttgctactgctgctgtcatcaggaatgagaagggtcaattgatagctgctgaagcttgttttcatccagggtatgctactgttttgatggcagaatgcttggccatcaagatgggaatgaagcttgttcaatatatggattctaaacctttcatagccagttcggacaaccaatctgcagttcaccagattactactaaaagaactcccagagccgattggggtcatcctattcaggaaattttgtcatctaatcttctcaatgggtgtatgggaattcggtttatcaatagggactgtaataaggtagctcactctttagctaaatgggctttaaagcaaagatgtaattctttttggtcagaggttttaccctcttgtgctgctgctattttaaatgcagaaaaacctgaccttttgtagttcttttgttggttgaataaaatgttttgccttacaaaaaaaaaaaa

SEQ ID NO: 234499 - DNA, 1236 bp, Cannabis indica
caataattatagctaaaaaagtaccaaatattcaaattatattaatcttaaaataatcaatacaattgacaatataagcatggtgtaagtggtagaattctcgtacatcaactacaatgttaatatatatctatatactagtaaaacgttacgtgcgaggcccgtatatgaaattttatgttatgtattttctactctatttaaaagcgatacaactaataattgaagaaagaatattattagttatttagtaagattattattatgtatatttaaataatgtaatttataattttgacaatgaaaagtaaatagtgaatgcaagatattagtgtttaaaaaaatttgataatgtaaatgtaatatgttcaaaaaagattagtactaaaaaataaaattaaaaaattaatcttcaaatactaaaaatttttgataattggagatgatagaaactttgaagcaaatataatatgcggtgacaaattgattgtagcaacaatctcaataagcgtaatgaacaaaagaagtgaaactaattctacaataacaaatcaaaaaaataccaatatatattagcgaacactgtttgggtacaggttggttcacgtataattttttttacccaattacgatgaataatattgtagtttttaatgcgttatttaaaattactaaaaaagaccatttaacaatgtaatattatactacaatacaaatatattttgattgagtaatttaagaaaaatatatcatgtaatattattaaacaaattttcaagactaataattgaagcaaattatatttttttgcggtattttagttattataaaatataataaaataataataattaatattattaacttacttgctaaaattaagcaacaaaaattgaaaaaaaaatatttaaaaataaaaataaataaataataattaaaaatataataacagtcgcaaaatataaataaataataatcaatatatataaaggaaatcattttgacaattaattcataaactcttactctcccataagttaattattattatttttttgtaaccattgtaataacttaaaggttttatagttttattgaatttgacttttaattctttagaatcttaccttttatttgaggttaatatatgtgttaggataattttagtggtttatacatataaaatttgtaactaaaatataactaattttttttcacttttatattatataataa

SEQ ID NO: 234500 - DNA, 1182 bp, Cannabis indica
aatgtatactccatacatccgaaactagcatactttgctaatgtcctggaaagaacataacacttatccaaggtgtaagtataattcatcgctgattatcacatcagtgtaaatccagtggactggtgaatcaagaacattatcttttgaagcatataatcacaattacattccactgtgttgacatcactgtaattgtgaataactatatattttggatttaacagactttgtacacattaaaccataaacatgaaaagtactacatgtaaacataaataacttctaatcttctattaataacaaatcagattaaattgaaatgggttttatttagggcataaaatcccaagagatacaagctttagaataatagttatgttttatgttatagatagggaaggtcatgtgatcaaatcctaataagagcatgtttaccttttagtattttttttttttttaatctctatcaataaaattttttatttagtacttcaatcattgaagtcaatttttttatttttactttttttttttttactttaaactatatttaatactataaaaatataaatttgtatcaatttttaatatgttatatcatgtagaaaaaaatggtacgccctccctcacctaaaaaaaaaagtctcctccccacgactgaaatcctgagtccgccactgatttaaaccaacttatagataattaaaaaaagcctattatatataggatgaaaatattttaataaaaaatattctttgtaaatattaagaatataattaaactcagttgtacataaattaacatacattaattatgtgaaattaaaaatttaaaaattaattagacacgtaatataaggaaaagaggaaatccaatccccaccattttcaacaaactaccatgctagcctataagccactagtaatgattgcatgagtaaccacccttggccattggtgacaaacaagaaccaccaagagtttgacgcaatatgttagataatagtcctcttcgagataggacaaatctccaaaatgcactctctgagtctgtgccaaactcccaattgaacgaaagttctatttactcaattccatatcccataatagctacacaattacatatttatagtgactcgcactctttaaaaattactaataagcccctacactatttcat

SEQ ID NO: 234501 - DNA, 1400 bp, Cannabis indica
tttttttttaaatatatatattcacaaaataatactcgttgttatttactttgattatcatttctgcaacttaattaaatttcaattatcatatagtaataatttttaaagagggttgttagtaccaatggctagtaacaattctcctattaattgcatgaagtttatggaatcaagatcttcagttaaaagattgtgtttcatagtgtattaaaccaatctcattatgacacaacaattaatttaagcataaagaaaaaaaaatatagttaattttttaataaatgaaaaactaattaacgtatcaaacttaaattagtttaataactttttaacagggatcgtactttatcaacgtacgtagcaaagtgcatatcttagatttttattaattaattattattataatcatgaaagaaaggagtatgcaaattaaattgtactaatgtgagctgaaaattattaatttgaccaccataccatcaaatactttttcctttcatctctatataaggcaacaagaattgtcctcctcatcataaataaagactactcaagtcacgagtgaagaacatatatataagtaagtatttaatttccacaaaaaagacagtgacatattttattatatatgtagctacttatatatagtgattaattggtaataattaagtggtgcactttgcttagctttaaagctacatgttttaaattcaaagtgttaacctataaattaaatggcacactttttgtcgcagtgcaagggttcaagatcaaccgatacttttctttttgtaatttcgatcagtactaactcgaccagatggagaggaaagtctagccccaaatgccaataacacgtcttcttttctctctttttctcaatactaaattagttataatcacaattataaactcacccacttatatcattttcttaacaaaaaaaaaaatattatttaatgaacagtacattaattattcatttcgctttgttcatatataccatatataccacgtacgaaggtagcgtttgcttagaaggaataacatacaaataagaatgggaatgaaaattagaataagaatagaatgaaataaaatttaaaatgtaaaaaaaaaattattaaaatttttttctcatcatgtattggacatgattggaatggtctttccttcaatttcaaaatggaattattaatccaccaaaatggtgaaaaagccatttcattagaatgacattccaacacattaatatgcaaccaaacaaagaaatggaataaagattgtttcttttcctttctattctatttcattacctctaaccaaacgtcaccttaatgttcatgggaatcattctatcaatgttctctattaccatttatgcataatgcatgact

SEQ ID NO: 234502 - DNA, 856 bp, Cannabis indica
aaaaagttatatatagctcagccaaaccgaacccacaaccacttagatccaaaacagagtgaaggcaaaagatagtgagagagagcaaaaaaaaaaaaaaacaaaaagaggaacaatacaacatgaagtaaaattatatagggaagagaggcaaatcaatgatcgactattcatcacccagtgccaccatcccaactcgttctcaccactagtaggagttttttattaaaccaaatttgcaaacttcactaaatggagcaatcacactttaaaatggataacaattcagacggagtagaagtcttcgaaaacatacgatcaactaacaaattaaacgagagctcttggcaacaaagtacgtaagttgattcgtagatcgcttgacaaaaataacacaacattattaaaagaagataaaatacgcttagaatcttaattagaagaccaaaagctgaacacacaaggctacttcgaatataacttctacaactactaaactatccatttcaactgtaacattatgatgatcaagttttagccaactcaacacctcctttatccccgaagcttttgctacttccgatgctactttccccacaacatctttcgccatgataaccagggaacctgctacatttcgagccacatacccgatcccataacgaccatcgatcctatagcaggagtttttactgtttaatatacttaaattttattacattaattatgtcaagcaaaagaaataataaaaaaaaaacttgtaggatgttcttcttattatcataattataatgtaaactaaaatatatagtaaaaaatataattgagtacagtttataaataaatttatatattt

SEQ ID NO: 234503 - DNA, 697 bp, Cannabis indica
catggtactttattaacttccggttttaaagctttgaatcatttttggatgctataagatcctgtagtaaattgttaaaagtccagcattgctttgtatttctctttgattcgggctatttgtcgccaatgtcagcttccatttacaggaattttttaactccaccaatcaaccccttttatatagacactatggatccaccgaacccacaaattatcttgttttgaagcaattgcccacacatatttgcccagagcggcagtattccaatgcaaagtatgtctaaaccccaagtctccttcagatttggaattgcacatcttgtcccaagcaacataaccaggacaatttgctttagcttctctttccataaaaaagctctacaaatggcatttatcttcttcaacaccatatttggcaaaatcattatctgtgcccaatatgaatgtatggaaagaaggactgagttaatcaatgttacccttccagcaaaagatagcttccttgttccccatacccgaatattttaaaccattttctttatcaagccttcacattctaaagttgaaagtcttcgagcacatatcggaatgcctagatatttgaatggtaaatcacttatgctgaaacttgaggcatcaaatattctctgtacttctccttcctccattccactacagtataatgtagatttcag

SEQ ID NO: 234504 - DNA, 1608 bp, Cannabis indica
acaacataagaatcataatttataattagtaacaattattttacttttagtcacaagttttattgtgactaaaagtaaaaatttttgtagtggaagaaggcgtattatgaataagttttttatacaccaaactaatagaataaggacgcgctaaccacaaaatataaaagcatgctttggaaagattatttttttttaaatatgtgtgtaatgagtttaaatttaaattgtaatattttaaaagaaattttatgttatataaatataagataaaagaaaaataagagatatatgtgtataatagtgaatttaaatttaatttttttttatttcttaaaaaaataaatatatataaccacatttatataacaaacatgatgcatggaattaaaagtggtgctaagatagtataaaaataataataggaacagaatataattaaatttaaaatacttcaacaaaaattgattagtttttttattttttttattttactattaaaacaataaaataaataatttcactaaaatggtaaaaataacaatgtaaaatttaatcaactaaattacaaaggaataaaacaaaataaaaaaaaaaaattaccattccattttttattacatccaaccaaatagcaagtaagcagggacagacacactaataagattgtgggggctataaaaaaaaagttagtgtgaaaaaaaattaaatattttctatttagttaaataattatacaataaaatagtaaaaagcccccacaaaatagttataattttaatgtaaagtaagtaataaatattttttataacaattaagcccccacagatcaaatattctgggtctgtcactgcaagtaagtgttttcatcatcattatgtttccgttaatttgtggtagaattttaaggcacatgatgagaaaacttattttaattatggtcaggtcgagagctaataactaataaagatcaatcgaaccaagcatagtatataaaaagatcgagtgatcatgtacgatataaatagagtcattatatcaaaagtaagtattacatggtaatacctttcaaagaaaaaaaagaaagtattacatggtaattttatatttggaaagaggttacttattcgatagattattattagataaacatagcttgtattatatttgaatgaaaataaaaattattttcttttttttttttttttttatttttaaaatagaaggtgaacttcattaacttataatagtcaaattagctattatagaagaatgtacaacactaagaacgttgctgacattaaaagtgcaatcagtccaataacaagaaccgcaagcaagacaatgggcggttttgttagcagatcgcgagacaaaagagacaaacacactaataaaacagtttaacaaatgtttacactcagaaattaacatactaaacactgaaggcatagaaacgaactagaaatagcttgaactgacacaagagaatcagttccaatattataccaatttttagccttgatccaactcaaagcttccttaattccaaaagcttcaacagcggccgattgaacattaccagttttcagagcagtaaaagcttct

SEQ ID NO: 234505 - DNA, 2120 bp, Cannabis indica
ttacggttctagtctaggtccaggtctgattacgattccaggtccaggtccaagtcttggtttcggtcccgttcccgagttccggtctacttcttttttaagttctaatttcgggtcacaaggtatgggttcgggtccaagtttaagtcttggactgagttcatgtctgggtctgggttcgggtctggggctttgtcccaaatctcgacactgactacaggttcagtccaagccccaggtctagatccggatccgaatcttgggtctcggtctggttccatttcgggtgtcaagtcacgagctgggtcctaggttcaagttcgagtctaaggttgggtcttgggtcccggtcctagttctgttgcccaagtccatatcctgattcaaggtccaggtcccagttctgctttgggtttgggtcccggtcgaggttcgggtttgggtcctagtcgtggttcaagtttgggtctcggtcttggttattatttgggtttgggttcgggtctcggtcttggtcctggtcctggtcttagtcctagtccgattctagttccaatagcgattttgagttcgagtttgggttcaagttttggtcggggttcgagtttgggtcgcggctcgagtcctgtatctgagtttgggtttgggtccagatctcgatcttggtccggatcaggctctgggtgtgggttaaggtcgtgagtctaggtccaggtttaggttcgagtcccaggttttgatctcgatctgagtccatgtttagttttgggtcaaagtctttggttccgatcccgatctgggttcgagtttgggttcgggtgcaggtcaatgtttgggttctattctaggtctgggtcttagttcgggtctgggtttgggtttggtcttggtatgggttcgtgtcgaagttcttgtcttggttttggtccagggcaagtttcgggtctgggtgtgggttcgactttggattgtcgggtccaggtcaggtcctggttcagtttcaagtcttagatttagttctgggtctgggttccaggtcttaagtttgggtcccgagtcttggttttagtgtaggtcccggtctgggttcaggtctaggtctctatccaaatcttggtccgggttcgtgttcggctccttgtcagggtttggatccttgtctgggttgcaggtctcaggacccggtgagggtttaggaccaagtcaggtctaggtcctagtctgggtcccggtctaggtcctagtccgggtcctggtctaagttcaggtcccaggtctcaagtcacagtcctagtcaaggtctcggtccaggttcttgtctgagtttgggttatgatttagtttcagttctggtctggtctaaggtccgcgtcctagtcacagttcaagtccgggttttgttctgggtctgggtcttggtccagattggggacggggtctgggtcttatttcgagtccgggtacgagtttttcatatctggatctgggtctagttcatagataaggtctaggttcgtgtcctcggtctgggtcccaggttcaggtatgcgtctgcgtctgggtcttggtccaggtgtcgtgtttggatcccggtctgggtctaggtcggtattcgggtctggatctggatttgtgtccacgtctaggtttgaattcctatttaggtcaggggctttgtctggatttcggattgagtcccgagttcgggttcgagtcttagtcctagtctgggtctaagactgagtccaggattgggtctgagctcgagttccggggttgggttcagtctagttctgggacccagtacaggtcctagtcacggtctaggttcttttctagggtcctggtcatgttatggttcaagtttcagtttcgggtgccaggtctaggtctcggtcaaggtcctagtccagctttaggtccttgtccgagttccacatcaagacatcgacaatgggtcttgtccaagccctggttctctaagccccggacaacatctgcatcccaatcatgggtcccagtttggtttcagttcattgtcccaagtcctagtctaggtttgggtctatgtccaggttcgagactggggactagttctaggtctcaatccaagttttagg

SEQ ID NO: 234506 - DNA, 1218 bp, Cannabis indica
agtaagcttcagagcgaaaaagagagattcttgacttcaaagttgccgaagtgatcttatacagactgcttgtgtgattaacgttgctcgcacacagacatctaattctcgagtaagtttctgatttcctttatgcttatctttgcatgtttacatttcgaatgcattttttactgtgccgtagagaaaatgttaaggaaaccctaggttcagaaacctttgcgattctcctttatcatgtctttgtgcgattttacagtcataatgcttgtttctaaactgcataacgtccatctttccaggactgcttcaacttctacacgaggatcatcctcttctttattctagtcctccttcctctagccaaggacattcttcaaaccctgtacccaaccatagaatgatggctcgtacaaagaaaactgcgcatctggctgacgcatctgacccccaagtggctcggcacgccactctgcccaacgccgaatagtatccagccgtccaaatggaggaggatcatgaaggggatgctgaggtccaacagatcgaggagcaggatgatgtacgtcctgacagtttctccgaggaggaggaagaggcagaggttgcacccccaaactatggggagtacaacgaggctgaggagccagtcgatgctgacagagacgtcctggttgagggcgtggactacgtcagtgaggaggttgctgcggcggttcctcattgaaggcagggtgccttgggcgcaaggtgggtaagccctttgtccaagattatggaggcacgccttcgaacttttgaccagggcggatacctgggcgagctggactgctatattcccgcccacaacaatcgtgccacaaaccctgaaagggggatgtgcacctggtcaggtgcccagggtcagcaaggagcgttgatgcccttgcatcaatacttcaagcatgtggcggacttcttcggcctctgcccgacccagtttactcctaagggcatcaagtatttgtctgccctcttcctcctctatgcctcccagaaatggggtatgctctctccccatgaggttgcttggtacttcgatttgaagtccacccctaagcaaggcaggtcgaggtacttatacttctctcagtcaggcttcaagtggtttacgggcatggaagataaggccatcagcaagattgggcgctttgctaatgagtactgttgggttttgtg

SEQ ID NO: 234507 - DNA, 1748 bp, Cannabis indica
aagcactcctagcaacaccttctttgtgattttgtccttcacaaagcaacaatcagggtgaattcaacaagcacaccattgtcagaggttaaactagatacacttactaaattcttagctattcttggaactaacagcacatcattaagtaacaagggtttatactcactgctggtatataactttccagcaccaacatgagaaatatgaagtttattaccatcacctataaccgatttttccttaccaccatactcatttttctgcaccatgttgttctcatcagctgtcacatggttgcttgcaccgttgtccacgaacaaagcttcactatcaacaatctcaagtgaagtcgtatatgctgctgcttgctgattgtttttctggtttgttgagccaccaaccttggggtcaaatcccatgtacgcctcatcgtatctgttgtaacagatagctacggagtgaccatagcgcccatagacctggcaagtgggtttgggtcaatttgaacgaccaccacgacctcttccactttgatttccaccaccacgagagtaatttcctcgactgcctcctgcttggtcctgattagagtgatagtgatttggatgatagttgcctcgaccacgattaccactgttggaacgattatcgagattagcattgggagtgactgaagagttagtagatttgttgttggtgttgaggctcaagttctgaagccgctctatcttgctgtcaaaagcgagtaagatcccttgtagttcttgccaagtagtggaggatcgagcttcaatctgcaaaactataggtagatattcaatgtcaagaccagaagtcacattagatatgagttggttctctgggtaggggtcccctaccaaggcaagtgaatcagaccaggccttcttctgcttcaagtattcttccatggacatagaacctttgcgtgttgtctgaattagagttcgagtatcatccatctttgacttcgagtgcgcaccgtacaagttctccaaagctttccatagtgcagctgatgaatcacagcccatcacctctgttgcgattccttctgtcatggaactatacaaccaacccattaagagttggtcactaacaatccaatattcatactctggattgatagtaactccaaagcctggctctccttctgctgttgctggagtagggatgaactctgctggacagggtcttgtaccattgacaaacccatcgaggcgatgatctcgtatgatagtggaaaccatggttttccacagtatatagttctttctgtcgagcgtgagagggaagggcttattcaaagtactgaaaggttgagtgtagttgggttggacagcgggaatggttggagttgcagcacctgctgcaccagtattcgtaacttgtggagtctgagaatgggaggacattgatgcaggcctttttggctctgataccaagtgaaggtttacacagaaatggaaaagtgattctcagctcaaaggaggctgagtaaaaacatgttgtatttatactttgtagagagattacaaagacaaataagagtatgacaggtggccctaatgttggcaccaagggaacaagaaataacagaaaataaaggttgattacaccttagtaccaagcactgaaaacagagcaattaacactaatgacaattaactaattcttaacagaaacaatgagcaattggggacactatttatttggctacgaatgat

SEQ ID NO: 234508 - DNA, 1159 bp, Cannabis indica
tttcaattcgacgcgtcaaataacgaggctgagtataagccttgatcgccagcttgagaatagtcagggcgttgaaggtcaagaatctcatatgtcatagtgactcacaactgattgtcaatcaagttctcggggaataccaggctaagggcctaaaaatggctaagtatctagagaaggtttggaagaacttggaaagatagcaaatcccaagagaacaaaactctaacgttgatgccttagcaaaattggtctcgtagagcgacttggatgaattaaacttggttccagtggcaatgctaagcgagccaagtatatgtgaagaagacatagagatgatagatggttcacctacatggatgacccctataatcaactatctactcgatggaaaacttccaactgaaaaaaaacgaggcaagaaaactcttacatttagtgcctcgatacacaataattgaaggcaaactatacataaggggttattctatgcccctacttcggtgtgttcttcctacaaaagcagatgagatcattagagaaattcatgagggctttcgtggggatcatgtaagttggtagagcctgtctaaaaagatcatgagataaggatattactggccaacgatcaataaggaaacccacgagtttgtcaaaaagtgtggtaagtgtcacaggttttcacatatacatcgcgtactgccaacagaactaaggatgatgacctcaccttacccattttccatatgagggattgatctaattggggcattacccacagggcgaggaggagccaagtacgcagtggtagcagttgatttcttcactaaatggactgaggtcgagcctcttgtttctataacctagaagaaagtcctcgacttagttgtcaagaacatcgtctgtaggtttggaattcccatgaagatagtattcgataacgaaacccagtttgatagcaactagttcactgagttctgcaaaaggaacaaaataattaagatcttctggtctgtatccagacctcaagcgaatggacaagtggaagctgttaataagaccttgaaggatactatcaagaagaagctagatgctgccaaaggcaggtggtcgatgagctacctcaagtactatgggctcacagaactactgaaaaaaa

SEQ ID NO: 234509 - DNA, 1027 bp, Cannabis indica
gtaaaataatttccaacaaaagacacgtgtcaaaatgagataatactaatcaattaatataatagtaattatgttaatggatattggaatggaacaaattattaaatgtagagatgatagagtatatttataacttgtttactgtaaagtcttaagcgagataaggatatacaaactattgtctcgtgtgtcgacgagaaactgttctacatcgaggtacaaagcgaggtatcaacctcgctatgcatgagaagatgaagatcaaatatgatgactgttaaaacacttagcgtataatacatgttatacaaactaagtataacagtcgagtaaaactaaacaactaatagcgaggcatccatctcgctataggaagaagccctcatggtaccttcactaatcagctccagacatctttcaatgaggttcacaactccgttgagttagctctctcagatagaagctgacattcaaataatgttaactgctgaagttcaccttgtcaccaagaactgtgattttcagatggagcattatgtcttcaagcgcaggaacgacgaggcttacattatcaatatcggaaagacatgggaaaagctccagctcgctaccagggttattgttgctatgtccacagtgagacgtcccagaacaatatgatttacaatgtattaaatatacgtttatattgacccgataaaagcgaacctattactgctgtgggattttcaattaactgcatttattttatgcggtgtgatcaaaccccacaatttcaggggataattgttgtcagatatcagtcaactatgtaattatctgccccctatgtaattataaataggaggatgttatactgaaaaagggacgaaaaattcataagagaaaaagccctagaattgtatcagaaatctaataagattgacacgtggactatacagaattttaactacaaaatcacgtaaaaacctgtgttcttattttttttctttattgcttttgttttctgtgcaaatctatcaccatt

SEQ ID NO: 234510 - DNA, 1487 bp, Cannabis indica
agttgacctaagggaagaagacaatggtcgagtataccttggaatttgatcgtctatccaagttcgctggtgatctggtaccaatggatttaacttagacacaaaaatatgtaaggggactaaattccactatcaatcgagacttaaagactaccatcaatcacgacacaatatacaagaatgtggtcgagttatccttcattgtacaataggcagagcaacatgtaattaaagagcaagcttctaaggaagccaccacggcattgaaccctagtgtgggttgtagtgtcattaaggagaatgacattggcaacccagatcacaaatggaaagctgaatattctggaacacctagaagtaacagaaagttttggggaaacaaagctagtcgtcaaggtcatgggtctacattcagatcttacctagagtgtcacaaatgcaagaagcaccatcatggtgagttgtgggctaatacttgtttctagcatggtatggtgggccactttatctgagaatgtccacttgctaataaagaagaactaaaaagaacaacaaccaaaatctagggcgtctgttcatgatgactgaggctcacgcttaagctagtccgtcagtagtgccaggtcagttctccataaacgatcattcttattttatattgtttgatttgggggctactcattcttatgaatagggtagagtaattgaaagtttccataaactatgtgatgtgtatgctttgaggtttggtaccctattaccctcgggagacctaattgtatctactcagtggattaggttattgtctttttgcattgatggtatgaatcaactgccaacctaattaagctgcaattgtctaattttgatataatcatgggaatggatttctcgtctaagtacagggcaacaaatgactacaagcagaacatggtggtgtttgaacttgacggtgcctagcagtgtttgagggtaaagtacacggatctggcatacctagaataacactcctaaaagctaaagattggatgcatagaggttatctaggattcccagttactacaatggatactagccaacctatgtcacctggacctaaaaatatgagactagtgtgggaatttctaaatgtatttctagaggacttacttggattaccagcttctcaagaaattaagtttgttatcgagttagttcaaggagcagaaccactatcaaaggcactgtatcgaatggctccagtagaattgaaagagttgtagattcaactccagtaattgctcaacctgggatttaccagattcagttattccccttggggtgctccattgttttttgtgaaaaagaaatatgggtcgctttggatgtgtatcgattatcagtaactgaataagctcactattaagaataaatatactctgcccaaaattgatggcatgtttgatcagttgaagggtaggatgttcttttcaaagatcgatatttgc

SEQ ID NO: 234511 - DNA, 1762 bp, Cannabis indica
acgtgtctagctgggaagaatgaggacacacacacaatcgtaagtacacttgatgtgaaataactcgttaagaacataattagcagagtatgtttataactcggctgactagacagtcttatgcgagataaaatgtactaactgttgacttgtgtctcgacgagaaaccatgtaaatgcaagtgtgcatgacgacgcattaatctcgtcgtgtggaggaaatataataacaataaaaatacttagcgtatatgacatgatatacaaattaagtataaacagaggggtgaatcaaggtgatagatagcaaggcatctatcttgctgtaagatggcatgccagcgagaaagatcatatcgacaccagaaactgtagttttcataattaaagaattatcaaccttgagaagttatatgacgagccgcaagtcgccatcaaagctaactcagctccattcccagcgaggcatccacatgagatgaggcttaccgaatatctttaatatgcatccatctctgcccaataaaagcgggatattcacagctgtgtgaattctaaatataaagcgcatagtgtgatttgtaatcaaatcccataatttgagggaataattgctgtaaagattacagtcaactttgtaatttactgttcactgtattattataaatagtggcaaacaagatcaaaaaagggacaaaaaaactcatacaagagacgtcctgaaaaacaatcagaaatctgaataagattgactcgtggactatgcagaaactcgagcgaccagggattataaccctcctttgtagtaggaagggacaccttggttatctttagagggagtgagtcacgagaatacaaggggcagttaatccgataaagcaatcttgtaaaagaattgtgacgtgagtaggtatcggcccactatggttgccatatcaagctgccatggaaagctagtcgtcaaccagtagcagtcaaagacaaacaactaaaaccaggattacttcacttggaaccccgggatatgtcagggattaaccctggatattaaaacaattgtgggagtatattaaaaattaggcatctgatttcggacgtagagttcactaaaatattataataggagattgtaattagcactattctataattaatcacacgaggtcatacacaaaaacaaacttataaattaataaggtatagagttagcttgcaattattgataggacacatgagtttactacaaatatatatatatatatatatatatatatatatgtctattttttagtataacataggtttataatttaatagatatatggaaaatacatttttctataaaaccgatttaatccaattatgattcatataattaaattgaatctaaataaatttaaaatattgagtatgaaccaattaacaactttataatatttagtaagaaaatgacccttgttatttattaaggttttaagtatatatagggaaaagattgaacaattcaaacttaatatgtattatttctttttttggtagggataaccaaaagagatttccaacctaatttgtatttttatataaattaggtaggttgtgtatggtgaaataattgtgctattatttgttttttgtttttgttttaatcatcataaatatatattatttagttatattatatggttttgtattaattaatcttattttataatttgtttccctatatatttatttatatccatatagtatatatatacatatat

SEQ ID NO: 234512 - DNA, 1343 bp, Cannabis indica
caacatacagggaaaggctatatatatagtatcacaaaggaaccgacttagtgtaaaataggtaatcctatctaataaggacctaactaattatctaactgtctaacagtaaataacagtaacaacacaatagtaacaactaactctgacacaatttgttaaatctgttaacgtgtgttttcagacttaaaggttgattacaacctctttgtcaaccacactgcttccaaaaacacaggctagctaggataaaatcataactctgttatagttacaaattattgtaaatttttaaattttttgaatatttatagtattgaatatacaatttctattattcaagtttactacgagtgttcaagcctatttttgacactatatattattcgtaatattaggctatttttagtctaagttttgggttgatttcataagcattttcttagttaatgttgcattttggaatggttttacgcttggtttttcttgtttcaggttcccgatgcattacagttcgaattttatcaattggtgaaaagacaggacactttggagaaaaatctgctgaaactgctaatttagcatcagtagtcgcgaccagacaagtccatagtcgcgacccttttctatggtcgtgaccatggtcgcgactaggaggtttggcagaaaaggggtgtttttccaattggcctatggtcgtgactagaactttatatagtcgcgaccatgggtgaaacacagaattttttgccatttcgccattcagaggtagcaaccctaattcctataaaagggacttgagttttatgacgaaaatcatcagagattagccccgaaaagtgaatgaaggagagaggaagctattgtgacaatccagagtgcaatcatcaactagttctttcttaactcttgaattttttatgttaatttcagtttagatttgattatggatgttaatatggtttttatgaactaaattcccaattggggaagacgatgaatgttgattgaagttttgcttagttaatgataattcacattccttttatcttgtttgtgaaattatttaaatttgtgagtaattccatgtttaagattgatcacattttacatgttctatgatctcaattcgaaatctgaaaagtgagaaccgagaatgctaaaattggataatctaggttttacgtgaaatgaaagtatttgcgtaacctgtgtaacgttaagattattgcttaaagctgatcacatgttaatctaactcagagattgattagataacatgtgatttagggcctaaaagatttgaaaaagagttaggctaatttgtttaatctgtcattcac

SEQ ID NO: 234513 - DNA, 1369 bp, Cannabis indica
tccttcacctataaagggagagctcccttaggtcttttttcacatttagaaaactacccacaagttcaaagcttctctatctagactttctctctttagattttggagtttttgatacttagtctattactataatcaccatctcgtgagaaataaaaactcgaagtagacgtaggctccaacactatcgcgacataggggatgaactattataaattttgtgggtctctcataataattacttaagaacttactcattcttgccaatctagcgagctgatgttggccactttttagcgtcaacattttggtgctttcattgagagccataattcaagttccacatctatagttcgaatttctctaccaagaacattgtttgtaaggggttcataagttcaatcaagcaatcaaccatgaacacggaaagcaacactaccactcttggtagccatgccactactcagcaagtagtaggcactcagattccccattaggaagcagactacgagggagcattcgaaagtgctcaaacttaaaaatgtggatctatgggatctttacctgatatggagcaatcatctattaggaaaatgatctataagcgggcatctgagtggagccaaacatgagatcgtaggcctacaggtccaccacatgaagctaataggaccaaccgtaattttgttcgaagaaattcgaacaatgcgggaaacaaatctcctccatgggattctcttcccaagtttcatgactctacacccccatgaccttgcaaagggaaagggacctgcagccaaacttagaggaagaccctgaaagctctaccacaaaagtgaagagtatgaggttcggagggtgaaggtcaatgaactactccacactcaaatatacttttaggatgaacaaggtgcttggtgtaggtactttgcctgaggtcttgacgaataatagtacaaatacttccttcgggtgcatggagagatgttcgacttaagtaatctatctaactccctccacacatgtcattctaaggaagactattttgaaggaaatagttagtatagtactccgagcagctgctcacgaagaaaatgctcgagagacaaatagccatattttctagcaaggccacacgaccaggaaataatcacaagcctaggtcgattagtgcctttgattaacttggaagacaaacaagcctacatgatgacatcaataagaagcgactagttaatacacacatcaccttagtgtgtagggccaaataggcatggcaaaaagatccattcattcggatcgggtcagtgatccaatccgacggatcattactgatccgaaacatttggatagttattggatcttggat

SEQ ID NO: 234514 - DNA, 2626 bp, Cannabis indica
tgaaagtttgatctttattaaataacgactttcgctaccaaactaggtagcaaaacagctggaacagactccaatctgaagctacaattaggatacaatgtagtcgccctagcaaaggaatgatccactacattagttgatcgcttaacaaaagaaacaaaaatattatttaaattagcaagcaaattcttacaatcttgagtaaccagtccaaagaacaaaattattctgtcgagcaatgaatagcttggaccaaattaaggcagtctttttccacatacacttccctccaaccgctgtctttgatccagcttaaggcctctcggacacctatggcctcagcaagcacgggttcaacttaaccaaagaacagtttaatgtgtctttcaatgagtagttccgacccattacgaacaacgagacctatgccataactatcaccattgttaaataaagttgtatccacattaatcttgatactatttccccaaggagcagtccagcactcaacaacgtttctagtctgtagcaaagaccataacgattccatctcggaactttgagcacacctccattgatcaagatagcagtttgcaaatgcaacaatatcttcaggatttatccttttccctttccaaactaactcatttcttgcaccccatatggcccaacaaattgttgcagctttgcaacacagatcaacagcagccaaattaaaaactgtcgtgcaccagtcgaaaaaagagctccctgctagtgtagccgtgcctatccccaccctttcccagcattttctagtaacacgacaactaaccaatatgtgcaaaatggtttcatcttcttcctggcacaaggggcaaattgaattgatggcaacatgcttggttcgcaactaaaccaaagtgagaaagaaatttttacaggttcgccaaatcagattaaggatttttgaaggtaccttcaagctccataacatctgccagaatttagaatctgcttcctcataccattgtcccttcaagctttgcaaaagtgcataagcactcttgacagtataagtgcctaaaccctcttttgaccaaatgtagtgatcctcagccgaaaccaaattgagaggaattttggtgatcaaccaccaatctctctcatcaaagatatcgtgcagcaagtccacatcccaattgagctcacctacagtcattaagttacacaaccgggtattaataagacttgggtgatctgttgtaatataaggatttaattcatttggaagccatggtttgccaataacagggatattgcatctatttcccaccaaccaatgtgtaccttttcgcaccaagtcttgagattccaagatacttcgccatataaagctcaaattagacccaagttaagcattcaaaaaactaccatgtggataataccggaccttaaacactctcgaagatagtgaattcagcctagtaagtaacctccatccttgcttgcttcgaagagcaatgttaaagtctcagaatttatgaaaacccattccccctcttttcttgtgcttgcaaagtctttcccaagccatccaatggatccctttgttgtcatccttaaaggaacgccaccagaacttggttatgtattgttcaatgtctctactaatctccataggtaatagaaagacgttcattgcgtagcttggaagggattgaaccaccgatttaatgaggacttctttgccgcctttggagagaaacctcccttcccatgtcttcaaacgattcctaactttatctcgaagatagccaagaatcatggtcttgttttggcttagagtgcttggaagacccaaatagaagctaccctcttctgcaacagttatctctagcagcgaacaaagttgattgcgtaacaccatctcaatattactacaaaagaaaatagataatttgcgaagttaactctttgccccgaagccatttcaaatttcctcagcaattcttgaatacatatagcttcttgaatcatagctttgcaatagaggtaactgtcgtctacaaaaagaatatgagacaattgaggagctccattagcaaccttgcatccatgaatcaaaccactacgctcatatttctgaagcaatgctgaaagcttcttagcacaaatgataaacaagtaaggcgaaaggggatctccttgtctaatttcctgagttggaagaatcggacctacctcgtggctgccatgtatgatcttatatttttccaatgagacacaagacataatcaacctgatccagtgctctaagaaccccatcttacgtaacattgattccaagaagtgccattcaattttgtcatatgctttgctcatatcgagttttaaagccatgaagcctgttttgccttgtcttttccttctaaaataatgtaggatttcaaaggaaaccatcacgttgtcagatatcaaacgacccaggattaaagtgctttgagagtctgaaattattgaatccatgaaaggcttcattctatttgtcatgactttcgtaaccaccttgtataggacattacacagagaaatgggacgcaagtcttaaatatattgaggggactttttcttcgagattaagaca

SEQ ID NO: 234515 - DNA, 2428 bp, Cannabis indica
ccgattacccacatcaattagtttccttcgcagatcaaagtttgtgtaggaataaagctcgaagaattaatggctggaggtatttcgatcttttagttatagtggatatatgttttattaattctgcactttatacaataatatatatgcttcatttcacacatataaatttctaacagtatttcactacttaacgatcctgaaacaaatgaatctgacttttataatggaatttacaattaagactctccataatacaacttattggtaatcttaaggacgtaattaaatattgatctacgttaatcaatctaaccactgaagtatgttagaatctaattaattaactatatttctagatggtcaattcatcttagcaaaatatgtataaatataatttttagtatcttaacgatcctgaaacaaatgcaatgcaaaaagcaaatgaatgttcttaatttattctcattccaaatcattttcagatgctggtttgagttgaatttatcacacttaaagattaaaataacatgagatgaattttacataattttatttaatcagagatgttgtggctactctctaattaattaaaattatgtatattatttatgttcattatctcaaaataataatttgagatatcaattatttcaccttatatagaaatttttttattattatttgcaagtaatatattgtctatatataaaacaaatattgctcccactgaccttctggtatataattaattcataactcttttcaaaactaaaagaaaagatgacaagatgaaataccaattgtgagaaatttattttaatctataggtagacactttaagcttgcatatgttcaccactattagaggaatatttttatggtagtctgtataccttttcctctagtacactgtttgaaattaattaatgaattgaaacaaacaataaatgtcaaggttattatatgagaatctataaagacaagtgagaatgtaaatcttatttgttgttgattcgtagttcaaactgaacttcttagcaatgaatattcttttatatctttatatttctcaatgttgcctaataattatttattggtgaaaaatctatgcttaatgaatgttctccaccccattaggcaactttactaaagatagatttcattgctctttaatataatcattttttcattcatgatatattgtaccataatttcaattctgtgcattccagtgtttaatttgtgtctcaaattaatattatagttgaattcttattgtacataatgtaatcactagaaaatattgatcttattgttctaataaatcatcttaaagatggaccaacaaactctaaaagagaaaatggtttaatatgcatgttgtttagaaattgtaagtaattactaaataacataacttattagaattttattaatgaattgtggatttataatgattaattatggattctcaataaccattaaaattaaatgttgttgtgaatcataattaatctaatacttgaggtataagtttgagaaaataaatgatcttttctagaaactaggttcctagatcgatcgttcccactgatcaagttaattcttaattcaacaattctggtattgtgagatggataataaaatatataacccttgaaccttattagcttttttgatgaaatgctcatttacaaggtctatattgtaatttaacaaaacaaagggtctaatcgataaattttagtaaaacacagggttacaaaatagtatttaacctaaaaaaaataataatgactgaaacaaaatatttatattttatttttggcactgtaattttttaaaaaaaaacaatcaactggtggtcctaaataattacaaacgtatacgatcatgaaaataaaattgaactaaaaattattttggatgttgaaacagagagaagtgtactagaactaacctttttgggggtatgtatattataaaaaattatttttatatgtattacatgttactaaaaatattagttaattatattgcacatattttaatatagtcattttgatccattttttatcggttatttcatttagtaaacctttttaatccagtttttatttcataattatgtacgttgtatttttttttatagaatcacatgtaaattttcaaaagattcagaataatttataatgtcaaaaataagtttcaaatataatattacactcgcgactatttttttaagtatggtaatcaactattcaaactttatttttgcactataaactattcagaaatctctgaaaaatttataggtgatcttaaaatattataacatatgcgatcataaaaaaatagactaaaaagctctcataaatgttaaaatagataggggtgaactgaaatagtcttttaagaagtgcac

SEQ ID NO: 234516 - DNA, 697 bp, Cannabis indica
aatcaaattccccagaatcctcgaggtcgcagtcgtggcagagttcagggtggtcgtctcgtaaatccaccacaagctcattcggattaggagcagaggtttacggagatgcaagatcgaatccgccattaatatgaagaaatattgagattaaggtagcagggtcttcctgtcgtgcctctacaacaaactcaggccattgtagctccaacggtgcaagtagaacaacctgtcgctggcaaccgtatggagccgttatacaaaaggttccgtaagcaagcgcctccagtgtttctaggaggtccagatgtgatgaaggctgagcactggctcactgtgattgagtgaattttgaattttatgggtgtagttggtaatgatcgggtgacctgtgccacatttcagttccaggaggacaccctagtattgtgggaattggtctccctcacccgggatgtcactgtaatgacttgggaacagtttcgagagctattcaatgccaagtattataatgaagccgtccgcagtgctaagcggaaagagttcactgagctagtgcaaactgaggggatgacaattactgagtataccacaaagtttgaccgtttggccaagttcaccttgagtatcgtgcctactgatttcagtaagaaagaaaagtacctggttggttagaatgtgaagattagacatgatc

SEQ ID NO: 234517 - DNA, 822 bp, Cannabis indica
attaattaatgaaagttatccactcacaatataaaaaaaaaatacaactattaaaatttaaaatcactaaacaataaattattatgtaaaaaaaaaaaaaaaactattgagactattaagcactcattcactataaagcacatttcatcatccatcaaatcatgattacaatgattccttcaataacaatttttgcttctaagttgaacaaatgacatgaataccttagatatttcctcaccacagaaaaatagattgtttgattgcactccatgttggttgtactattgaaagaatatttgttgctccataacacttgtatatatgttctcatgcgcaagtgaaatacattgccagaagtgttaagtaccttgggtctagtcatctcatttgggcaaacctttttgtactgcgtctgatcactcctccttgagtgactacaaccattccttctcctgaaatagacatgaaaatctattgattcctttttattgaagcataaatttcctttttattgaagcatcattgataatcaatttccttctattttgatttccttcaatcgttttattgaagcattgttgagaataataattggagatttggggttagtaaattggagaataccactcggaacttggttcgaaggtcttgttaaactttgtgagaggatagggtaaaattgcaatatatgttttaagagaaaagaaaaagaattgaaaaaaatggtttcgcattcaatagcaatagagcaaggcatcttataatagaagaacaaatatttttttaaaaaaataaaataaataaataatacaattattt

SEQ ID NO: 234518 - DNA, 1281 bp, Cannabis indica
ttcatgttattattttctttgattcactcgttaaagtttctcaaagaagatgattcctacaacttttgttttgggaatctaataatgtggatggctgtgaacatgatctacaattatgaaatcctgactttcctaacaaatcgaattttggttccttttaagtgttaattttggaattaaagttgtgcacaaatttagattagatctaaattatactttcactagtgaattaacgatactaaatgataaaaaaagtagttagaaggagttagaagggtgaaatggtaattgaccaaaactaattacgagctgacaaaatgagggataatcactagaattgattatatcaatggacattgcagtaaaactcaataaatataattctataattattaagggtttaattctatatttatatatatttatagtagagtaatcacgaaattaataaaaatgattatttggttgatgaaatttaataaataatctagtttattagagctcatcattatagacacataatccccgaatcgcaacctgaaaacactatcaatgggtgggataaaagttttatatggaaagttcaaaaaaaatatattttgaattatcaaaatagtaattatttattttgtaataaataatttatttttaaattaattaaatttggaacagataaaagttgtcatgacgaatgacacatcccttgtcttaaccaagacaaaggaagcgccacatcattgtgtccagacacagtgcatgcgccacctatatagggtgttcccattagttttgtcttcttaggttaattaattaattcaatagataaatatttaaatttgaaaaataattgagataatctctcaaataattgagagatttcctcaatcggttattgaatacaaatatctataacagaattcggttatattatttattcaaataattaaataagatttaataattaattaaataaaatctttattgggttcatttcatacaccgtataaatcaagttgtatataactttttttaataaatttgtacgtaatttttctaaaagcctaaaaaggattaaccagtaaacttttttctctccatcactaaaaaaatagttcatgctcatgtgttgagatttaatcaagcactttatatacactattattctactagcccacagtagtccttatgtgtggtggaagatctagaagatcaatgtgtgagatttgtcactaccattccaaagatacaacctacgaaaagacttgaggataccctgatagg

SEQ ID NO: 234519 - DNA, 602 bp, Cannabis indica
ctaatcagcccatttaactctaattcttaacctaattaatccctataaatagaacattacgggtttcaattaaatagatgactcaagactctctcttgtctgacaaactgaatcaaaagtaaactttttattttctattttctatttttgaattcctcttaattttttcatagaattttgtagtctatggtgaattaagagtatacccattcatgttaaaacaatacttaacatagccagaaaggaattaagggctagagatatgaatggaaggagtcatattatttcgttgtcatcaatgtaaggatttcttaatctcttatgtgtttattttattgttttaggaacttcatatttagaatgttagatattataaattataatcaaacatatatgttagtaaatctaaatcctcgtaaaataagttccaatatgttccaccattccccactcctcctggtgttggatcgtcatcgcatcctcccaagattcagaacaacaacgacgatatattaaccatcgttagaacattaaatttattgtaattaactttagaacttaactttttttttctaaacatcttttaatattttatttattta

SEQ ID NO: 234520 - DNA, 1052 bp, Cannabis indica
actcctctgcactaaatcgaatacaacggtcattaaccttttcctaaaattctttaaagttggattgattaacctcccttaacaaaaggctttggacaatttggggatgtaatttctaaaaaaatgaccaaactgtgtatctcggaacatctttagcaaattatcagaaattgtattcttaatgttattaatgacagaatacgtgcaaaaagtaacatacttagatctgtaataatctctaggactaaatttgcaaacccaaccctgcatataaacaaagaagaaattttaaaacatgaaaatataaacattaatgtttaaacagttatagtttcaaaactgtataaaaactacaaaacaactataaatatacaatcacacataacaactttaatacaaactaaaatacaacaatctataaaatatcattacgaatataaacaataacaaataaataaacatcaaataaacttaaaaataatgataaacaaaaaataacaaaagaatatatcatacttctataaggaaaaaaattgaccaaaaccatagattgaaacagtaaaacaactataaaaaataataagcaaactactatcaaaggtgaaaccatcaacacagattaaaataagcctaataaaaataatcaaatatataaaatcataaatatcaaaataataatatacacaaaagataagaaataataaccaaaatagaaactaatttcaatgaacgaaatgattactaacaattaaaaccaaaaaaagaataatacaaaagaaatcaaaataacttaaaaaatctaaaccttaaaatgaaatcaaaacaatatacacaacccacaaaataaaaacacaaaatatcaaagttgggggaaaactaaaaagaaactataaataaacctctaaaccatgatcaacttcaaccttctctttcttattctcacatggagaagttttttgaggaataaaaaccttaaatttcttcttcgcaggaccacgttcctatttcacaataactgtagcaaagttcgagtcatcatcttctacgactgg

SEQ ID NO: 234521 - DNA, 728 bp, Cannabis indica
gcacaaacaagaatttatataattaattatctaaaaaataagaaaattttgatacaaagatgtcatcataataatggatatgaatgagcaacattttctacataccagcgttggacgtccacgcagttgagatgatctcaatttcacttcgaagtaaggattgtttgagcagaatttgctggctgcttcagaaactatgccaaatcctgaagatgatggcatcttattattaatgcttcagaaacttttctaaatcaattgcttctttctttacaattatgtcatatggaatcgtactggctttatcataattctagctaggacaagaaggttcaattttcatgcaaggagcattattataattttcacctggactgttataatgatcaagaaagtatattgttataaatcagagttcttgtttacctggtattggtaacatacaggaagttgctactccattgccatgaaaaataaccacttcgaatgatattattccaatgctatttctcaaaacaaaggcacaaatgtcacctactttcaactcattgtcttgaacaaatgccttccaaccaccctcgattgtggctttcgaagatgttcctagtggccttacatagtactttacacaccaagtcctcccatcctgaaccttaaggatcacatcttgaggactattattgatcccgacaaggtacttttttgcaaagagagatggcataccctag

SEQ ID NO: 234522 - DNA, 574 bp, Cannabis indica
attacgcaaattttcttttgaatcaaattagtgagattaaataacggcgggaataacacatagacacacacacaaataagataacaaattttggtacgtctcaaaatctactggaaatcttttagggaaactaagaaaaaaaatacacagtgttttacaacactcctcacaacccacaacccaattatactcaagtattttggtatgtctctaaatctacagcaaattttctgataatgttcttgcaattatttgatttattatgaaatatttggtttatttgttaaattattaggaaaaatacttagcttactcagaaaaatctaaatttatttaatatgattggttatgagacataaactatttcaaaattggtagatttaaatttcggttaattttgtatttttcatgaattatttcttttatttagtaaattaattataaaaaatatttaggctgctcagaaaaatctaattttgttttctatgattggttaaggattatagactgttacaaaattaataaattcggttttcggtcgattttgtatttttcatgaattatttgtgttatt

SEQ ID NO: 234523 - DNA, 954 bp, Cannabis indica
ttaaatacaatcaaaattatcaactataaattctaaatttcaaaaataaaactataaaatacaaactttaaatgtaaaatagttaactattaaacgtaatttatatattatgttataaataattttagtaaaaaatatgtaaatcgatttattcagtttattcgggttatttgggcgggtttcaataatattcaacccgcttaataaattcattgggcagtttgagtttttcataaagttatttggttgtatttttttgtccgtttattcgatttggttggcagtttgttaatttttttttgaacagtcctagttagtgttgtattccaatcctggtttgggcggttttttaaattaatatattcataaattggagaaaaaataaaataaatgtaaatatttatccaaattaaaattcttttttttctaacaaatttggaatttaaatttaaaactaaagagttaataatgttttgaatttagtgatagtaaaatagaataaaagaaaaaaaaatagagaaaatattcaacaaaatttaaatttaataataaaaatcataaggagagtttaaatgtggttttttctaaagaaaatatctaataaaatttaaattaaatttaacactaaaaatatgcgtagttaattaataaccatataaatttatttgacaaaaaaatacaaaatgagaagaaaaaaaaaaaagtgtacctaatatattaaactctggtgaaggaccttcaattcgtgtgatgatgtcttaccgttctttctagggtattttttttaaataatttaaataataccctcttacgtaaataaagtgtagatatgattataatttttagaggtagaaatataatctctcctaacctaaaatataccatatatatttatgaaaaaaatatctttatatattaaaagtgtatatttaacggcattttgttggtttaaca

SEQ ID NO: 234524 - DNA, 1159 bp, Cannabis indica
atactctttaaaaactattatattaaactatgtgagacccgatatttgttgaaccaataacattattaacacataagagagtgctagacactactggtgcccattagcatttttcatatataatccacatactctaacaatttatttaatgtggctataattaattattaaagttgttcgattatatattttatataactactactacttgttaacacaagacaagattgaatcattacataatatataaacatatatctaccacacacttccaaaaagaaaaaaataagtttgactacaagtctacaagatgactttaggaaagccttcatcaacttaccaattttattttaatttgttgttattaattagtattagtgttgaaataatttatatttatattaaattaaaatatataaaagtaattaaaataaaattagactattaataacaataattctcactataatttagcttagatagattctcacaactctcacagtatgacttctaatatcaaaccatcttatgttttgatggggtgtgaagcaaagttttaaataaataataaaatttaaataagttttcaaacaagtttttttaagacgttatgaagtatgaactaacattaaaataaatattcttaaagaaaaaagaggtttggaagcttctcccactaataattatactacaaactattgtggacattgtcccacatggaataaatggtagagaattgagccatatataagaacatgagctactctactcatagccaattggttttgagatggaaccccatgattctcaacatggtatcagagccatatcccttgcgggcaagtgatcatatccgatccgcacctatacagatagtgaccatgtccactctgatacggttcaagattgatgagcaaaaaatagccatcatcttgagggggaatattgtggacattgtcccacatgaaataaatggtagagaattgagccatatataagaacatgggctactccactcattgccaattagttttgagatggaaccccataattctcaaccaacgaataagttcctacaaagttaaataaatttattaaaaataattataatttttatttattaaaacaaatatgacttttttagttacaataaaaaaaa

SEQ ID NO: 234525 - DNA, 610 bp, Cannabis indica
tagctcgctttacttcctaaacaaaaacctctctaaccaactcctcattcatttgggcagtaacacgatgttgaacgcagtcaatcacctcttcacaagcactaccatcagaagtatacaactgggaaaaataattaacaaccacatcttccaacccatgctcccactcaacccaacaaccactatcagttttcagctttgtaattcggttgtgactccgtctgttgctggccactctatgaaaatacttactattttggtccccttcctttaaccaaaattattttgctctttgtttccaaaaggtttctttctgatcaagggcaacaaaaagctgcttcttgacttcactgtatcgttggatagacagtgaatctttcttgttcttcaacatcttcaattcacgtttacagctattgattctgctcttaaaattccctataatctccttcccccaagatgcaagagcagtggcacaagaacttatttttgcaaaattattttcatttcccaaatcatttcagcaactctttattatctcaaaatagacaggttccttaagccaagcattttcaaatctaaatctattattgaggataacattagattg

SEQ ID NO: 234526 - DNA, 2937 bp, Cannabis indica
aaatgccgtggctacagtgcacggcatataagccgtgcactgtagacaaatcctcattttgcagtgatagatgctgcctcgttggaacattaactactccatttttcaatttttgctgcctccttggaggtgctctaataatttcaacaaatctatttcctttttattcttttaagaaaacatcttattatttaatttattattaccacaatagacaaccatggtgccagaaataggtttcaatgagtactacaacacaacaaaacaagtgcctacattaaaaggttagccatcaaagtggtactttatatctttaatttgaaagtcacacatcaagattcaagcggctgatatctaagagcactcccatcagtgtctttatttcattctttaaaatacatcactaaaacaatattttctttattttacctcaaatttttatattgcactatatatcagtttctctattttattctttacttcatttaaatattatattttaacatatttttaatattaaacaataaaaaaaataataaaaaactaaaaataaacaaacagacatccaattgaagagaaaaattaaaaaaaataataatataaaaataatttaaaaaatcctaacctaaccctgacatgtagcgaaggaatagagcttatgtataatagctcacaatataaagcatctgttggagtaggattttgagaccaattcttcatattttaaattttctttattttaaagcatcagttgggactgctctaagtttggatagtagtttgggagacctatcgtccggtttagggcgacatgtcgcttgtgtgtgcatataattctcctaaaacatgtcatgaaatcatggtacaaaggcttcgggcgatatgaaatcatgtcgtgtgacttatatggacgcataacctagaagaagttttcaacctagcaaggaatggaagttttggagtaaaaatttggacaataattatttaattgtgtcaaaccttgggttacatctttctaactcgtaaccttgtattttgtttgatctaattatattttctactactataatctctactgtgaatgtttgttaatcaattttgtatctatctgtattcattctcttttctttgtttgttaattcacattcaaccattgaatgtgaaaattgatttatccataaatataattgaaaattaaagagtctaaaagagaaaaaaaaactagattgatgatgactaatagtgttgcatccttcctttctctagagctttatttttttagttcttttgaaaactaaataaaatttaaccaacaaactagatctaccatgttatagttcgcatttaattacattaaaaaatgcactcatgactcacaatatttcggccataactcaaattggaacgattcaagatgttttagaaaacagaactttatttttagctccaaatccaatcctaaattaaaagatatcaaaatctaccaacaagttatgacatataaaactgagttctttggcattgcaccaaaatctgttgaagacactctaaataactccaaacatacaattagccttcaataatcataataaaatcaaaatcatactaatgtttggagctgtcaaaaaaactcgataattcaattaattcttttccaaccctcttatcatttcaaaaataccatttgccaaacagtgttaatgtttgaaccacaaatcataacaaattcaacaactatttgtttacactcatctctatctagttcaatcacacataattataattgaaaaagatcaaacaaagcagttaagctcatcttaaattcatgaacaattttgtccatgccatgcataaacttccaacaagtttaatgaaatccaaattgttgccttattaacattaattcaacaaaaattgtcatgcaactaatttcaatgaaaacaaaaacaatccgaaatttccatgccaaatcatatagtagcatcaaagaggacctgggaaatttccattgtccctttgctcattccatttttcaacctgccaaaaagatcaaaacagaaaatgttattttaatatttcattatctcatcatcaaaatgaataggattcttgacttaacacaaataagctatagtacttacccattcaccagggcatagagaacggtaatatctagcgaatttctcacattcgccagactcttcaccctttgctgccaagcacctacatggattgaagacatgtaagtaatttaataaacacgaagaaaaaagtaaccgaaaaaggaaaatggggacgtggtacctgtggaattcaatgtaacgggtgaaacagtgtctagtttgatttgttgtagggaaccgaaaatcggcaggtgctgttttcagttcaatctgcaagaaaagaagaaaaagttgagttgaaatgagagatggtaggagtcgagtctagtaacaagtcactaataggttaagcttgtcatgccaattatgctattcggtgttcacaaccttcatattagaagatggtttggagagttttaagaataagatcagagaaattagtggagagattgcagcaactaacaattgagtttggtctttaagccattcaatgttcaccatcttcatattacaagatggtttgaagaaattgagctcgaatcaaagaaatagtctattcaaaagaaactctaacaattgaaacactcaaaagtagtgtcaatatagatatagaccaatcggctttgaatccattaaaagaaatgcattgaatagcaatgtagttctaagtgaaacttgattcttattcaacacaaatttggtttaacataaaaaaggaaaggcacaagctataatataagaacaacaaaaaaaaaaacacctaaagaattagaatttcaggagtacatcttttcattaatttggtaaaacaaac

SEQ ID NO: 234527 - DNA, 830 bp, Cannabis indica
cggccactctactgtatccaatcccattaatgctgtatcttcgacagccaaacaaagcagcaaatcagggtgcggtcaacatggaataaatcaagcacaaaatctgggattcaatcaaaataaatcaatcagtgcagccaatcaagctacaagaaatatggaagaggatttcccactattgaatgagaggccgaataaggaaagtgtgggaaaggagcaatttcaaactgaagaagggggaactgatatggcaaatccaattaataatgaggaggctcttcttattatagaaaataagagaaggagaatgggctttgccaatcaaagtgggcttttggttatggaaaacgtgggacatgtgacaaatgtggaaaataccactgggcctaccgatttaatagatgtggatatggacgctgaagcaaatggtagtacaaaaaacttgtttggggcgggttctggatcacagacccgccaggaattatgaatgtgttaagttggaattgccgtgggcttgggaaccagcgggcttttcaattccttaaggagattgtgtctcaaaagaaacccaattttatttttctttgtgaaacaaaaagtgacaaaagtaaaatgcaaagagtgggccgtgctttgggctttgaaggaatgttcattgtggaagcccaaggaagtgctgggggcttggctatgctctggcgttttcaaacagagggtcgactgcttggttactcaactaaccatatcgacatcatagtttcttcaccagagagagacgagtggaggctaacgggggtctatggggaaccagttcgaaacagaaggcattt

SEQ ID NO: 234528 - DNA, 926 bp, Cannabis indica
ttttgtaaaaatgtctgagtctgttttgaaatttgaactccaagtttcttaggaatagaatatcctaaggaattagcctttccattcaaacccaaaatccaaaaaccttaatccaaacttgagatcaatgatgccaaaattagggagcatttaataaaaaccaatcaggatgaagtttccagtcgctataggcaatttttagaagagataactgagggtaaatgttgttatcgtgagatgcaacctggctgaacctcaatatttatcttctaatcctctagcgagacccttatttttatctcaagtcattgttgctttttcattaggtgaccttgattttgaaatcaggtccaccaagcctcgtaaatcaaagaccccccaaggtccttgtgtcacatttgaagctgaacttattgaatccaaggtgagagccattggagaatatgtgggtcgtgtattaaagtcttgcagtatcaagcaaaggcaaggatgccacattagatccgttgctccaggggaattcagcggcttcccttttgtcaggggagtctgctagcaagatgtggtatacttctagttatagccgaccaaaagtataagagcagactgttggtggattgggccagccagggcaagaccaggtggccaaccgtattaagggagcattgcctagccaattagatgaggttatggccgactagcttttggaggtaatggttggctaggttgttgattttatggctagccctttggaggccagtacgatgttgtagtttgatcccttctgcacttagttggctttgcccccgacatgattgccgtagagcctttatgcactcctgccaataactattcaacttcttttttggtaacacttcttagaggtggcattgggataccacgtctatgcgttatgttgtctagga

SEQ ID NO: 234529 - DNA, 682 bp, Cannabis indica
aaaagtgcggattggatcggatgaacacccctactcacaacaatccatctaactgaaatcatatcccttgtttcacttgatgtggttatgcttttgtagtaaggaaagagattatttcttctttattctttgatttgtttccttttatgtcgattcttgtaatcttatatacccattttcaacttgttcgaacgaaaattttcaatcaatatcgaaatgaattgttagagaattttttttttctttttgtgtgtattaagaagagaggagttgtggtggtccctctcggaccgctcaaatcccactagtgaatagaaagttgttatcttctcctttttcaccatgtttgatgcctcaaatgaattaataaacattctagtcaaatcaaccactattccagccaaaaccaattcttgactcctactgtctaaatcaccaccattgaaggcatcattgtccttttagtatttgtcattgagaatttctctaacaccttatcaatgtaagttgtttgagagagagcaagggatttgttcttctagtttctgataatttgaataccaggaacataagtggcttcacctaaatccttcatttcgaattgagtgtcaagtcattcttcgatgtcagtcatcttcttgatattgttaccaataatcaaaatgtcatgaacataaaggac

SEQ ID NO: 234530 - DNA, 4386 bp, Cannabis indica
aaccggaaatgcaaaattatgaaaacgactaaatgacataaaaaggcatctctgaattcaataataaagtataataattatttaaatagttataaataattttcataattaaacgtgattaactgctaatttccaaattaaactaagcggtctttacataacagtggtggaagcttttgggaaaggaaacttatgtattttgccaagacaacatgtagcacaaactgaaaaaggagaatttttattgctaacaggcagattacaaagctttagaacagtttgtacaatcttttctgagggattgcctaatctattatgccatagtgtgatatcattttgaacattaggattacacttgtggcaacttgacatagagacctcagaattttgaaaagaaacagtgaagacacttttgacactaggactgctacaggtttgaggagagtcattcttgatgattctttccttgagatttgaggaaacaagattgatttgtgtagaatcaaaagtatataggccattcttgtgcatccccttcatcaaagtagtatgagtcaatttgtcctttacacaacacatgtcagcatgaacttcaaagaacacattattatcttgagcaaatttagatacactaatgaggttctttgttatttcaggcacatgaagtaaattattaagaataagaggctgtgtaaaagatgaattggagggaataataaaggattgaccaatatgtttaatagacaaacttgaaccatcaccaatgtgcatttgaccctgtccattgtaatcatagaagtttgcaagattttgggcctaaggagtgcagtgatttgtggctcccgagtctgggtaccaattggtatcactggtgttgttggcagtggcaatattagcctgaggttgggatgttaatgctgaagtttgactgctattcgaacctactggaggccttgtgaaattcttatcaaaacgataaaggcagtcttgcacaacatgaccaaatctaaagcaaagctgacattgtattctagtgttgaagttcatactagtttgtctgactagatccactgaagaaccgtgagttgcctctgccaaattgttgttgctgtctgaacctcctgaaagcaagattagcttcaatagctgaatcttcttcaccagtgacaatattggcactcagatcaacttctttccctgacttttcaattcttgattccgaagctaacaatagagcctcaatttctccaacagtatagttttcgattcgagtgttggaggagattacaatgtgtcgtattcactgggaagtcccttgaaaatagctgcaacgtgatctcgatcactgagaacttctcctacagaggcaaccaggtccactgtttgtttcactttgagaagataatcattgagggataatgagcctttctttaagttctgcaacttagttcaaaattccagaattttggaggagacttgtaatgtgaagtgtttttccagtgttgtccagatctgatgtgaggtgttgcagccaaccattcttgttaaaagactttcagtcatggacgatagtaaccacgaaataaggagttgatcttgaatttcccaatcgacatatgcagtattgattctgttagcagcacgatcttcattggtcaggaattcagctggaggagggtctttgatatatctgagcaatcgattccccttgatagcagcaagaacttgttgcttccaaagaagaaagttatgatcatttagatgaatcgaaatgttgtgattgaaaaacactggatcttgagaattttggttggttcttgatctggaatttggttgagctccatggacagctggatctgcttgattgttagctgagttgtttccaatcgttgccatgtttgcaaccagaggaggaaactcccactctgataccatgttaaatcttctagccacgaacacaagttcataaagaaaacaaagtaaccatgaaagtaagaaagaagaaatgagagaaagaaagacagagaaagaatgaatgaaaagatctcattgattaaaggagagtagtacactggtttatatacatatcagttgcaactaactgaatacaaacaaactaacagatacaactaattgataacagaattaactaactgtctattccaacactattattcaatagatttgcttcaggtaaaaatgatctagctttgatatagtttcctaacactgcgctgagatccacttcctattctgttttctcaatatggaactcagtggcaagacgaagagcccctctctcagcaacataatagtttcctaatctattattagttgagatgacaaaagtgtcatactcacttggaaggcccttgaagatcgctccaccatgatcacgaacactaagagcttcaccaacagaatcaagtaactccacagtctatttaaccctatttaaacttgagaagatactcattgaggctcaatttttctttcttgaggttctagatttggtacgaaactgcaaatcatggccaagactaggaaagtaaagtagtgtttgagtgtaggccagatctggcgagaggtttcatagccaagcatcagtgtggagactctcattcttggaagaaaaaagccaagaaacgaggagtcaaatcttgttgatactagtgaagaaaatcaagatttaaatttctagctgtgcattggaaagaaattgaggaggcagactttccatgaagccttggagacaattccctcaaatagcctctagtgtacttgttgtttccacaaaagaaaattatgatcattaagtgattgaatgagattggattgtgttagtcagattctttctattattcacgcagttggaggaaaaccaggagggcgattgtcaatctcgtttgtcggacattcgcctgagctagatgtggtggccatgtttgccattaacggtggtggaaaccctgatatatgttaaaactcttagccatttataatagatacagataaggaaataaatagaaaggtattgaaagagattaaagaagtggaaagaatgaatgtacaatcctttattctcattactcaacaaatacaaagagcagagtttacatacagatacaaaacaagaaggaagctaactgcattcagttagaaccagtaggacaaggctaactatcaaccaaaagcaacaacctttagctaaccaattctaaccgtactaactgtcattgactgttccaacacaacaaaccaattaaatatatgtgacagaaagagagtcgtgtaaaaatatgaatacgcttatagaccaaatctcaaccaaccatttttctacatacaaatttcaaaagcttctataacatattattataattaaaattggtatctaataaactacattagttaaattttcttttaataatattttgttaataaataaattgggcagccataccaatttgggacaagctatctttgtcaccaacgatcaattaatctatatgcacacgataatttgtgaagactattacatatgaatatgacgtatatatgtaatataaaaagcacaaaatttcaatgtgttgctgtatctcaataatatatgtataaaaaatttcttagtcaaactactctgtatatagctacattataggtagttctagtacatgagaaaagcacatttttagtatataccaattgtcatacatcgccggctaattaattagcaggctctggccggcccacattttccatacataacactatagcacatattttcacatatatatacacacaaaatcttaaaaatatatatatgatcatcaattaagaaattaaaaacaaaaaaaaaaaagtaaaggtaaaggtactaatacataataataataatattatgaggcaagcgggaacatattcaggaataagatttggagggaatgggagtcattgtttgccattagcaaggattaagaagattatgaagagtagtagtggtagtggtagtgatgaagaagtgaaaatgatatcaggagaagctccaattgtgtttgccaaggcttgtgagcttttcatccaacaactcactcataaatcttggacacttacactacaatccaagaggaggattcttcataaacacgacgtcgcttcagctgttctagccactgatctcttcgacttcttacttccattggtagaacatcaaaatgatcatgatgatgatgatgatcttaagtcatgaattacagaattaaagagactattaatcttggaccaataatatacatgattatcttatatataatcagactgtatatattattaattatctttattgtttatatttatatgggaaatcacttatataatattttttaa

SEQ ID NO: 234531 - DNA, 1111 bp, Cannabis indica
ttatgtctaactatataaaagctccaattggtaaaactctaatagtaaaattttatttacatttgaaaaaaggtacattttatataatctaaataatgttagaaaggaatcacttttcacctcattttattttaaaaagacaaattatatctccacatgaattacgattccaaaagaataagctttccagtataaataccaaaccaaacaaatgaatgtattcactttaggaaatcataaaaataggttgcagacgagcatcgtcaaactttcattagtcacgtaagttataggtagcttttcctttgattaacttttaattagtcacgatgaacaataacttgattaacattacatgttttgcagtgtccatatggagttattacaattaatggttccaagaaatcataaaaataaacaaaaattggttgcagatgagcatcgtcaaactttcattgggtggttaaggaataccattttagcaaagttgaacgaaccgaatcatggagtatccgatgagttgagtcgtattgcccttggaccaaattttacagttgcaaagcatgaagcatacattgtaaggggtaaatattttcatacaaagtcaagagatgatgctcaagaggttcaaaacagtggcatacatatcatcgtagaaataatgcattttgcaagtgcaaaagataaaaatcctgttttaggtaccatgatgtactatgaggttattgaagaaatatgagagctcaattattttacgttccaaattctactttttaatgttcttgggttgacaacaatgttagagtaaaaactgatgagcttagttttactttggttgatttaagtaagagaggaagcaagaatgatccatttatcatggctagccaagcaatacaaattttttacatttctaatccgactaatgataaatggtctgttgttttatcgacaccagagaggaggttcttaaagaataaagaggatgaggagaatgttgatttatgttatgatgacttcattgttgggcaacaaattcatgaacaagttgtggaaattgatcttaaccttgaagaagacgatgctaaatacattagaaacgatatcaatgagg

SEQ ID NO: 234532 - DNA, 686 bp, Cannabis indica
ggaaataaaagcgtcttttgtgttatcttgatatcagctttagaaagcaccaccttaagacgattggccatgacttttggagatgatcttgtaacaaaatattacacaaagagatttagccctttaattcccccattattagtttggattttttcttctttcgggacaagaacaatatgtgtgtgattcagcctaggaggaagaaaacattttgagtaaattttttttgaactagaagtattacatcctacttcacaatgctccaatatttctgataaaatcctggtgtcatgccttcaatgcctagtgatttttcaggatgcatttgaaagggagcttttcgaatttcatcatccaagacagtggttaaaaggtcctcatctattgggtagttatcgtactaggaatattaccaagaacaccatcaacattggcattagaggaataatatagttgatcaaaatagcttttaataacctcagaaagtcctgggttccgtcaaaccaattaccagaagagtcttgtaacttggtaattacaatatgtcatttacgggttgttgcagcagcatggaaaaatcaactattgtgatcaccttcacgcaaccaaagttgcttagatcttttgcgccaaaatacctctctttgagcataaaccttaaataattccttctcagcttctttaaa

SEQ ID NO: 234533 - DNA, 761 bp, Cannabis indica
ggggcagtactttgaaggtattatgcttgagccaagcgatcacaggcatgatcctcgggcagaacaataatcttttgctaagaagaatacttgggattcttgtaatcacaagtatattctttatcagcgagaaggcccaccgatcgcaagttaacttcgctcaaaaggaagttgcatgaccgaagacccttgggaagagttaacagacgcctatgcctactaaccatctcgggggtaggggtaggtcccgtcaaaagagctgccagaataaacaaaacattagtcataaacttgaaaaaggaacattgatgcaaatgggtaaaaggagaacaatcacttacgaagttcgcgaaacatggttgtgccgatgagggagaaaccagacgtccagaagaagttgttcttaaaggatactttatttagcaagtgtacaataattttaggctcgctgggatgagtaccgagatagaaaaagcccattgcaggattcttcctcgatggaatagccttgactgagtaaagatactcaatctctactgtagtgggacacccccaattcagaattttgtacaaaactttcaaactagcgagaatcctgtaggccatgggagttagctggaatggggcaacaccaatgtcgtttatatagtctttgaagtagtcaagaagaggaagggtggcccctgcactgatatgctcaagactccatgcacccatgctagttaagccactaataccggtcttaccactagtccccgggt

SEQ ID NO: 234534 - DNA, 1052 bp, Cannabis indica
agacctaaacccgaaccgagactaggactagaacccgaacctagaccaggacccaaacccacacaataactgggtcctggacccagaatcaagatatggaatgggaaacagaactaggaccgggacctagtacctgactcgaacttgaacctaggaccaagctcgtgacccgacaccaaaaatggaaccagactgggatcctagattgggatccggatcaagacccaaggcttggacaaaacccgtatttggtgtcttgattcgggagccagccttggaaccgaaccctgacaaggacgtaaacccacacgaagacctgaacccaatcccaaacccaaaagttgacccgaacccgtaccatgtgacctaaaattggaacaaaaatcggaagttgaccgggactggaactaggattctgacttggaatcataaattggacctagatccagaaccgtaaccggaccaggaccggaactccaaatcagacctagacccaaattgggagccggacctggatcccaacccaaaccttgactcgggacccgaacctaaacctgcactcagacccaaacatggaactagactaggcacacagcaccagggtcgggaccggacacgatcgtgtaccagaccgaaattgagacacggacctggacctaaatctgggacctgatcccaaacacagacttggacgtagatagggatccgaatacgaacctggaatcggacaaagacctagacagggatcgaaatgctagacctagatctgcaccgagatcctggcccagaccaaaacttggacctgcactcgggacccaaacttggagctaaacccgaacctcgacacagatcagggtccagaccagaacacaaacccgaacagagactcggactagaactcaaacccacacctagaatcagacccaaagctagacccggacctggacccaaactcgaacccagaccaggatcaaaaccaaggacttaaacccagaactgaatccagactcaaatcgggatgggaacttgggattcggacccaacctagacca

SEQ ID NO: 234535 - DNA, 653 bp, Cannabis indica
ccaaaatcatcatcactgccatcaccccccatcaccaccttcactgccactactacatcaccattaccatcaccccattatcaccaccattactactacctcattaccaccaccatatataatcaaaaataaatctaaataaaataaaattaaaaaataccacaccacaccatagtttcagatctgaaacaagaacaaaacacctaaatcaaaatctcaaaaaataaaaaaaaaaaatcagaacggtggccatatgagcggctgtttctcgaccccggtgagccaaacgaaggccactaacagtctctccgccactcgaaatccagaaacctcaaatcttgagaaccccctaaattcccttttctctctcgcagatctcttttgcgtctgggttcaaggttgtgaagttggagccttcatcttcgttattcaggggtcgcgcgggtcttgggtggacgacagccggttcatcgccgatgatgggaggcaatggcatctggagaaagttaagagcaggagagagagatgaagatttgtaattagggttttgtcttttatttttagtgtatttatttattaattaatttaaaaataaaaatctgattattaaaaagaatgaaaaaaatatttatttattattttatattataaaa

SEQ ID NO: 234536 - DNA, 751 bp, Cannabis indica
ataaagatgaatagttaaataattttttttaaatatgaataaaagttaataattgaataaatacttgagagtattctgttatcattaaaacgtaaatcaattaacttttgagttataaattgaaacacattggtcaggatgttaactatttctttttctaatctcttcactgaagttgtaatcaaaaataaaattttatactcatttgaaatggtctgtacttacttaaggttgccacactttttaaattttaaagacgaaccttaattcaataggttcttaaacttaagagctaattttttttgcttattgttgcatgtattagatttttctatcggataaatgatagacacattaaatatttaatgattgataaattgataagaaaaataatagaacaaaaaatatgaataataataacaattaccttctcattaataaaaatcatatctagacttattaattttctattcttcttagaatgtcatgtcacattcttatacttctcctttatatatataaatagattgtacaattttaataattttcttttatagtatatatataacaaaattaaagaaatattaaaatgatacttatatattttatttaatcttatgattgtacaaaagatatttcaaaattaaacatattaaaaattcaaatttctgtaaaagaaaatctgaaacaatagtaaacatatagagagtaagtccactcacatcacagtctttacattatttaaaaaaaa

SEQ ID NO: 234537 - DNA, 1287 bp, Cannabis indica
tgttgatcaatgaaagagtatgaaatgtagtcatttttgctttaatataatctcattttccataagtaattgtcagatgttcatgttatgtgcatacttctgcaccaaacataacagtgtaatacaaaatacctaactcgttcaacaattgaatcatgttgaactctaacttgttcttcacatagttagtggtgaaagctttgaagcaaggagatagtgacttaggatcatgctcacttgattccttttgttgataatagtcacgtgtgtctctacctcacgtattagctctattatttgaaatacacaaaatctaatagggacacccttcttcatattacaattcatgtagctacgagtagcatcatgtcttgcttgattagattgttgcccaaacatgacatgtagagaatttattatttgagatgcattctccatttattcatgcgtcttacacataacattgtccattctaacgagcatgaagcatttggccttgttgttggattgaatccaagagtcatatctgtctcaaatatttttttggggcattgacagcaggttcctcaggacgctcctcagttaggacaaatttgtagtttttacaaaccagcatcaaatacagattatatttctacttcatgaaatttttaccattcagtttttcaagagctagtaaagcagtgaggagatttggcattgtagacatgactgaaagaaataaagataacataataaatgtacttgaataataaatatcattttggaatgattgtaaacatgatgcatgagcgcatgcaagtaagacatataaaatattgtttaagttattccacgataaaactcttataaataattgatcactgccttagggtgtatatagaatcgattttattgagcatatgagacaattctcatattttaaattttgaaacataaatatctcatattttcttttcaaaatataaagtaccgttgtttggtcaagttaacaactaaccacatagaagcatatttacactttgtgagtgtaacccattattttagatttcatgacttaacttagtaacaccaccttaggatcagtatcacactaaaatatataactttctcctatattagtcaagagatcaaccttgaacaacaatatagacaaatactttctttagggtaacgaaaataaagtcatctcgaggccagtctagactcctttggtgttgaccaataatggagaccataggttacattgacatcaattccttctcccactcactattttaggttaat

SEQ ID NO: 234538 - DNA, 1372 bp, Cannabis indica
taaccgagtctgcatataactggattgtccaattttttcttggtaaaaaaaaattccatatataattcgttctttttctgatctctctcaacaaactaattgtatatgcggtttaatgttcaatttattttatatatatatttttaatttctagagttatagttgtgattatatatagatctatagttgtgattatatatagagttaaaatttgttaaatatcagttcaaatattaataggatttgtattattattattttatcatatataaataatattttattattttattaaataaaatcacccatgaatttctcataaaccaaaaatttcagttacataagcacactttatatagaatagataaatataaaaataaaaatatataccactactcccagcaccgttggggctaccgtaccaagttgcacccgcgctggcccaattggcgctgacccgatcaacatcaattgatgagacgttgaaaagcttcatgggattgaaaacagaggtaggatttagatttacgagtagagaaatggaggctattagaactatgacggataataaatacgggtgatcatgacaaactacacccattttgaaaacacacttcttacttagactaacaccttactacacccattttgaaaacacacttcttacttagactaacaccttttttcagctaattattgagtgagttgttgtattaatgaattcgatatataccataacatgttggtatttatagaggcaatatagaagtaatttttcatttaatggtttatatattaaaaaaaaaaacattttttagtaagaatttccttcacgtatatgtattcttcaccaacatgggcaggagcaattgtttattttaagttaatcaaaattaatgatttatcacatatattctttcaaaaacgaaataaataataaatgatttcaaatatataaatatttccttcaaagagaaaaaaaaattgacacaaaagaaaaatatgcctttcacataagtacggaaataggcctaacgtccgaaagtggcaacgaacttaaaaatattgttttattaaaatagacttaaaatattttagcaatattattgttgaccctgaaaagtgatcaactccagcggggtcgacaaatctgatgcttgtcaagtgtatacacaaataaagagtaagaaacaataaacaatgagatttgttatagaagttcggcccccttgtgatagcaagtaatgacctactcccattttaattgtatttattggaaatattttacgaggatctagatttactaacaagtatgttaattaacatcctaaatatgaatatttccaaaacaatgaaataaacacataagagt

SEQ ID NO: 234539 - DNA, 1086 bp, Cannabis indica
ccctaccaacactagtacgaagatggtacttcagtgcatgtagtacaatggtcgtacttctattaagaacattcttaactatttggtgagccttgcacttaggctcaggtggcctaagtacaagccattattgcattgtttatatatattttatgcatatattactgagtctgtcgactcatcagtttgctaccatgtgtaggtaagggtaaggctaaagtggaggagcagtgagttggggctcagcaaggattgtacatatcgcggcagtgcaacctagagggtttcggtcttactgtattttggatcatcttttgttgtcgtcgtgtggcttgaaaaaaaaataaattatataaatatatatggtatgtaaatatatgtggtatgtaaatatatatggtatatttatatatggttataattagttaaacatttttaaatctacaattaattagatttcaagtacgggtgttatacccgacattcggctaccattttagtggaggacacgtgtcaagataaaggaaatatggatcgatgaaatcacttttaatggaataactcatttattgtgtaagtagcagagtatacttgtaactcggcaactctaagatcttatgcaaggaaaagatatacagactcttgtttagtgtattaacgagaaaccatatgtcattaaatgcataaatcgaggcatcaactctgttacatctgggaagatgaaagcaacgccgcatatcaaccgtaagaacacttagcatataatgtacaaactaagtataacagtcgggtgggctcgagacctagtaagcgagacccctatctcgctataggaaggcacatctttgtttctttaactagttaacttcagacatcttttcagtgagacttataatcttgacgagtaagaagctaacattcaaatgagcctcgaaaaactctctattaataaaaactgccattgtcacaaggaagcgttaagctttcaaacaaagaagaaacgaggcgtacattatcgaccttggaaagataggaaaaaaggctcaagctcgctatcaaggtcactggaacctgttgggttttgtg

SEQ ID NO: 234540 - DNA, 956 bp, Cannabis indica
aattttattaaatgaattaataattcacttacaaattcatgacgctgagctgccattgattttgtgcattgagttgaggggtactttatatattttctgtttttcttgtgaattgtcaaagatgaaccattcagccttttcacgagtctttcggtcaagaggcataaaatttgcttttgttaagggacgacattgtgattgaaagatggtaagaattttaggaatcacatcatcttcattgcgaccaagtcggttaaatctggtttctacccctttaaaatacatagaacaaaacgtcaatgtctcatctacaacatagctttcagctatcgaccctttaggacgagctttatttccaacatagttcttcaattttttcatgtacgtctcaaaagggtacatccacctcataaacataggtccacccaaaatcgcttattcaggcaaatgtaagaccaaatgaattacgatatcaaaaaaagctagagaaaaaaatcaactccaacttacacaatatcaaaacaaggtctttttgtgcttcctttatatctttaatgtttatagttcttgaacatacttgtctgaaaaagttacacaattcagaaatagttgttgatatatcttttgggagaaatttacggactccaactggcaataatatttgtattattacatgacaatcgtgagacttcaatccaagaatatttgttaaaccattgttcacttttttcttcaaatttgagcaaaatctattaagaaactccacgtctttgataaattgacaaaatttgaatttttcatcaggtttgagaacataaggggcatgcggcttcattaacttaccattattcccaatttcttcaaatcatgtctcgcattagttgtgtcctttgatttatcgttgtccaggattgtgccgaagagactgtcactcatattcttctcaatatgcataa

SEQ ID NO: 234541 - DNA, 1176 bp, Cannabis indica
tttctatttcttgaaatttaattgaataataaacatatatgtaagttgaaaattaatttctaattaattttagaccaacttaaattagaatatttgcttagatattaaattagaattaataattaagttgaaatttttgtagacacataattatttctattttaatggatttaattaaattaaaaaaattatatttaagttggaaatttttcaatttcagaccaacaaatcaagtaattttcattaatgatttgattaaaattaatagattaaaatatgttatatttaattagaaaataataattagtttatgaattataaaaatagacattttctaagtaaactttttagtatttttctagatatatttaattaaataagaaaattaatatttaagttgatttgttcaagacacttaaatatttgttatttttcttaagggatttaattaaataggaaaattatatttatgtcaaaaatgaatttatttaattttaggtcaacataaattaaaataacttttccagttttattttattttattttaatgagttcttgaaaatgtatttttataatacattggatttagaattcatatatatatatatatatatttgtagaaaattaaatttgagttgaaaattaattatttaattaattttggaccaacttaaattaaataattttcataatattgattggaaaattaaatactaaagatagaaatgtttgtttttattttttagtatcttcctagggtataattttatctaatattaaattaaaatttatatttacacttatctaaattagtaattttaaataaataaatatatattaaaatatatagattaaaataaatatcaaaagaaaatacaactctttaaataatgagctttagttataagtacattcgatctccattgtttttcctacatggttaacgattttcaatataacctcatgacgctagacttcattccccttatggatggttattcataaaatcatttaacaccgtaacgatctcttatgatgagtattttgtaagttttcgtctctattagactctcccctacggtgactacttagagataaatttacaaagtatgaaacaatggtggaagtgttggattaaagttttactaggatttagatttactaccatgtacgttg

SEQ ID NO: 234542 - DNA, 745 bp, Cannabis indica
cactatgatttgaccccttatggctaccatgggcacatgtggatcgtacagagaagccctacgcaaagtgtattttaaacttgccatcagtacgaggagagcaaaagacctacacagttgccatctccccaattcagcaccgatcactacctgtatggaagaaataaagggagatgagcagcctcacaaagctacaaatatattcaagtcaacaacactcaacgacatctttcaagaaaaacgtagggtataaggtcgaccaacgaccaagtatcgtcttaggtacaattaccaagacacacagtaagtcttaagttgcacaattaactataatggactcattatctagccttatacagagtttccaatagaaaccacgcataaggccacagttatatatgcctccaaggccgctataagaccctaactacagtccaaagagggagaaaattggctgccagcttagagccttggccttggccaactagggttccaggtcctagaggccggccagaccccaagacccagcttagcggctggccaagaaccctagttctaggcataggccagccaacctagggacacagtccccacgagctgccagaccccatgaaagccacccatggccggccaagtttcaaacaaagcctccttgttcatggatcaacatgtgcatggatcaaaatgcgtgattttcctagaactcaaacatattattcgtcttcttcatgactcaaagagccaa

SEQ ID NO: 234543 - DNA, 853 bp, Cannabis indica
ctgagaaaagttatttttgccagcgcttttcgttttatgctggcaaatgttctaataccaacattgatttgccaacctccttttgccaacacatcacaagtaaattctattttattaccagcgcaatactaacttttgccagcacaaaaatgtgctggcaaaagtgacatgtgttgtagtgatttttacggaaatccacatgccaaatgttaaatcttacttttgctgttttgaataacaaggatatggggccttatatagagttagttgctgactagcacactaacgactcaacaactaacacataactttagcaaatcagtaattgcactagcaaagaatccaatctttcacgaaagaagcaaatacattgacacccgctatcattacataagagaatgcattgaaagaaaaaaaaagtaagagtgaaatatgtcaaatctcaagatgaaacagtcgataattttacgaagccactcaagagagaaatattcatcaaattatgaagtatatatggagtaacaaatcaagtttaagggggtgttcaaatattaaacttaatttaatatagttaatttctagaatttttttgttactactaagtttctagactattattatatttacttaagtgtctagagtcttcttgtttgtttaagtacttttgaacattttagaattatttttcacttgtgttagtagaagaaattatgtaaaacaatgtagaaactggctatttaataatatttctagattagtccataaaatcttataaatagagatgcaatctcatcattttgcaccaagtcaaaaatcactgtacaattgagatataatataatatatagcttct

SEQ ID NO: 234544 - DNA, 1258 bp, Cannabis indica
acaacaaagcctgcaaaatctcatgaataggaaatgtgtttatcagaatgcatgatggtcaagtcagactcattcaagaagttaggtatgtccctgaactcaagagaaatctactttcaattagtgaacttacatctagaggctgcactataaagatagatagttcaatgaaagtaatgaggggcactaggatagtaatgaagggagatatcaaaaatggtatttactatgtgcaaggtgaaactattgttagaaaaacaaatttggttgttaagagcagtgatcgggacaatacaagattgtggcacatgaggctagtcatgtcagtgagtgaggtctctatgaattggagaaacagggtattctcaaatgtaagcttggaaagaaactggggttctgtgaagagtgtgtgtatggtaagtgcagcagagtgaaattcactccgggtttgcacacaattaagggaaaactggattatgtgcactcagatctctggggtgcttcaaggactaagaccattggggtgcaagctattttatgagcataattgatgagtataccagaaaggtttgggtgtttctactcaaaacaaaagatgaagctttcaaaacctttgtcacttggaaaagactgatagaaaaccaaactggtaggaggattaagaagctaagaacagataatagtttagagttttatttagatcaattcactaagttttgcctagacaatggcatagtaagacacaagacagtgattaagactccacaacagaatgggattgtaaaaaggatgaatagaactttgcttgaaaggatgagatgtatgctaaggggtactggcatggacaagaagttttagggagaagctttgtagactgcaagctatctcattaacagatctccctcaacagcttctcagatttaagactcctcaagaattttggataggagaagtgccaagctatgacctttttaaagtttttggatgtacatcctatggtcttattagacaagataaactagaacctagagctatcaaatgtttatttttgggatatcttgatggtgttaaggggtataaactttggtgcttagaagatggatacaagaaatgtattattagaagggatgcagtgttcaaagaacatgaaatggcaatgaaaactaccaatactctagtagtcgggggaaacaaagtgttgagatacaagctcacaaggaagaagtagaaattgcagatgaggtggatacaccaacag

SEQ ID NO: 234545 - DNA, 1388 bp, Cannabis indica
acctatacctagacaaagcatttggttaaaaacaaaacaaacacaattgcacgatgattataaacaaggaacaaaaatcattgaataactaaagtagtcaagtccgggattaaaggctggccgatcagccagttcttcaaaaaatgaaaaacatattccaagtttaaagaccgcttagtcggtcattttttcttaaaaaaatgcctattggccgaatagataaaaaagatgataaaaagaaggcactaaaacagcaggagttctaggctccttgtaagggtcagctggatttgaaagggccgaaggatcatcattctgggcaacaagagcctcaatattatgatcggtaggtgatgtggaagtggttgcctcgggcttcctgtaggctgcctgagcagtgcagtagttgagaaacatgtctttggaagtgcccagataatcaaagtttgccttgggattggccttccaaaagtcataaaatatctcgagatttactgtctctaaggcatttaccttctcctcgagcctcaccacctcggatttctgcttctcaacctcggccccaagctcctcctccttagctttcttctcttcctccaacatgtgaagaagagtccagagaccctgtcttttgtctttgtgataggtcacttctcgagataaagaagcaatatcagcctcaagttgttcgattgaaggtgtatcctacagctccttggtcagctcggaaattttgatctcagctactaggagtttcttattgacttctcccaactctatatgcacagctccaagtttaacccgggcatccacgacatcctttttggccaagtccacttctattcacattgtgtttgaaatggcaaggttcttagtagcacccgacatagctcgggaataggcataagccatcttcagaccaatctgtgcggaaagaagacattacaatccaaactagttaaggagaagtgaaagggaaatgttagaaaagacttacccatcaaatctctttcaaaactcctcccatgaccagctccaaagacacgttgttgtccgcccgagccaactgctcgttcacctcaaggactgatcgactcacatagtgggtgagcatatctctgcctcttttagtctcccgatgcaatactagaggtggggcaggggccttaacctgttcagacccgcttctgatcagtttggatccaccttttgcctgctcggatccatccgaacttcctcctcgggaattcttggacttagtaaattttaaggcaggagggtccacaacagtttgttcttcagaaaggtcaatgaccacttcagctggtgccttctctttggacggggtctcactgttgggttttatgccctaaataaaactctgtttc

SEQ ID NO: 234546 - DNA, 1076 bp, Cannabis indica
taacaccattaaaaaactaattgacgatcatggtgttgagcatacttcacaagcagctattgccaatgttgtacagacctatttttgtggcatatacactaatgatggtgtagataatgaagctatgcaatttgtcctctccaaagtcccatgttccatcatagctgctgataacagagacattactcgcccttttactgctgctgatgtctatgaggctttaaaatcgatgaattcagatggtagtcttggacttaatggcatgttgatcatgttttactctaattattggaacattgttggtgatactagttcagtactaaaagtgctaaacgatggtggtgatccttcaagcttcaaccagactttaattacactcagaccaaaagtcaaaaaaccaaataatatgtcacagctgcgacctataagcctttgtaatgtcctttataaacttgtgtccaaatcaattgtgttacgattaaaactgtatcttccacaagtcattttagaatcacaaagtgcatttatatcctcaaggttcataactgataatgtattggtagcctttgagttacttcattcgctgaaacatttgaaaagaggaaaagaaggatattcagccattaagttggacaggagtaaagcattcgacagagtagagtggcatttcatccatggaatgctattggctatgggttttgatcattcaattgtggagcttatctatgcatatccagtgtttcctactcttttctcatcaatggttcaactctaggagaattgtttccaacttgtggcatacgtcaaggtgaccctttattccaatatttgttcataatatgtgttaaaggactctcaagaccgtttcaatttgaagaaaggaatggcaatctctctagtttgcgtgttgcgggtggtgcaccagcaatttcacacttgttttttgcagacgacaacctagttctttgcaaagctaataaacgatctgcagaagctattcgaagatcactaacaacattctgtcgtgccttaggacagaagcttaatgcagcaaaatcatgttgggttttgtgccc

SEQ ID NO: 234547 - DNA, 657 bp, Cannabis indica
gttctatttatagaacatagcaagcctagaggcatccacaaaatcaattacatagttgtacaaacttttttaaaaaaaaatcctaatttgcagcagcataatcgagtttttacaggaaccaaattaaaccaaaaaggaaacttgtcaaatatgtgtctgatcataaacatggacttcatacctactaaaaacagtgtgcttgatctgatattatcaagacacaatcgaaaacattaaagagaaagagcaaggtcaaagttttcaaacaaaactaactttttataagagaatttcttctctttaaagaagtttccaaaacaagaaaatgaacagctgaaaaggaaactttccttgaaagaaaagagcaataaagacacaaaatcaaagtgaacaaatcggtttaattgcacaaggaaatcacatgataaatataaatattttgacacctaaattgccaaaaaaaactttacacaaatcaagatcgtagttagtattggattcaaattatgagggtgagtgataaactaaaatcttctttcaccaaaaactagctggaatctatagattattaatccaaaaaacctgcagcagcttgtttagtaacacatgggaccagatgggggatgctaagcaagtttggactcgatacaacattcc

SEQ ID NO: 234548 - DNA, 859 bp, Cannabis indica
gatcattggactggtttaaaatggcttttaaggtatctaaaacaacctcaaactatggtttgaagtttgaaaagactaagttagaaggatttgttgatgctgattatgcatcaaacaaggacactagaaagtcgattactagctactgtttccagttgaattcatgctgtataaactggaaatctcagctacaacctgttgttgctttgtcaactacagaagccgagtttatggcaataacagaggccttcaaggaagcaacatggatcaagggtattctacaagaaatcaacatgctgaaaggaaaagtttttgtattttcaaacagtcaatctgccattcacttaagcaagaacccagtctaccatgagagatccaaacatatcgacattagaatgttttggatcagggacaaaatagaagttggagaaatcgaattgcagaaagtccccaccgatgagaatcctgctgaggcaggaactaaggtgctgccagtgagcaagttcaagtatttcattagttttctatgaattaaggtggagattgtggtgtaattcatagaaaaccaatattgtttcaacttgcaagaagtggcagttaagttggttagccttgttgtttttggttagaggctcggttttgtgagcagttatctaacctatataaacaccatttttgtaatcaatgaaaagtgacagaaaagaaagaaactaatagagaaggtgagaattagagagaattgtattgtgagagagagagagagagatagagagagagagagagagagtgagagagagagagaagagacgagaatgagaaagagagggtatgggaaggagaagatcgaaagagagaaaga

SEQ ID NO: 234549 - DNA, 1518 bp, Cannabis indica
cccctcttccattttttcatctcggctttacacttatttaacctttcctgaaagttgccagaataatccttcccccaaataagcaaagcctcactacaaaactttattttttccaatacatgactatccaaattgctactccaaacatcctcaacaatcttaaagcaaagaggctctttaagccaagagttctcaaatcgaaaaactctaactttaacagccccagctgaatgagaaagaaccaaattaagaggacaatggtcagacgttgtaacctcaagattccacagtttccctgaaggaaataagtcaagccacgtttggctcacaagagctctatcaattcgcacttctacccactccgaactacctctcccacgttcccaagtaaagggataaccaaataaatccatgtcaaataactcacactcatttaaagtgtcgcaaaatccgtcaattaaccagtttggataaggattacctccacgtttgtctgattgcgaagtgacattattaaggtcaccaactatacaccacggcaggttagacttggccttcaacattcgaataagatcccatgtgcgcttacgaagacttctattaggttctccatagagccccgtcaacctccaccttctaccggagtcatcagtaatcgcaacatcaacataattatgcccataacccaacagttggacctcttcctcattcctccaaagtaacgcaactcccccactttttccttgaacatcaaccgaaaaagctccatcaaaaccaacagcaactcttaacttctcaacaacaactttccttgataatgtttcacataagaaaacaaagttgggcttcttttggatcacaagatcctttgtgaattgaaaagcccatgggttcccaagcccatggcaattccaagctattatactcataatgattggtgggcttggaaaccaaggcccacctttagcacatttttggaccccattggaaactcctcaaccgaatccacctcagcatcctccacatcacacgtagccttcccctctgctatttccattctttttttttactgtcaatcacacacacggcatcatgttgtagttgacttgccatatttgtttcacccataatcatatccccacttacagctattatttccttatacaccatcccagcatttacattctgaatattctttcctaaagatccgattgagtccatcatgccttgttttgctcgattaatctccacaattttaggcatattcaatgcaccaccgtcagccttggcaaagcttggaccaccgccgtccatggctttctcttcctctcttccagtacggagccattgagccccaataagataattctttttcttcataacagccctcatcccgattccatatggcttgacaatttcatcaatcggcttctcaaatcgtttcaggcaagcacgctcggaatgaccaataacaccacagataaaacagaaagttgggaggtgttcatatttgaaatt

SEQ ID NO: 234550 - DNA, 1768 bp, Cannabis indica
aagtaatttgaccaaaactaattatgaaccgacacaaggaggcctaatcacttgaattgattatattaatggacactgtagtgaaattcagtaaaaataattctataattactaagagttcatgtttagtggtctaatcatgaaattaataaacaggattatttggttgatggggttcaacaaataatctagtttattagagcttagaatataggtccatagtctctggattgccacctttgaaatactgtcaaggggagggataaaaattatatatggaagttcgaaaaaatctcttttaatttgtcaaaatagttattatttattttatataataaataatttattttttagaattaattaattaaataaattaggaaaagacaaaagttatcacgacaaaatacacaaaccttatcttaactaagacaaagggaggcgccacctacattgtgtccaatcacagtgtaggcaccactattgtagggtgtcctctactagatttgttttagatttaattaattaattcaaaagattaatatttatttaaatttgaatttgaaaagtagttcagatattctcttaatggttgaaagatttcctcaatcggctatagaaaataaatctctataataaaattcaattatattatttattcaaataattaaatataatttaataaatgatttgaatttaaataattaatcaaacaaaatatttattgagtttatttaaatatacttcataagccaaaaaaattacgtaatttttatgaaagcctaaaaagaattaatctgattaatctattctgtccatcaataccatagaattgtatgtgttgagaaaaataagaactatacactactatagcacacactagtctttgtgtgtggtggaagatctggaagatcaaggtgtgagtttgacgtcaccgtaatctactcgagcgagtgagtatctacttgtatatttatctgagtttatcccaagacaaacatatgtctcgtcaataccagtttaatagttattattcttgtctcgtataagactatacagtcaacgagtttgaacattttttattaaactgatattaaattataatgagttatttaattgcatttaatgatacaacattattattatattttttgagttgattcacattctttttgtaggacatgtgtcagcttctacaaatagccaaactttgggtataacaccaggttttaagaccgaccttaagaagcttcaaatgagaaataaggcaaaacatatgcgagccatcaaccttctctttccaatgagtcttcacaatatccaaaaaccttccaattgcttccagaaattaaagtatttcaaaagatttttgatatacggaaaacttggactaattaaggcttaaacctgaaaatacattaattgtaaactctatagctaagagcttaataataatgacttataaattaaagcaagttaatgtcccgagcacataaaactgtcttatttttttttaatcttattttctttagcttaaatatttattacaaatgatttctaaaagattcagcaaacaaccataaaaatgagtatccctatgttatatttgttgaacataaatctagtgatattttagtaacatggtactcactaaataaaataaaaaaaaaacttttatagtaacaattttttaattaatagtcataaattttgtcattaatacaagttctctttaatttagttttagctacaataaatattatgattaaaa

SEQ ID NO: 234551 - DNA, 1090 bp, Cannabis indica
atccttatatacgtatgtatatctcaataatctgtaatgcccattactactatactaaggtatacatatatgctaataaggtttaattactcactaattataaatataaaattgtctgctgacaaaaaaaaaaaggtgtacgagtacgaaatgtgttattatcctctctattttgatatgtagtaattcttttattgtggaaatctatatatacgtatagtcggacggcaattaagataagctttagctaaataatcaaaatgcagcacctattagctagacatataaatttgttattactaattattaatactctttttttctttttcttttttgctgaatatatactctcattgtaattgatgaatggcctatatgttaagaggaattcaaatatgggctattaaagtcctaaaacctgaatcagccagattaggatgccaccttgtatttgcaatatatattggtagtcgtagaataactataggacttaattaattacttattatcatatagtatatatacatatgaaatggaagattaccaacacataaattatgattttttaaaagaagaagaaaaaaggtatagtacgtacagtagttcccattagcctttgccctttaatgatcatatatatatatataatcatgatcattagtattattaatgttattttcctgtaattatttccatattgactcgaatttggttgctacacttatagtgcggaacagaaatctttgttgtgtatataaacaagttttacacgttgttgtgaggtgttcggaatgtatattagggtcgacattagctacttattattcttttttgtgtactaaaaattgacaaatcgtgcacattattaatttggtgtgatcatatcactttgaaataaaatattattaactaccacatccacaatattacgtcaataaatgatgcaaatgaatttcttttactatttgaaaagaaaaggtcaaagttgtgagcagcgttgttacacgctatacaaaaatttctcttacacctaattactctatatgattgagttttaagatgtgaattattgcatatttttggatttttt

SEQ ID NO: 234552 - DNA, 1354 bp, Cannabis indica
cgacttataaaattttatgtgtaaatctatgaatggttataattggttttatatggttaaagtcttatataaatagttttcaagtttgggttttacaacatgatgcaaaaagaaagaagcatatgtaaagaaatcaaatgtaaaaaataaagagattaattaaggaaaaaccacttactagtttgacgaaaaaatttgggtctcgaagaactttctaattaaaactcctggtttgagaggcctggaccttggtgattctgaggttgagaaatgcaatcggttgaaatttgaataaaataagtaaaagacagtgagggcatgcaattttagaaaagaaagtggctgatattttttcaagttctaagggcttcgtgggtgagaatgacgaaagtgaagggattttgaaacttatacccaaaaggtgacaaccgttcgatcacggtgatgataaatcgaacaaatgggaactattggaaagagaaatgtcagagtattaaatgctaaaatgatttaccttgatgttttgaactaccaaataaaagtatgcaatttttaaatggaaaaagtacgatcgtaccctcaaggtaattaaaaaatcctttatattttaaaaagcaatttttatggagaaattgttatactcatattttgagcaacaatatggtgctaacacgtgtaacatagctggaatacgaaccaacaaaaattatgcattaataaatgcattcagatgactcgcctcgggaagtacaattgatagaaatactcaaactcaccaccctgtagacaatggtgagacacgagtactaactatcgattgatgagaccgacgagacgagtaaagaaagtccatctcgggttaaatagaatacattacataattgtttggaaagggtagataatgattttgcagctcattgacccacatacacttgagtatgtttaaagaaagacaaaaactttcaacatgattcatctcgcttttgtcatactgtaccaagcatctcgcatatacctcactcaacattaatagaagaacgtgaggaatactacaacatatacttagatgttggttcacgatgaagtgcttagaaaagtattgattgaattgtgagaagtatgaagtgtagtcaacataactgtctatagataaagacaaagagcaattacaacaattatttataattatcccatgtgatgtaaatatgaagtgtggggaatgtctacgtttcatgaacagttacaaatgataagattccaagagaataactatcatcctagactcctataaatagagacaaaattcagggaacataggacgactatttttagggaaaagagagagaattatatc

SEQ ID NO: 234553 - DNA, 2031 bp, Cannabis indica
aatttttgatcatcgggtctagatagaaatatatagtatcagttgctttcaaatgttcttttaataaattcaaaacagagtctgtactgacaaaactggaagaaaattacagttttataaacctttggtacttatgccgctaaaaataaacattggttttgtgccgcttacaaacataaaactttgggtacttataccgctatttacccattatttaactccttaagtagattaactattacaccaaaagtaatattatatgcttattatatcttttattacaaatatatataacaatctaaaatgtatatatatttttttacaactgtccctcctcgcttatatgtgaggtccgccccctcaccatcatcttttaatgttgcctgctcttttataagttgtgtaaggctttaattattagaagcaaagtttcttcttttcatgcatagctaattaatatcatataattacaataagtccaattatatatatatttatataagtcagtagaataaaatataaactgaaaaacaaatctttttgcttgataccttataattaagttattacgataagctggagactataataattttggtaaagctaataatttctagttgtcgtggatttcgatcggtacatatatatggatcattaattactatttgtttttatgtatatatataattacttataataacatgaattgataataaccactagctcattcacaaaggtatatatagtttatgaattgacgaagacgttagagattaccatatatgtaaatggaacaaactaatcatgcatgtacatttgtaaaataaataaactggtttccgcgttttcaaaagctttcagtacaaaaaatagtgttctgttgtggtaccacacgtctactagagaacgtgatcctcatatatatgtgttaattgttcactcaatgatcagtagtagtcttataatatattatatataaatacatgatcatatctctagtaggatcatgaccaacaagctctcattaaaatcaacatgtagcagtagtacgtacgtaccaggcgcactcgcatagatttttctttttcttttgtagaatgacatatatatatatatatacatataatattctcacaataataacccaaaaacaaagtagtgacacgtttcgaccagtaaacgtaaaagataatgtggtttgttcaaaactagctaggggatagtgatgagggtgtggtgggaaatagagcactagacatgttaggcattagaaaacgccaagaggaatatatagattttgagaaatgaatattactttttgagtactctaatattatatgctcttttcttctttccaggctatacgatatatgttcttatattaattcattcattggagatagtgagataccaatcactcaggacatgatagctggtgaagctacaattaatgttacattgtatatataactatatatatagagatatatagtattatcactattaaggccggtgaagaaataattaacacacctatagaccaatccttgttttataaattattttttgttatgattataattatattattattagccacgactaaccatatatctcttatttttctgttgcctgttctttttccttacaaattttctctctactaagtaatttgcatgatataaatataaatacccggcccgttaaagagcgtacgtactactatttgcatggacctatattagtggtcgttatattcatatatatatttgattatatacgtaaattttccatgctgattcgaaaactatatatgtatactttaattagtggatgaaacgaggagaatattgtgaagacgtgagtggagttttattatataaatatatatatatatatatgtatatttgggaggaagtgtgaaatagactatatttatgaaaacactatacttacacatattaaacatacctttatgataattcattttttctggtatctttttaacaagtcgtctaatttattaataga

SEQ ID NO: 234554 - DNA, 811 bp, Cannabis indica
cactaagcttttctatgaatagtggtgttttaactaattagttaacaaattaataaaacagaggaatgtgattttttttgtttttggtcttagcatttacttgactaattttcatttggtgagaacgacatgttctgtatttgtcatttattttatacagtataagaagaaattaattatcaatagatatagaaattataagccacaaatataatgcatgtaccattaattcaacaatctcatacattaaagtgattatgataagatagaatttgagggacccattattgtttttgctgtaaatttcagtttcatgtggattattattgttgtggtaatagtatttcattgtcatttgtcctttgatatattggtttctttgtatttatccactattctataagatgaggaggttttaaaagtaaaatcgtagcttattgtatgataatctgaaatgaattgatgggagatattagtaattaattttatattgatccatggtttgaacaaaggatatgttatgaccaacaagaagtagcttaaaggcctaagtctatttgtgttatttcatagtttatttattaacaccatatgataaaagaataaatgagcttctgaaagttggatagaacaaacgtgcacttaaagtaccaaagaagaatctcggaacctataagagggagaggtagggtgaagagatgtcaaatgactttgattagtagaataatattgaggatttttcaacttgtgtttcttaaattaagtagattttagccttataatattgaatttattttgggaaatttacatg

SEQ ID NO: 234555 - DNA, 1286 bp, Cannabis indica
gccgccccctctctactcttggaatgcctttgaatgctttgatattcatgctatagtttcacacgaaatcaagagagaaaagagaaagaaatttcgagttccttgtgagagagaagtgcccacacacagcatactgtacctcaatcatagtttggaagactgtgaaggatcacatccaactgaaggacattcaggctcagatcttgattatactctgctacagacaggaatcaagggttagagatctgagtggaaggagacacttaattccaacatgtaccatatgcagtaaagtaccaactctatacttgtgtcggtagggtcttcactatactcccaagagttactaagttttgtaccacatgcacgacgtacctcccctcgtactcgtgttggtaacattgtaactattctaatatcttatactatactaacactcttaaatcacatttccattagcgttagtagtgtaaacaattaacagaagcatacaattatctctacatattatttatgctatcttatctcgttcaaaattcaagcatgcctgtcgacttgaatggaaaatccttgagcttaaacgtaggtcctaagtcacataatacaattaagtaaattatttaaacaactaaaccaaagccctaactcaaaacctagggtaatcttaatgatactttcaccccaaatactaaggaaaacaaaaccatgctcggaaaataacatagattcgaagaagtcaaaattttggggtcgtggcatggaaaccggctaaccgattttgcataccttgtaaaaccgatggaccggtttgcacaagcaaaccccaaaaattgcacaactcgtccaaatctttcccaaacgcaaccatacctcccagaacacctgaaaatacattctaaaacaaatcccacgcaacagtagcaagaaaaacacagcaaaactcaatatgccatggttgagtcaagtttgagctccatgaactcaaacttgaccaaacccacaaattaccatcataaaaaaactccagcaatctgaaaacttcatctaagacctactgaaactaaccctaaccgaaaattatcaatacataatcaagttcaccaaaatcatttttaacctaacaaaaccttgaaaagaacatcataaactcacaatagaacaagcttaccgttatacctcagattaaatcttcaaaactacacctaatagctttgaaattggacaaaaactcaaccccaggttggtggttcctgctggccgaacaaggaagaggaggaagaagagtg

SEQ ID NO: 234556 - DNA, 1731 bp, Cannabis indica
tagaaatccccaaaacccccgtgaatgtggtagaggccacggtcgtgctcctagaggtcgccaagagaatccaccctaggctccttttgattgggagcagaggtttgctgagatgcatgcctgaatcactcaacaagaggaagagattcgaaggcttagacaacgggatactcctgttgagcctccctcgtaaccacctactgttgtggttcctgcagtgccaacagaacaacctattgatggtaaccgtatagagcctttgtacgagaggttcaggaagcaagcacctccaatattcttgggaggtgctgatgttctaaaagcagagcagtgcttgactgtgatcgagaggatactaatttcatgggagtcaccggaaatgacagggtggcatgtgccacgtttcagttccaggaagaagccctggtgtggtgggagatggtgtccctcacaaaggatgtcaccagaatgacctgggaagaattccgggacttatttaatgctaaatattataatgaggcggtccacagtgcagagcagaaagagtttgttgaactggtactagggatgcaaacggggtagggaattggcggggatgaaaacggggcagggaattggcggggaattctttccccgtccccatccccgttaaggattttaatccctatcccctcttattccacattggggatggggcgaggaatcccctaatgggggcggggatggggcgggaaatcccctaatagaaaaataaagtttataataaaaattttaatatacaaaaatattaaactacataaaatttaaaatattacacattaattattattcaataaactaattattatccaaaacacaacttaaaattcataaaaaatatactaatatactaaaaaaatgcaaacataaattataaattataaaatattactagaaatataagataaaatactaaacgggtccccgtcagtgcggggagtgtgatccccgtccccgccccgtttaacattcggagacaaaaagtaatccccgtccccgctctgttccctatttaggcggggaatccccgccctacttaggggcgggtccccgtggggaaaatgtgcaaccctaactggtacagggtgagaatatgtcaatgaccgagtatacgaccaaggttgattgcttggccaagttaggctcagggattgtgtcgacaagacttttgtaaaaagaaaaagtacttggcggggttgaatgccaagatcaagcacgatctagttattactaccaacgacaccacaacctatgctgaaatggttgataaggctcttcgagctgagggagcagtaaagtttctgtatgaaacacgagaggctcctagtgctgctggaaccactactctccctatctctagtcctagcaaggagagtggtgattccactattgaacagaagatgagaactttcccacctacagggagttcaaggcaaagcgtgaagtttcgcgaaaatcagggaaaagggggacgttagacctactcccagcctgagtgtccgcgcttcaaaaaacatcaccctgggacatgtaacgagagggcttgttttcagtgtggatcagggggaacctcaagaaagattgtccccaactgaagaaagaggaacctaagccagaagctaaacctgcaccagcacgtgtgtttgctatcactcaggcgaatgctgcccccagtccttcagtagttacagg

SEQ ID NO: 234557 - DNA, 1892 bp, Cannabis indica
aaaaaaaaaagttaaaagaaaatagtatatacggtaattcccctaaaattaaataattattttttttatataaatcttaatttaaatttgaattaatttttttttctattttttaaatattgtcattcaaatttaaatctacttacatatatttaaaagtatatttttattattattttttaaatttaattcatttattaagatataatttaaataaatatttaaaagtatcaataaaattagattattatttttatttaaatcttaatttaaatttgaattggacgttaattcaattaattaattataaattatatctaaatttatttatttattttaatgtttaataaaattagttagtatatttttttataaataaattaaaaactatattttacatatatatttaaaaaatataagaattgtattagatttattttttttatttattatttcaattaataattagattaacaattttaatataatctatataaatatataaatatataaatataatctattttttttattattatttcaattaacaattttatcatttctctaactgggaggaatggataagttggtttaaacacaatgaccataggccaaaagaagtcagcttccaggcttttcatgaaggagctgcaataatctttgagaagatatggagggagagaaacaagattgttgataatggacatggcacccggccccataacgatccttactcagctgatcaacaaccgcctgcaggaagccttcgatgcctatagtttggattcttccacaatgccacaatggctgcgcgggttggagcatctacaatactgatgtggctattcacacgactggtgcatcagttttcagaaacgaaaaaggggagatcatcactagcattcacacgacccaaattaaaggggagctggctgcatgccctatgttgtagagctgagaatgctatcagtctcgaccataataatgtaattcttcggtgtgattctgctggggcaatcgctgtagttttgaaggacaacaaagccattaaggacttaaattacaatatccaagacatagtctccaagttccacggcttagccgctaactttgacctctgggaggtcagctggattcccaggatccacaatggtgtggcccatgatgtggctcaaaggactcttcaatctcatctgttcgggagttttgatgcgtctaattgtttaagtttcccaaccaagtcggagggtggatgccggctgattgtttgctctactgtttttttcttgtttggttactgcactttcttttccggcagtttgttgcttgctgcctgtttttgtagctaagttttgttgaagttttcttagtttctctgtttgcagccccagttcttgttcttgctttgcggctgttttaaggcctttaatcaaatatgtaataataagattattattctatatgtaattgagtcttattttttttatataataattagtatagtgaataatagataatgtgtaatattttaatttttatgtaattaaattaatatttttatgtattttaatttataatatgtgtttatatttttctagtatattagtattatttttataatattttaagttatgttttgtataataattagtatattaaaaaataaataatgtataatattttagtttttatgtaattattattttgatacatttaaatttttaaaaattatttttttaacattataggagattctccgtcctgtccccgccccacattagaaaattccccgccttgtcctatggagaataagtggggatggggacgaaagaagcactcccactaattttctgctccatgtgcatccttatatattacattaatattatttt

SEQ ID NO: 234558 - DNA, 3762 bp, Cannabis indica
agcttatagcgtttcggcgtatgatctctcctcccttgcccagtgaacattcctcactatttatagggcaggaaacttgaggaggaagagtttcctctctcattacaaagcgcataaacacaaagatcgtgggatcattgctgaatgctaggatcgtgggattgaggccgtatacaccgatagtggaatcgtgtgtatgccatatccacgcaagttgatccctgagttatagggattgagttggtgactcacgaagtgcttggctgaattcgctaagtgttgctcattctgcacggctcgttgattattccatcatggacatgccagcgaggcatcctgctcggcatgttgatccgaccaggttgtctaagttgatgccacgtgtcaccattcttgtgatgccacgttagagtgccaattttgggataacaacagtgaaagatttgttttagttcttttgttttaaactactctttttagttttttgatctttttattttattttatttttttactgttattaggttaatttctattagtatttttatggagttagaatttttagtttcatgtgttgaaactaattaggttttcccattagccttgtcttttgacatggttctttagttttttctggtctgattttttgttggttcttgttttctttgtttctcttgggattctgctggtggtggtacgattatggacgacggtatagggggtacatattcctattgaggaggaggaggtgaatatcttgtcttatgatgccagtgctacaaattgtaatgactacgatgacaggtggtgtatcgttggaaggttcttgattgaaagacaaattaattttgaggctatgcaacatatgatggcttcattgtggcagacggggaatgtttgtcaaggaattggatactaatcgctatctctttcaattttatcatgagattgacatccaaagtatgatgaatcgaagcccctggacttttaataggttcttgttaatttttaaaaggttgcagcggggggaagatccaagattggttaccttggatgaagttgatatgtgggtgcaattgcatcatcttagatcggggtttaagactgctattgttgtgaaggatgtcgcaaactatattgggaaatttacgcaatcggatgaaaggaatttcatgggtttatggcaggattatcttcgtgttcgtgtgactttgaatgttacaaagccattaaagagacgtatgaagcttcgcaatactgttgggatcgaaaactagactaactttaagtatgaacatctccccactttctgctttaattgtggaattatggggcattctgaaagcttttgtccacagcgttttgaggttggagagggtcagataatcaagccttacggggaatggatgcgagtgagacctacatgtagaaaccacatgatcagagctaaatggcttaagcagcttaatgctgccatggacgatgattctgtagcaaaaaccacggctcatggtgaggtctctcggtcgacgatggcaatggttgaggggaatcgtggtgtgctgcgattgactccgatgatagtggaggaaactttgggtcaacgtgaggcaggggtaggatcatcaaaggttgttaatggggatcctataattatggaagatattttaccagctgctatgcataaggaattatctaatgatatcaatgaggaggcttgtcttttggttcttgacacaaagaggagaagaacgactttggaagatattgatggggcccatgtgaggggtgatgtggcaacgggtcaagaggtaaatggttcaaagaacttgagtttggtgggtactggtgtccaggcccaccagtcattatgaatattttatcttggaattgccatgggcttgggaacccatggactttacaatgccttaaggatcttgtgatccaaaagaagcccagtattttgtttctctgtgagactctatctaatcgttctcagatggagagagttcgtgtgatgttgggatttgatggcatggtagtcgtagatgtcaatggtaggagtggatgtattgtgctattatggaaaattgaggatgaagtctttgcttgggttttataatgcttatatagatgtgatagttgcttctaaaggggtgcaggaatggcgtttcactagtgtgtatgtggagctgaataggagtaggcatgcttatacttggaatctattacgtactcttgctaatcggtctaatctaccatggtgtgtgatgggtgatctgaacaatgttttatctcatgatgacaaaaggggcggtaataggtaccctgactttttaatccaaggttttcaacagtctttggttgacagtggacttcaagacatggagttatgtgggtatccgtttacatgggagcgtgcgcggggtactaatcattggatagaagtgcgtttggataggggctagctaatcttggttggttgaacatgctcacttctgctaagctccataatcttgaaatttcaacttcagaccatactccgattcttatggtcatggttcctgctgcagggcacaattctgttaagcggttttagtttgaaaatgcgtggttgagggaacctctttgttatcagattgtaaaggatagttgggggatttgtgagtctgatgatgttatgcataaaattcagttttgtggggacaagcaggctgtttgggtaaggaggttactggaaactttaaagaaaggttgaaaaagtgtaagaatgaagtgcagaagtggaaattggatcaggatgagatctctgtagccaattacaaataagcaaagaagcacttagctgaatgttatgtgcaacaggaagttttctggcatcaaagatcgaagcaactgtggttgcaagagggagataataatagcaagtattttcatgcttttgcaactacgagacgaaggaataaatttgttgcaaaacttaaagatcattcgggttcatgggttgactgggataggggtttggatgatcttatggtttcttatttccacgagtttttttcctcttcccaaaccgtctggagagaagtcacaagcagcgtgcaaactcgtgtatcatcccagcagaatgttgagctactgttatcagtttcagatgaaaaagaagttcagaaagctttgttccaaatgcatctgaataagtccttagggcctgatggaatgaccccgtatttttttcagaagtgctggccgatttttaaggatgatgtcatcaatatggttaagtagttttttcataatggttctcttcctacagaccttaacaaaaccattttggtcttaatccctaaaaagaagcagcctattgatatgggggatttaagacccattgcgttatgcaatgtgctagacaagattgtgtacaaagtggttgctaatagacttaagagtgttatgccgtttgtcatatctgatactcaaactgcatttttggaaggccagttgatcttggataacatcatgattgcttacgagattatgcatcacttaaagaggacatgaagagggagggatggttatatggcactcaagctagatgttagcaaagcctattataagcttgagtggggttatcttcgggctatgatggtaaagatgggctttgctggtcgctggattgatttagttatgcaatgtgtaagttctgtttcctataccatttcacatggcgggaaggagttggggcccattgttgctcaaaga

SEQ ID NO: 234559 - DNA, 727 bp, Cannabis indica
ttttttcacactccgggtccatcttgctaacgagggtctggttcctttcaatttccaaaagaacgttaaggaataccgccaccagttcttcttctcgtccgggttttaagccattgagcatccggagttgcttatagagtgggtcaggatactcccgatgcaccgcactgcccccacacaacctttccttcagcacgttaaggtcttctctacgtatgacaaggatgggttgaacgtcggggacttggtcacaactgcacactgcaggagggccaagctgatcacagagaaccagtcagtggatgacttcaatctatccaaggttctttgtcccaacgttcgtagtctagactccgagaaggcgcttcgggcggacatcattgcttccgcgaaagagcggtataagaagtacctcttcaggagggaacaagaactagcttatatcaaggcccaagccgccaccgaagggtccttcggattgaagccgaaaaagaaacaagcgacctcccagcctaagcttccgttcccagttcccaatacaagggcccctgacgccagcacctccggatccggtaagtctccactaactgttcatcacgtcccttctattcaagattactctggctgtaggccagtagatttcaatgggtgtcttcataggtttaggatgcctccttttagttggggcgatcatgccaagggttttattttctaaacctaggtcact

SEQ ID NO: 234560 - DNA, 815 bp, Cannabis indica
tttagtgggtataatttagaatcaatattagtagtttgtggttgaaccttattttaattaggctaattaatatttttgtctagttaaatttttttctcaatgttaatttgttacatatcaaagttcgagggtgtgatttggtagatatctaagtctagggagcatgatttagtaagtaaacaatcactcaattagtaaaattaaataaaagtctttaaatccaataatctcaatagttaatgtggatttttaacagtcaaaaaagttcaggaggcatgatttagtatatgttaaagtttaagggagaaaaatcttgattagccttttaatttagcaacttacttgaaatttgggtttgatactagttagtttcttattaagcatttttaatgactgtagaagaagccattttcctagagatgttttgacttgattatgcttatttagctgacttgattattatgtagttcattttgtttcacttgaatatttatataaattttttaaaagcaaaaatcattatatagtttatttattgcatttaaattcttatgtaaatatttaaacggtaaaaattcttatatagttcatatttagccgcaaaaatcttaaccgttgcatatttgatgcaatattaattcctcagttgttaacaacaaaagtacataaagatataagtacaaaaagataaaccacataagaatttatgctctaataaatttacaacaaatttctcttttttttttgaataataattaaatttcattaaactaaatgcaagtaaactaatcctccaaaaccaaggatgcaaaaac

SEQ ID NO: 234561 - DNA, 1862 bp, Cannabis indica
aagttcaacaaaatcacaactcagtaagcttccattttcgcaaacaactttgagaagaaaacctaaaaatacctggacagaatcaaactcctggttaatctgatgaatttttggatcttctccttcaaagatcggagagcttcagagcagtacttaatctgatccggtgtcagtggcagcttcggcggaggatcgggggagaagttaagcgaagacagagattttgctgctgcggcggcggcggaggaggaggccatggcggaggtcggcgatctccgatgagtgcgggagcgcgtgaaagcaacgttccccagaatgaaggagagaagtgggaatagggaatgtgtttggattggatagtggcgtgtttggtagcgtgtaaagatagcaattggtgaggtgaaataatggtcccctcccctatataagtttttgagtgaactctttcataattggtgtccaaccaaacatgcacataacataataatgaatgaattaaatatgtgttgtcgattaaggttgtcattttaagtcattactaatgagttgtgaattgagtatagagtcaaccacttgagccatatagacatgggcggatctatgtagaggcgagggggataaatgcttctcttgagaaaaaatcgagaaataatttatatgtattttgattagttacaacgtatatttataagtaaaaataataattataaacataatattagttttcacataatgtaaacatataaaggatattgggggtgtgtatattggaggttatcatatcaaattctagctatgtaatttaaagatgcttctataaaacaaaagaattgagtgtaaagtctttaactaaaaagatattattagtgtcaaatattactatgaaatgtcatactattattagtaaatgtgttagattttatatattttaatttaatggtagtgttgaacactattggtatttaatagtaatacttagtgttgatattaagtgcaaggcgccatttttagtattgttattaattttgggttcacaattaagtgcaaggagctatttttagtattgttattaattttgggttcacaattaagtgcaaggagctattttgtagtggtgttggacattgcaatattcttttaacttaaagataaaatatgtaagttcaactaatatattgtttgatagttgataccataagtgtgagagttagagtctctgcaatgcaagtggaaagatttaagagttctgcaattccatatctttgggaaatatttagtgtgatgatttttgagattgtgtaagtataaataaagttgtacatttgagttgaattttttagcacaacacgaaactagtacacgggtgacacgagtacggcacgacacgaaaaaatatgggcttggatccaacacgacataaataaatatgagcacaggcacaacacaataaacacgaaagcacaaaataaaacacgaattgaaattcataaaataattttttatttaataattcatttattctttcgtatactttatttaaatattttaaaactatatattttttaaaaagttagttactttaatatataatacatatttatatttttaacatatcctttgcctagttttaaattatgttagcatattttgatatgttgaacattttttttgttgaaagagattatgtagaatattattgagagctttatgtaaaaatttattaatgaactactattatggtgatattattttggttattaaccatgtaattgtaattatagtttattttcttttgtgattttgaagctcattttaattgatataatttatttatgctttaaaattagaaattaatttaaaaa

SEQ ID NO: 234562 - DNA, 609 bp, Cannabis indica
attttattaattaaaaatgaaaaagacaaatataccctttaaaaatctataaacaaaatttaaacattctgattacttttcctagttatgtaaacaaaatactataattctgattttctttttggataatttagtaaacagcataataaaatattatttccgattattttctattttaaaccgattcatttctctcattaattattctaattaccaattacagttttgtaaacgcgctataagaattttgccaactaaaaaaggtaagtaaagtgtatgaaatacctaaatatggagggatttagcctcaaatttctctctctctcttttttcctttttttttttgttaattttcggattgttcatattaaacaagtttaacatagaaaataattaatttaatgaagagactaaaatggtaaattctgagaatagtttttttactatattccgtgtgaatttattgaatttcgtattatattttctatgtatcatcagtggcgatttttcccaacaatcgagttttatgtgctgtattgattgtggagctatccctatttttcataccatattctagagttggtacttatggcttgattggggttccca

SEQ ID NO: 234563 - DNA, 955 bp, Cannabis indica
ctaaagacaacagttagttaatatccccactcaaacgaaaaggggtagcagccatattgagtttgcctctaagatataaaaatctgtctgtcgagagtggtttagtaagggaatcagcaacttgatcgattgctggaacatatctgacaacaagttctttggccagtatttgatctctaatgaagtggagatcgatttcgatgtgcttgcttcgagcatggaagacgggattggctgcaagagcagctgctcctttgttatcaacccaaataactggagtagttgctggtttaatgtgaagttcagacagtaaattgagcagccatttgatttctgcagatgtgttggcgaggcttctaaattcactttcagtactcgatcgtgccacaacattctgcttctttgcagactaggaaaccaagttgcctcctagagaaaccacataacccccggttgatcgtctatcatcaatacagctggcccaatcaacatcagagtaagcacaaacctccatagtagctgttggtctgagaagtaagtcgtgagatagagtgccttttagatacctaagaagtctcttgcatgcttcccaatgattaatagtaggagcatgaataaactgacttagtttcttaatgataaaggcaacatcagggcgtgtcaaggtaagatattggagagccccgagtgtacttctatacaaggtaatgtcttcaaatggttccccatcagccaaagataatttctgtgtggaacttgttggattgggacaacttttgacaccatctagctgaagtcgaacaagtaaatcagtcacatatttactttgagagagatacatccctgcagcatctctatatatctcaatgccaagaaagtaatgaataggccccaaatcctttaaggcaaaagacaaattcaaatcagcaataagtttggaaattagacttgaatc

SEQ ID NO: 234564 - DNA, 1147 bp, Cannabis indica
tatgaaggtatcttgaataccaaaagataagcaaagcatgaacaaattataagttaccaaaggagaagctaaaagctttaaactcaaatggaggagacaatgaagtaaaatgtgcatggtttcgataattttttttggaatgaagacaaataaagatatagacacaactaacaatatggttacaacattgatgagagacaactgaatgggtcacaactacacaactaagagattgttgatgtaactttgtggattgtggtggatgtacaacaaacaactatagagagtagatcgcaaatttaaaactttaagaagaggagaaatttacattcaaggtgacatctctagattccaatactcatggatacaacaacaactatgtggagcatcactcaaggagaagaggttaggaaagcctcacttagggacgagagacaagtgagacacaactaagacaaaaatgatgtatcttaaataattttatggcacgacaaggatgatacatgtatttgaaaagtgttgggattagaaaatgctcatgcaacataaatagattcaagacatgatgtaagcaaaggatactacaatcaacttatgatttactttatggataatagtataagtatgtcgaagtatcgtcatcagaaatgattaagaggaaaaaaaaatcacaaagagtgctgattttggtcaaaagaggtggtttgacaatagaatgaaaatagacctgtcaaaagtaaaagtcatcaagagctgagaatttttgacaaatattgaaagttttcttgacccaaagggactagtaatagaatttcctggaaggactttcctaagctgaataagacaataaccaacatcttgcaaacaaataacgttcgcctcactagaagtggagaacttagaggaaaagagtaagaaaattattgataatttggttacacccgaacatggaataaaatgcttaaatagagtgcagaagtaatttacgaagtacgaatcaaagagcttgaccaagtaattataaatagtgagtctctagtagcgaatcagatataagtgtgggtataggaggtatagtagtgatggacagagtaaggtctgttatacaaggttttctaattatgtgtatagtatcattaccccgata

SEQ ID NO: 234565 - DNA, 1053 bp, Cannabis indica
aatgctttgatcgatatgtattcaaaatgcgggagcttagatcttgctagacgagttttcgaggatgagtcgttttgtaaagacgcaatctcttggacttcaatgatttcggggtatggattacatggaaagggcaaggaagctttgtcattgtattctaagatggttcttcaagggataagtttggatacaataacagttgtagggattctttcagcttgtggaagatcgggtttgatcgatgaaggtcttaaaatctatgactcagtggttaatgatcatggaattaaaccaacagttgagatttgtgcttgtgttgtagacatgcttggccgatcagggcaactcgatcgagcactagatttcatcgaaggaatgcctgttaaacccgggccaagtgtttggggagcacttgttagtgcttctgtcatacatggaaacactaagatgcaagaactagcttatagatttcttatcgaaatagaacccgagaatccctcgaattttatttcgatttcgaatttgtatgcttcttcagaacaatgggatgttgttgctgatgtaagaacaaagatgagagaaagtgggatgaggaaggaacctgggtgtagttggattaacattaatagtaccactcattgtttttatgttgcagataaaactcatccatgttcatactcaatttatgaaatgcttgagaatcttaaatttgttatgaaaggttcaaatcagtcatcttctgataatgaaaattttcaaacataaattttagctttagtgatttaagaaatttttgttgaaagcaaattgaagaaatcattctatacattaaacaactctatttggtcttatctattttaaagagtaaatataaaaatgaaaattaaagaaaaactaagcaaatgttgaaaagtagagtttttcttttttttttttaactttggtatcttgttcttatttttgttatattcattttgttataatgttcgagatattaattaattaaattacataataaataaggaaatacactgcataagttagtcaataatt

SEQ ID NO: 234566 - DNA, 895 bp, Cannabis indica
agttggggttctatttattagaatggcagttgtcattatacattcagaccagaattttattggcatttttgcttgaaagaaaaaagcacgagccacatttaataagtgttgatgttttctttcagcaatagcattttgttctggtgtttccacacaagtgaagtcatgcataattctaagttttgcaaaaacatttttaaacaccaattcaggtgcattgttagaacgaaatctcttaattgtgcactaaaattgtgtctaaacataagagataaattgaggtattatttcaacaacatcagatttatgttttagtagataaatccatgtgaatcttgtgtggtcatcaaccaaagtgagcaaatacttatagttaaaatgagagctgatgtgataaggaccccatgtatcacaatgaacaatatcaaatttattgacagcaatagaattgttattaggaaaggtaagctttctatgtttagctaaaggacagacataacaaggtttatttttctataaagagctaacagtacaattcaatttgtcacttaaaagggcaagtctcttctgagatggatgtcccaatcttgaatgccaaagttcaacagttacagagaagacatgcgcattatgatttgaagcatctatcacatagaggccattgatggccctacctctgccaatctcctttggttgtgtttgtcctggatagaaaaactgttagcatagaattttactaaagtggaaccatcgttagtcaagcagatgacagatataatattgtatttaaaacttggaacataaagcacatcagtgagagttagagatctattgacagctatggaaccacttttgtaaagcccgcttagttaatttggaaattagcagttgttta

SEQ ID NO: 234567 - DNA, 561 bp, Cannabis indica
aatattaattgctaaaaagaatcttattgaatattcaaattaaaattaattttgtaagaaaataattaattataattaatttaattctataaagagaatttttacctattgataacctgctattataggtaaaaaataatgtaactatcgtggttacaataaaaatataaccattgaatagtcacacacacatatatatatatatatgtattataattataccaacaatttctaatgaaaagcgtcatatatttagttgttgttttacacgatacatttatatatacattcaatcaaaacttatccttcttttttttttttccacttcttagggttattttcgcctacactactagaaaagtggtgaaattcgggagcaaagctgtctcagaaatcgctaaagggggagaagggctgaataaatcgaaggcacccctcctaatttttaacttttgatttaatactttcctatcttattctcaatctcttgttatcttaatatttaacgtatataatgttggaatatattttaccaggacttagatttactaagaagtatgt

SEQ ID NO: 234568 - DNA, 1476 bp, Cannabis indica
ttttgaaacatacctcttttttatatatactgtactcaaaatatcttgacataagggagtcacatggagagtgtcttgaaatgacatgagaaaaattggtataatgtttaaaaaagaggtaaaaatgataaacttcaaaaaagaagataaaaataaaagagagcagtataaaaatagtatagagtataatttcttaaacaaacaagaggatgaactaacgggccgattgggccacccttctaaaatttgggccggcccacattcatacctgtgcaaaaattaggcgaaaggaaaagtgaaaagtgaagctagtttctcattctgagttgtataattctttcttgagggaaaagaaaagaaagagagtgtggagtctataggagttgctgcttcagctttctcttcctctatttcaacctcttcttcaatccaacaaactcgaccgacttaactcaccaatccaaacggtaaacatgagcagcataggcacaggttacgatctttccgtcactacattctctcctgatggccgcgtttttcagatcgagtacgccgccaaagctgttgacaacagtgggtatgttcctctctttctttttctcttttgtttggttcccgagaaaatgcgaggacgagaatcgttgttttgttgtattactttttaggtttttcatttttgatttcttttcttcgatttgggaaatctgaaaattaaaaacggtgtttttgcaggactgttattggaatcaaatgcaaagatggcgtcgttatggtataattccgttgtttttttgatttatattccattttgtaaaaaaaattggaagcttgagtttcggaaacttggatttttttttttttttttttttggtaaatttagggtgtggagaagctcgtagcgtcaaaaatgatgttgcctggttccaatagaagaatacattcggttcatcgacactctggcatggtaccatctcttttctctgcttcaaaatcagatattgattgtttctttaattttataaatgtttgtgtatgtttgtatgatcttggaaaagtgcttcatcattttctaaagattactactaaaaataaagttctgcttaataagtcatttgctaataatggtttttcaactataggctgttgcaggcttagcagctgatggcaggcaaattgttgcccgggccaagtctgaagctactaactatgaaaggtttgttttgttctaaagattttcgtgattatgagtatttgtgaagacagggcatttagaaaagctgaatttctacagtaaaaagtatgaattacattttaaaaatcaaacgaacattttttccccctttcatgggttaataagttaagggctaggttatcatatataagtttatctgagtttaaaattactggatgttgtgtttggtcggtgtttttctttgcaaagcactatgcagttggatgcatttggtgtctgagcaa

SEQ ID NO: 234569 - DNA, 754 bp, Cannabis indica
taatctgattatattgaaatagattttatttagggcacaaaactcaacaaaaatgataatagtgatagtgtggtggtcatggtatttgtggtggtggtgataataatagtggatggtttggtgccatagttggagaagaacgaaaaagaaagaagacgataaagaaaaaaaatatttatttattttaaaatttatttattatttaaatgattttgtaaattgataatttcttttataatgttttaattattaatattatgtgtactacttaaaatttgccacatgtacacttctgtgtacgtgtgtacacgtagtcagtttactgtgacacttaactgaagtttttagacggaaggatagagacaaaaatagaagtgtagtttatgtagttttgttgtaaaaagattaatttttatggttaagagtcacaaatcgtataattcaagtgattttaccactaatatcccttattactaacaccatgatgtgctaaactggtgtaatggaatacgtatgaatcatttggcttgtcgagatctatattcatattaatatatagaccatgttatatagcgtagttgtaggaattgtctttaatgacattctttcttgtttgggtcaaggatttgaagatcaccacaacccctctcgaaagggtttaaaggcttggctattctgaaggctagcttagttgtgggtagtgtcatctgtgtaatgagaatacttgaggtactaccaattatccaatcaaggt

SEQ ID NO: 234570 - DNA, 1335 bp, Cannabis indica
attttcaacagccaaaaaaattcagggggcatgatttggtacatgtcaaagttcttggggaaaaattcctaaatagcctttattatatatatttttttcttacaaaaatatatattttaatatattagattatacataaaaataaaagtaatcaatgtacatatatttatttaaaaataatttttttaatataaaaaagtaactaattagtatattatatttatactcgcgcttgggatgaggatgttgtgagagacttgtttgtttcacgtgatcaggaccttattttgtccgttcaacttagggattcagccgtaaataatggttggaattggagacttgagacttgtgggaattatttggttaaaagtgcctataaatttttgcaataatctaaaagtgcttggtgtcgtgatgccaatactgatttttggaagcgcctttggtcattacaaatacctcctaagatcagtaacttcttatggagggctgcttcgggtgtgctcccaacttattttagctccaaaaacgtcatgttcccgtcaatgctgactgtccgttgtgtaacgctcatgcaaaaaccgttcaacatgcgttggtggaatgtgagtttgctaaagctgcttgtaatcgcagcatggtcgacgtcggggctggggctgcaacattcagcagctggttgttggggatctttggcagagggcacgaaggtgaaatgaagcaagtggctatggtgagttgggctatttggcgtgcgcgaaatgaatttgtttggcaaaagaagagttggtctgcatcaaatattgttgcattagctagaatcatgcttgatcaatataaatttgctcaaaaaaagaagggtcttttgttgtctctgctacatgatgggggcaaaatcttgagcgttggattgcacttgagttaaacaagatcaaagttaatgttgatggggctttatttgaacaagagggccgctttggcatgagttgtgtagctcgaaatcatcatggtgctatggttgaagcattcaagaagggaaagtttggttgtattcaacctgaaattgctgagataataggcagtaaagaagctttcactactacaaaattgggctttagaggcggtttttaaggcctttcagcgtcggttttggcaaaatttgctaccgacgctgttccagatgacgctaaaagggttaaaaataaccgacaatgtagggaccctatggcgtcagttattatgaaaagcgccttcatagggtccctacggcgtcggttattataaaataaccgacttagtaggggtttcttattaattttttttcagctttaaaat

SEQ ID NO: 234571 - DNA, 1516 bp, Cannabis indica
atttaattttgagataattaaaatggactaggttgctaaaaataaaaatgtcacatttgatagtttttatttaggtctaattagtattgggcttattcaatgaataataattgtttaattaaggttaaattcctctccttttgggccttgtgtgagcgttagggggccattagtagtgggtaagacatactaaactcaacccttcctcacatgaaaaacaccaattgtgaaggctcatctaccttcgttgaataattgtaatacattaattacattagtttaacctaataaaattgattagcaacataattaatttttaaaatatataaaatttatttttcatcaaatttttgaaatttatttaagaaaaacacacttagtttaaagaaatgtattcaagataaactatatgtattttcctgtatttaattaaataaagaaattataactaattagatttttctagatacttaattatttgaattttcttagaaagtatctttaagttaaaaattaattttccaaattgagtttagatcaactcaaattagaatattttaattttgaaattaataattaagcagatttttctaggaaattagttattctaatattctttaaaaatatttttgagttgaaatttgttaattttagatcaacttaaatagggatatttttttaaaattaaggtgattagttcaagatacttaattgattatttaattaaatttttaaaattatttaagttgaaaatttagcttttttttaaaaaaaaaataattttcaacttaaatagggttacatcggttcaacatcactatcttggcggctgtaatctacaatatctagcttaatggaaacatgtgtattttcaatgggtattctaaatcagttattggtttagttgatgatgtaaaaaatattgttaagtactaattacttctgttaaacaaaagaaacatgtcaagttaggagagagattacttactgagattacacaataggtagtttttttagtctcggtttgttttggttggtttgtaaggggcgatctttgtttttgagccttgtgtggctttggtgcttgtgctagttgttgtattttgctctattgtaaatttagctattttagaacaacttaaattagatatttttcaggaatttattttattatattttatacaattttaaaattatatatattttatgtatatttagatttttgaaattaaattgaaagttaaattaaagttgaaaataaatttttaattaattttagaccaacttaaattaagtaattttcattattaaaatatatagattaaaataaatgattaattaaaatatattattttaaataataagcttatcaaagagatattcgatctccattgttggtcttacatggttaattgtttcaatttaacctcgagacgctagacttcgtcccctctatggatggttatccattgaaatattaacactgtaaaatctcgtatgataagtattttgtaag

SEQ ID NO: 234572 - DNA, 802 bp, Cannabis indica
tctgataccatgtcagaaggaattaaaagtgtattgatattcctcaaaatacaagagtacatagtaccacatatttataataagtggagaccaaagaagggacacatgtcaccatacaataaaagcaagaaaatacaatgaaataacattatggtttaacagttagttatagaatatttccataatatattatagtacaatattaaaaattaatgcaaatatattacaaagttattttttgatgtcaaatataacacaaattttatatcatctattaaaaatggtcttatgcatgtctttcaaaaacagagtagttatttacgggattttccaaaaaaaattaagaaattgataattatttaaaatactaatattatatcattaaagtactgcatttgcatataaatttcaaaacaagcatatgcggaaaaataagcttgttgaaattttatttcagcattctaatttttttttaagtaaaaataaaaggtaataaattcaactatatcatacaccgtctaaaaaatttatatccatataataaaaatactaaaagaacataagttataatgattataagcaatcactatccaactattttcaattaatctatacatttgttcctttgttgagaatcaaattataaccacaatggattaagtgctcgatcgtacctctctcgatccttaatttgatatcgatcaaaatggtcaaatatatataaagaaacaagtcaaaataacacgtcccactatcgccaccgaaggatataaagtaaagatttattattccaaaaaaaaaa

SEQ ID NO: 234573 - DNA, 4933 bp, Cannabis indica
attttaaatgtaaacaagtttaaaagcgggatcccaccctttttgtataactatatgattatagttattaaagtttaatgttaatcaaagtttaaattaatcacgatttttgataaaaccctttgactatcaaaggtgtgtactgtaattataaaggcactgtagcgtgcctaatcattagggcgttataccaacattctacgagagaaatcttcttgggccaccaatttcaatttagttgctgccaattttttggccattttaatgaccgtagaattttgttcatcatgttcaccttctttaccaatttcttcatcctctaggtcaataggatcaccatcttcagtttcctctccttcattgataagatcatcatagacatgtcactcatcgtgttgaactttattcacacgacgactagttgctttagtaggatctccattgagtcatgttcctatttcagtgttgggatcaacttcatccatcagcatgtcctggtagtgaaggccaaatttggtccgggtgagtaccatgattacagtatataatcgtcaatggtattactgctttcttcagctctcaatgaaagtaccaaaatatttactgagatttttagaaactaataatttaaatgtaagagccaaagataataattcaaagataaatgagataagaacactcaagtttcttacgtggttggagcgttaactagccttagtccatgagtcgatattattaagaaagactagaaatgccttagggattacagaaggtatgaacactctatttttcctgagcaagtgagccaagaatttctaaccctttgcatgtagggtttatgtagtatttatagagcatagaggtcatactagttaccattttccctctaatggagagtttacaaatataactttgggcttatttggtgaagcccggcccatggggcgctaacatggtgaccatatcacgatactagttgtcaaactcgtgtcctatcttcatggaaattaatgacacattataattacttaattcccaattatcttgtttccttatttagtaagatataatcttttatccaagattataggaaggtaattcctaatcttgtgcgatttgacagaaaatgggaaactacattgggcttccaaatcttctttcggctatgtggttgtatgtctaatgggtggtgaccatgctagatgaaatctcgcttggacaagttgtgtgttatttatccggaaggattaatggtttatagattcggcctagtgatgtcagttaggccagttattgagcctgaagtatttgagctacatttattatttagtttccacgtgtcccttgtcagattctcatataacaatactactcttataacttttaatattgttatgtctgttgttattctttttgatcttaggaatattgcccaggaagataatttgtgtgttcctcaagtatcttttggtcctaataaggagattgagcatcggatgaaacctttgtctaatatgatcaaaattaacatagacgcaacaatggtcaacaataaagggaattttggatttttcatggtaattcgtggctcagttggttcttttgtggaggcccgtgtgcactatttggagagtgttatgtgtgcgaaattggttgaggctttggggtaaaaggaagctcttagctagttaaaatacaacctcgatattcatgctaaagtagaaactaattgcatcaacgttgtcaatgctatttatagttttattgaaatgtttctacttttggtgttgttattcatgattgcggagaattacttaattcttttaagaatgcttctatttgttatgttaaacggtctgtcattagcttgctagatcgttttattatctccctgatcatgatcatgttactagagaggataattgtccctccaattgattgtctttattaataaagtttaaaaatctttcttatcaaagaaaaaaaaattactgcatacatataatataatctactcctattctcatagtagaattagatcatcaaagcggctataatattattttattataacatgaaggaaaagacggttagatttgttgtgttagtgtatgcaattgaaagacagattacacccaatgctaacccaaacccaaactttcactctctcaacgcctattcttattcgacctttcactctcaatctcaatcccaatctcaccttctcttctgggattctatacttagggcttacttgccccccaatctatacatctaaatcccaattcaattgagtttcactgcttcaattttgagagctttaatggcgaagaagcgggtggcagcggagaggaagaagattgataatatacccaagtgttctcaacagccaaggagctctccgcccaaacgccgcactgatttctcttcctttttctgcaaatcatctactctattcgattcaggttttttattttcttcttatccttcttttttcttttcattggttgattatcaagaatttgttttgattattgtttacattatgggttttgatcttggaagtgtgttgagttgttcgaatttgattctttctaaatgagtatgtttgaattttgttgaacattatcgttaagtgctggaatcgatgttgtttttatccctaattgttgtcttggtgaaagctttacatttttgttcacttattaagatggtatccttaaataatttctgtcgaacgtgcaaggttttggagccctgtaatatttgtgtactgagttctaattgtgttaccgagaagtttttacatggggatgcaattcatcagagaaatatcttgtgtagtttgataatttttacaaaattgctatggattaaaattcaatgtgtgtactaggtagatggagggagggatgaccgtgtgacagagatctaattgaattcaattatgtgtgtttagctcatgtaggtgcatagtacaactgttcttttgtcaggatattgaatatgtttaagcaattaactccttatgttggaccatttatgtttaggctctctgttgcatgaaaagaatgcagagggaaaagagttgtttccgaattctataattcgatgcagcaagtcccaggaggaaggatctggattatcctctaattctacagaagcttccttagtagaagttgaattagtaggccaagatgctctattggagtcttctgataacaggttctggtcttttcttaaattttatttctgtgagaaatagaatgggatcatattagtgcaatgatgtggcatgatatcatcagtaagaatcctgtacattttaatgaatgttgttcctactttatttagggaagatggtaaggacggaagtgttgcattggtgaaaacacacaaaatgtggtggtctgctgaggtacacgttacattcttacagtagtgcaaaatatcactgctcaaacaataataatttttaccttttggatgttgtactgaacaactttttttgtcagttttacctgaagtttgaaaagttccttgattttagctgtagaatcttaattagagattggatttcttgatgagacctcagtttacaatttgggtgttgaatgtgttattcttttaaacacaattttggagtgttgattagctttgcaccaacactttattgcaggacatacaacaaaaggaacgccatatattgagcagtgagttgattaagggacctgctgcttctaatcattcagacgaccaagatctttcctctggtatgcttttgtttcgtttgcttgaaactatatattcttaatcatgtcttaagaaggtctacagaattagcactaagtctcaaacatgaaacaataccatattaggcaagattagacagccctcaattttccacaaagaaagttcaagttctgtatgaaatttttttacaatattaagcagcctcatttattccggctagttcttgaaatgatatcatagctctggccccatgcattttgttctgtagtacgcaattttcggaggctgtagtagagcagcttattgcttgcttctttactcatttcttgtttaccgatgtatcgatggcatgaacccttgttttgtttataaaaacatcttcttatataaattaggacttactactatttaagatacagaacaaagttttctcttgatctttcgaattcatcatcacagataaatctaccttatcatcaagcagaggagaggacgatatcattgcaagaggcaggggcaagagggaacgaaaacctaaacttcacttcgatgtaagtttctctctaacttcattcccattgcaagggaatcacctttttgcttcttttattcataaatatgattgcattcttttgcaggacattacatgtccactgaaccccgaacggagagttcgccgacttaggataatgcgttatcttggtctaacaccacctgttggctctcccttctaaagctacttgcttcaagaattgcttctagagttcatgatctgtgcagatttgaatatttatattctttttctggttttcaaggtgtataatatttattgtttatgcttgtgaggatcacttggttatctaattaattagtttgcctttgtaaagaattaattgccacttagtttaagcatataggtattttttgttcagagttttgtaaactgtcgccttgacccttatctttctgaatatgcataaatttcatctgacatagaaagatttagaaatggcaatatttatcctaaggcctcaactgtttctatttgtaattgaaatttttataaaaaatactggataatttataatattactgtcacatagaaatttttacaaaaatatttttttttataaaacaactgtaaaactctaaacataataattaaaacaacagtggaata

SEQ ID NO: 234574 - DNA, 2184 bp, Cannabis indica
aaattatttttttcttctctcctcaactcttttattttctttaaaaaaaacccaaaattaaaatatttttttccctccttaaatctcttatttttttaaaaaaaaatctaccaagattcctaatacgttttttattggattaattacgcatacaaactaaaatgtcaatttatttaccaaattaaccgtgtctgttttattaccgattatttattaaaattgtgttgacacgtataccgataatgataaaatatgtatctctcttcattgatacatgatgaagttaatttctttttcttgaacaactctctcttttgctcaatatgcatttttgtcgtcgtctttttttaacaatctaaaatgatgggataaagatgaatcatttttttaagtcctttcttttttattaacaaacaatcaaacattctctttctttttttaataattttaaaaatatttttttagctatactaataattattttagttttttaatttttagttaaccattaatatttagttaaccaataagtaaacaatgtttaaatcagtatatatcaaacaacttcataagttactaaaagtattttgtttttgatattttgttaataaatgaataaataaaatttaatgtatcaaacaacttaataagttactaagaaatattttttttttattttatgtttagacattacaaaattaaataaaaatagacttatttttataaaactattttaataataaattaaatagtatctaaaacatcatatgagttacatttttttttaaaaaaaagtaacctcaatgtatcataaacaataaaataacataatatagcttaaaaatataaaagagaaacaaaaaagtttcttttaatattagttatcctttttggagatagaaaaatatatatttctcacacgttaaaatagttattttattatttatatatgtgtaaaattctgaaataatttttttaatagaaaagtgactaattgatatcttattcacatcaaaagtaactaaatggttgcttttttcaaaactcccaaaaagcgaaaatttctggaaacgaattttttttaatttttttctattttcggtaattgttttgaatttcggtatatatgctgacgtggcacaacggtatttgtgtaaataattttcttaaaggtatttttgtaaataaaatcaattttaagtataatattaaaaaactcccttttttatttgtatgatttttttaaaaaaaaaaaaaaaataataaattcaacattaataccttttacgttttttaattattttttttcctatcacatgttaatatataaataactaatcctaatttaaacctaaactctaaacctataaatctaaatttaaaccctaattgtaatttttttttttttgttagtaacgaataaatgaaatgatttttcttctctttttgaaagaagtgataaattgagctctcattgttaatgggaccttgttaatttgtttcatttgctttcatgtgcttttaggttcaggttcatcagtatcctcaatctctttgttaatcgtggtacttctctcatgacccattaataacagcttatgcacaagaacaatcagctacattaattttcataagtgatgctatagcagcactgttgcatatattttcttttcttatataatctcacacttctcattcaatttgatcacatctcttcaacatattttctaaatagctacattttcttcaaaatatcttccattcgcagttctttttactcaataaagaaagatgtgcacttgtgtcgtgtctatgttgacatttctcaaaatccaatcataagaaaaaaccaaaaggtaataatttttggacaagagttgaatcagagtaccgcaaagatagaaaatttagcaataaacctcgaccaataagatctttgcaaactcgaatgtctactattaatagcgtagttgcaaaattaaggggatgtatcaactaaattgaaaataaaaatccaagtggtgtttcagcagaagacattataagtgtttgttataataatttatttattattattatttttattttttaatttttattgacgttattacttaatttatattgtaacaagtaattcaagcaaaaattttattagccctagataaaaaatacaataaaggcttt

SEQ ID NO: 234575 - DNA, 984 bp, Cannabis indica
ttgagtgttgttgctcttcatcagtgtgtcatatgaaatatgcgcaacattttctataaaagcagttgggttttctatatcgtcattgaataaaaattcttcatcttccatagcaaatggtggagcaagaatgaacttgatgtttaagttaatggtaaggaaacgagcattatgtggttcttgttctatttgatttggttcaaaatgatatggttttatacgataataggcatcaccagttacttgtggagaattcatgattaatcacacttgtaaaaatgattaattttgaaaagaaaaagtagtgagatttgggtgatgaattagtaaaagagaacaattttagctttaaaagtttcaaaattagggtatgcaagctagcttatgaacttacaaaactcacgaggtatttatatagagatatatataaacttaaaatgaaattaatgatttcagatattacaattttgtataatttaaatttaaattggtttaattatgtacactctattaggattaggattaggaatttaggattcggtccttatattataatagaattaaaatatgtttcgtacgtgtatatttctgttttacaaaaaattattttacatatatagccaaataaattcaaacttttatcagcctataaaatagatatttgttgatttatgtatttttacgtagcattaaatctaaaacctaatattgcattaaaaaaaaactaaacctcattttaatcgtttccaaaaaattttaacatttaaataaaagatatataataggaaaaattaaagttttaattcataatctggtaacggttgactctatttcaccaaatagaattttgagtgatcttagctactatacaagaaaggaagaacactattgttacccaaatctctataacacaaactgtaaattgacacaatctttcataatcatcaaagaggaatagcctcgccataatttggggaaaacttc

SEQ ID NO: 234576 - DNA, 940 bp, Cannabis indica
acaatgttgcacgtatcacatatccaaaagaatctttatatctgtctctcaatttgctggtgacataatgcattctttaaattccatcctgataaatgctttatcaaagactaggtttcgaaggagacaattctggaaggccatcttaggcatggaatttatgtcatagatccaactcaactcaatatgtcctctaccaaataaaatgactgcttcaaactctttgtataatgttcggacttgtaatgtcaattgcaattctaattctcaatgtacttctttttctttgtgacataaaaagcttgctaaaccttctatcaaagttgtaactgccataatggccaaatgtaacatttctcaaagaaataacaaaacagtgagtgacttttgtgatgcttgttgtaagggtaaaattcacaaatttccttttcaaatatcccaaactatttttacataactacttcaacttatgcatagtaatatttggggacccttacctatgatatccttatatggatatagatactattttcactttataaatgtctattcaaggtacacatgagtatttctcctctcaaagctaaatttgaagctttaccaacattcataaacttcataacacaaatagaaaagagatgaataactcagagtgtcttgttccactactcatcaataaaatggtgttgtttagagaaaacacaggcacttaatagaaactggtctttacttgcacaaacctccatgcctctctccttctaggatgaagttgttattagaacaacttgctatgtcatcaataaacttcctaccccagttatagcacatgatactccttcgaacaagttattccacaaacagagagattactccactttaaaatgtttggttggcttttttcaagaagtgtaggataaatgtaaatgattgtttggtgcaa

SEQ ID NO: 234577 - DNA, 956 bp, Cannabis indica
cccaaaagttaggaggaatgggcttttagaatctttatgactttaactcctctcttgtggcaaaaaaaatggtggaaaattatccaaaacctgtcttccttgctacagtgctaaaggaatgttattttgttaattgttccttaatggaggggaagaatagttcttatagctcctttgtttggaggagtaatctggaagggagagatgttctagctagagggttgcggtgataatggcaaaaaataatggttaatgaggataaatggattaggtggcctaagacttttcaattttgacaaaaagttgctattgtaaaaagggtgtgtgtgaattctctactgacggaggatgggtcttgggatttaatttgggtgggcaatgtgctccatcaggatgatgtggattaggtttttggggcgttgactgggtccagatcgagagaggatgtttagtgatggggtatcactaaagatggctactatacggtgaagagtggctactgggcgggtgactcgatcttggaatacaaacaatgacttctctgatagaaacttaatagaggcttggtggtgcactatatggcagcttcaattccacccaaagtcaaggtttttctggtggaaagtttgtcataaatggatacttgttcgtgctagtcttaacaataggggaatgaagattgaggtgcagtgtgctcgctgtaacaagacccgggagaatgtcctgcatgccttgtggtactatcaagaggtgaaagaagtgtggaagttgagcatgtaccatcatttgtttcctccttattcttcggacccgatctgcttggcctccacatgcaaacttagctttataagtcaaattttgagaggttcttggttactattttggcaggggcaaaataggtttgagcgatcacttgggtttacttgcagctgcaaacattatgcattgggctgagt

SEQ ID NO: 234578 - DNA, 679 bp, Cannabis indica
taaaaaataattttatttaatgatgtagggaaaaatataaagaaattgatgtatgatttgatgtaaaggtatgatataaaatagagagagtagaattttggtgatatattttaaagaatagagtaagaagttgttggggatgttctaagcataagaatcttatttttccttccacccactcacaataggacacacatacaaggggacctgccggatgcacttagtcctatccaaaagaaaagccctatataataagagaattgctaaaatgcaccacttagcaccctcctcggtgtcatactgctattggtgtaattaagtatcaggtcttatataacttaagaaaataacttttaaaaaatattactaactaatcgtggagtgtcacctatagaatgtgttgggcattattaatgcccaataacaatgctcatataataataataagaaaaatactaaaaggcatcaagtgcctaacactagggatgcacatagagcggagaattggcagggagtgctcccccttctccattcccgttaaagattttaatccccatctccgcttattccccattagatatggggcgagaaattctctaatgggggcggagacgggatgacgaatcccctaataaaaaaataaaaattataaaaaaaaattaaatatataaaaatattt

SEQ ID NO: 234579 - DNA, 1938 bp, Cannabis indica
tgcagctctaaatttcccaaacacaccagcaacaacaatatccccttacaaaaggtttgttgaagtctacaaagcttcctccaataccagcttgtgtctttgtcttagagtataactcaaaaatcagtgtcctttaagtaaatagaattgacccattttacccataacaagtcatgcttctccattaacgcccatatatatttagccaaaactgattccttccattgagctccatctctaaatccaatccctccaaacactttggggagacagactttttctcaagagaccaagtgcacaaatatactcatccaatagttccttaaacctaaaagaactgaatggataagttgcaccctcccagcaaaagataggtgcctcgtttcccaggtatgaagtttgagttttatctttttcaagataatatcacagtcttcaagtttccatttggttggccttaggagaactcccaagtactttaaaggaaattttccctcttcaaacttaacttcttgcaatatggcttgcttctctacttcagggacacatgccaaaaagatttggaacatggatttattagcctgtaacccagaagcattgctgaaatcatccaaggccttctttagatgcctaacagcttgtagtgttccttttccaaaaataatagatcataggctttgcttaggtcaatctttatcgtgcacctagctgagacattctttctaccataagccttgattagatcttgaaaaatgagaatgttatgagctatagatctatttttagcaaaagctctctgattttggttgatcaggaaaggcaacacctcagaaagtctcagacaaaacaatttagagatacagttatagattgtagagcaacaagcaataggtctatactccacagccttagtggggttttctactttaggcacaagggatattgaagtttcatttaattcagcaggtaaaattccagtctcaaagtaatgaagaatagctctacttacctcctagcctatttcaggccataagcttttgtaaaagcctgctccaaatccatctggtctcgggctcttagcgttttgaatgctgaaaacaactgacttgatctccttttgtgtgaatggtctcaaaagttgcagttgttgagctaaagaaagcttagttccagtctcaacataatgcgtgttgatcctggttgtagttgaactttgactccccataaaactgtggaagtgattgacaaagtgcccaaccacttcaccatagtcatccaccgtttctcccaagtcatttacaaagctgacaattctgttgtcttctcttctcttttttatgcaagcatggaaataagcattattctcatctcccttgctcaatcaatcaactttgctttgttggactaggaaactatgtagcatacttgctttagcattgtagtcttgagcagcttctacttcaacaagttggaaatcttcattcttcgggtgttgttgggcagcagttcttgcttcaaggtacttgtctttggctctataaaaattaacctccacatctcttataaagttcttattgaactttgtaagagcatcctgaggtgacaaatttgaatatatatttattaaattttattaaagcacaaaaataatgcaaagagcatcctaaggtgacaaatgacataaatgagaaatacttataattttatactatattgtatacagtataaatgtaaaggtaagtgaataacaatataaacaaataatttaaaaacagtatatcatgtaaattatcctaaagaaattatagcaaatgaccccaaatcataggactatgttagtaaatatgttcatttcaaaacttgtagagaaatgacctttttagattatttattatttatattgtcttttggcacataaaaaatcaataattttttttt

SEQ ID NO: 234580 - DNA, 1756 bp, Cannabis indica
aagtttggaaaagagggtataaaattatcccatctcttcttcgcagatgatagtttcatcttcctgacgcatctccatcagagtgtagaaagttgaaaactatccttgatgaatattccttgctctcgggtcaaaaaataaacttcacaaagtcagaattgtgtgtgggcaacaagattaaaaaagaggatggtgagtatcttgcggctgagattggagtcaaattagtggaatgccacacaaagtacttggggatgttggcaacaattggaaaaaggaaaaaggaagtttttgaatccatacgtactaagattagagccaaactacaaggatggaaagctagtctattctctcaagcgggaagggaaatacttctcaaagtaataatccaagctatacctacttatattatgagttgtttccgtcttcctaaggaattaataaatgatattcatgcaatgatggcaagattttggtggggctcctcggactcaaaacacaaaatccattggggaaaatggcacaaattatgcaagcctaaggagaaaggaggcatgggattcaaaaacttggaaaagtttaaccaatctttattggcaaagcaaggctggaaaattttaaataatccccattctatgttggctcgggtgctaaaggctttctacttcaccaattctagcttcttagaggctaaaattggaggttacggatcttttgtttggagaagcatgttgtggggtaggaaaatcattgaaaaaggaacaagatggagggttctctcaggaaaagacatccgtattaatgaagacaaatgacttccccgtccttgaacctttaaattgcgtactccagcaaaggtccctaacggaaccacggcggataaactaaaagatgataagggagattggaaccagaaacttattgaagattgtttccaccatgatgatatccccattatactaggaatgaccccttgtgctagaaacctcaatgatgaccttgtgtggcatttcacctcggatggattgtatacggtgagtagtggttataaaatagctgaagcaaacattttaattgcaggcccttcttcagagccaacaacaaagaactggtggacaggaatttggaagattgaggcgcctcctaaagttagaaatttcacttggaggttgtgcaatgggtggctccctataaacactgtattgcagcattggggcatgaacattaaccccctttgctgctggtgtgggaaagaggaagagacaatcgaacactgcctttggttttgtcccacggctaagagtatttggaagaatttctcaatatggaaaacgataaaacagggcagaggtaccattattgatatgctcaatcatatcaaacagcaggtttccaaagaggagtttgtttttttccttatcacgtattggctattatggaaccgaaggaacaagaaacgtctgaacctccatgtgcttccgaatgagtcttggactaaatgggcgcaaatggaaatagactacatgatccacaatatatcgtccacggatagaagcaagaccccatctccaaataagcttgctggctgggaggcaccccctaaggagagcttctgcattaactgtgatgcaagtgtgctgcatactgaggctaaaatcgggctgggagttgttataaggactcactctggcgaggtattagctgggaaaacccagcaccactctggtattttaacggtagagttagctgaggcgtt

SEQ ID NO: 234581 - DNA, 782 bp, Cannabis indica
aatctcatggaatggattgcttccaatgttggattgggtattaatcttagtgagaggatccaaaaatcaacacatggcatcacttcgagggctgctttcggtaagaaaagcaaagaccatgacgagttcatatcaattatggaggaaagtttaacgtttgcagcaggctttgaatttacagatttgtttccttctctcaactttattgacctgatcagtcctgcaaggtctaaattggagaaactgaagcagagggcagagagaataatcgaaaacatcatcgaagaacatattgagaagaacaagtcaccattgaaagctggtggtgaaagtgaaacacatgcagattttgttgatgttcttctcaagtttcatgcaaaggatgaccttggcttttctttaactagtgacaatgttaaagcactgatttgggtaagttatccacttttctatcaagttgtctatgttagaatttttatttacacctacattaatttttattggctttaataaaatatgagttgattaaataattctttattgtgttagtgttagcaaatattgttactgatcaatagttaatggacttagtatctgtgtgtaagtctacttgaagcagaaagtgtagacttttctagttaactgaaacctttgatgagtatgtctagtccaactagggttatgtagttaagacacacccctaactttataaatagatattgtttcatcacaattgtatattttgtaataatcagataaataaaactgcttctgattttaga

SEQ ID NO: 234582 - DNA, 1081 bp, Cannabis indica
ttagtattgtaacattatttaattcatatttttatcctttgtattatttatcatacagttgtaatcttgtcgtttggtatttctattggagcacaacaatttccaatcaaaagtttattctttcctatattgctttagtggaagaaaagaaatcaacgtatacaagggtaagaattgtgatattttgtaatttagtattttttatataataatatatatatatattaacatattttcctaagatatgaatttttttgtagtattatatgtgaggtatatgtatatatatgagttatatatctatgggtgtacatgcagggccgaccctaagcataggcgggctaggctcgcgcctagggcccactcattttagaagcccatataaaaattataccttttaaaaaatatatactttttaaataatttttaaaaatactatttatttttataaaattccgtatatggcataaacaatacaccctgaattcaaataaatctccataaaatgacaaatcataattaataatttagtttcataattaaaccgtaattatctgctaattctaaataaaaactaagcagtctttacacatgatatattaggattgtcctatgtgtttatcgtttttaaaaccaaagcatgtaaactagctaagattaatttaaaattaacttagtaatttaaaatgattttaaaatgattttaaattataaattaaaaggttaatttagatttgatgattacgacagaaaatttattcataatttgaggcttttattataaataaattaatcataattattaaagtagttaatatgtattaattctgagaattaataaaacaaatacattacccttaaaatagtgagtaggagaaggagtacatgttaatgtaaccaacgatctccattattggtcaacactgagtgcgtatagactggttttgagacgggtttgttttcatccccctaaggaaggtatggatctatactattgctcaatgttgatctcttgactaagataagaagaaataatgtattttcatgtgacatcaactcttaaggtgacacactaagttaa

SEQ ID NO: 234583 - DNA, 1395 bp, Cannabis indica
aaaaaaaaaaatatcatacatatcattatattaatgtttcacaatccatataaaatctttgtaattgtaatgttgaattgatgatttgtttaaggttgaataaaatagttgaattttaataggttggggtgtatttattaagaataaattttataagaaacttaattttagaattgtctattttagtcattttataaaaggataaaaatgtatttaatttattagggtgtacttataattatttggggtgtaaatataactcccctttagtaaaataaaagctaattaggattttttccccctaaactttaacatgtaaagttcaggggcatgatttggtagatatcaaaatctcgggagcatggtttcgtacataaacaatcattgatatagtgaaaattaataaaattagacaaaagtccttaaatccaacaatctcaatatttcaaggggcatttttaacgaccttaaaaattcaggggacatgatttggtacatgtcaaaattctgaaggaaaaaatcctaattagcctaaaataaaatttggaccgatgagattttgggcccagcttgacacaagacacgacacaaatgggctgtgcctatggaccagagtgttctttccttgtcatacccgagacggatacgaatttggaaaacttacaaaaatattgtaaaatggcaaaaagtttacaaaaatactgtgacactgagttttttatatattcactagaccaactttacaaaaatactatatttaaaattttaaaattataaaaataaaaataactcaaaaatgattaaaaaaacgaacttagaataacttaataaacaactataaaacaacaaaatataactacaaagcagcaaaaaaaataacaaaatattgatctaattgcaataagcaaaataatatcaactcctcaatatgtttttgtattataatttttttatttagtttcaacaacatgatttacctttttgttctattacactatctttttcatagaatttattgctataactttattcttttaattttttttactttgtacctttttgaattagatagttataaaataactataaactaaaaagcaacataaaaataacaaaatgaatgcacatatatacacctgagccctttcgttgaactcggtgatgcttcttactggacgacctttaagtcatcccacaactcgcctcctacggttagtagatctgtagagatccccgcatgaagggctgtaagttgtgtgttgtcatccaaattcctaaccctagtcccaaccgtgctaaaacaacttaagtatgccttaagtgtctcaccgggctgctgcttcatattggttcgcgaggccgctttgggtcgtctatccctagcaacctggaact

SEQ ID NO: 234584 - DNA, 1584 bp, Cannabis indica
ttcattgttctagtaatctttttttactatacatcacatggattcacttgaatattccatgaattacatacttctccactttgattgagaaaattttagatttgtcttaacagtctagaaagtagaagctcttgaaaataatgatgtatcacaccatacgtgcccccagctctagtcccttggaagccgcctatggtccaagatgcttttgggtgtgtaatagcagcgatgtcgaggccaatctctgattgttttcatccaattgaaatggatccaaaggagaaacgatatacattatttcaagagcctatacccataaagaaatggcttaacccaccatcaggacacctcaaatgtagaatggatgaatcaattgtgttatcgatttaagtaattggtattacaatatttgagagaaactctacgagcgatatggtggatattacattcaccattgttcaggattattctcaactacaagaaattaatgttctcacattcttttatttctaaagtggctggatatgcagtttttttttatttcattgatataaaatttcttaaagttgtttgagtttcttttattttacaatcttatatccaatttccttaaggcataaatcattcatgttctttgatttgttaatgctttttggtggatgttgattaggggtgttcatcaaaccgcccgcaccacactgcactgcaaaaaaaatgtggtttgaaattttttgcggtgcggtcgcagtttgaattttttctaaaccacgcggtgcggtgcggtttggaattgtttacatgcgattcaaaccgaaccgcaccgcacattataaaaatactaatttttatatttatttaggtctaatatgtgaatattcaacccaaatcccactaattattatattattgaaacttcatttttttttatatattcatgttcaagctttatggttttttttttacatgtattgctcaagttttgttgtatttgtgatagttaattattggtgatagtctaaactgtagaaaccgcaaaatcgcacctcaccgcaccattttttgcggtgtggttttttagtttcgtggtgcgaatgcggtttggaaaattggaaaaactgcatgtgcgggttggtttgaaaaaatagtcaaaaactgtaccacccgcaccgcgaacacccctaatgttgattgaatttggttggagtatatttccttcctcaattctgttatgtataataattttatatcaatacaacagtttttatctaaaaaaaaaactaatgaatgattaataatttatttatttgtcaaaaataggaaactcaaaaaatattgagatataattttttttgtattaaattaatataatttataatatatattaaaagtaaaataaaataattaaataaataataaaagtgaactaaaataattgagcatactttgaaaaaaaaaattataaattgatttaaaatattatttttatttgtattattactttttattattatatgaaataagatggattattttaactatattatcgaaccttttatatatatatatatatatatagagagataa

SEQ ID NO: 234585 - DNA, 1408 bp, Cannabis indica
aatacaacatagtatgtttggacacaaactgcaaatggagtttaaaggcttcaaaaaatgaaaacatagaaacattcataataaggagctactaagaagaacacacatgtgcggttccaataaaatttggagatcaacgacaagctacagcaaagttgatagcagatttcgtaaaaccaaagttcttgaacctgaaaacaaagtgcagcccagtagacataaagggagaaatgaaagacaaatacggaataaagatgaattacatgaaagcatggcgtagtaaagagcgagcacaaatcctactacatggaaatgctaaaagagtcgtacaatctcttaccaagatacctgtacatgctgcagaaaacaaatccaagtaaggaaaatatttttttttaaaaatatttgttgaactgaaaaggttgtttttgcgttgctaaatagttgagaatcatttgctttaaaatactgtttgattgaaattcgggagcgataattgacatagagaaacaagatgatgatagtttcaaatatgcatttattacattgaatgctgctattaaaggttggccaaactgcaaaccaatcatcgttgttgacggtacattcctaaaggccgcgtatggaggcacgttgctcactgccaacacacaagatgcagaatcgaaaatatttccacttgcatactgcatagttgattctgagaacgataaatcatgggagtggttcttcaaaaaaataaaagaagcattcggggttcgagaagatcaatgcctaatatcagaaagacatgaaagcatcatcaaagcaactaggaaagtgttccctgaaataacacatggctactgcatcttccacctcttgtcaaacctaaaaacaaaattcaaaaaaaaaaatgcaaagcatttcagaggtccattctttgcagccgcaaaagcttacacagaaatggagtttgaatttcatatgagggagctagacaacttggataagagcataagaccgtatttggaacaaatatgctatgacaaatggtcaagatatcattcaaaaaacaacaggtaaaacaataaaaagtagaacatgttttgcaatttctgatatttaaaacattatatttgggtgtttttgaagttgcatataagttgtattataaaatagaacaatgatacaaactctttaaatggtaggtactctaccatgacatctaacatagttgaagcactgaactaagcaaatttagcagcaagggaaacacaaatgacaacattaatggagtgcttgagggcactaatgcaagagtggacatacaataatagaaaggaggcacaaaaatgcacaacaaggctggcaccatcatttgagaaaaactcatagggaactgcgtacagtcattgcgattaacagt

SEQ ID NO: 234586 - DNA, 1075 bp, Cannabis indica
gcaacataaaatgatttttgatctttattaattagtaaatctgattatattgaaatgagttttatttagggtacaaaacccaacaattcgatactagcatactttgccaatgttctggaaagaacataacacttattcaaggtgtaagtaagctttattgctgactatcatattaatgtaaatctagtgcactgatgaatcatgggatattatcttttgaaacatataatcacaattacctttcactgtgttgacatcactgtaattgtgaataattatatgttctggacttaacagatgtatacattaaaccaaaaacatgaaaactatatataaacataaatgatttctaatcttctattgataacaaattaggttgtattgaaatgtgttttatttagggcataaaatcccaacagaatattagtggaaataattaggtgtttaaagtgaagaataaatgcaaacaaatctttttagaggttcaaagcacaccttgtggctaagggctttaatccgagccgatctgtttagaggttcaaagcacatcttgtggctaagggcttcaatcagagcctgacattgattttttagagacgtttagccctattgtaatggcttccataatcagactcgtgttaactattactgtgtcaaaggcttgggctattaggcagttgtatattaacaacatattcttaattggtcacttgagtgagtatgtatacatgaagtagccacaggggttcgatgacaacatcaaactagattttttttttttttgttaagaaaaacaaaatctctctatggattgaaacaagcacctcatacttagtttgacaggataaaagcaacattgcttggttggaattttgtgtgctctcaagttgattcctcttttttcttcttctttctacaagcactctacgcatcctagttcttatttatgtggatgatatattcgtgagtggcaacaactcagaaaaagtacaataattcaccaacaagctcaatcagatttttgctttgaaagatttaggtcccttacactattttcttggcatagaagtctact

SEQ ID NO: 234587 - DNA, 2303 bp, Cannabis indica
ttatcgctgaaaaaattggccacccgatctataacctttcagaactcgatggtactgcgatcagaagggcatggaatggaaaaagccttaagtattattatcaatagtactctcaatgtaattatacttagccaatttattttgataaatattctaagtatagggggtatagcctaccatagaactactttgtactattgatttcttgtcataataaaaaaaaattctagaattctcgacagttcaaattttttgcaagtcttaacatttttaaagttattacaccaagctgtattaatattgtaaaaatagattaagattaagcaagtctgtaaaatatgcgagtacccatgtaccgattaaagaaaacagatagataaatatcctcgaagggatatttatttttcgaagaaaaaggaatgcaaaattaaatttttccaagtacaaagtgtgagtacccgtttacagctaaaaggttcgataaattaaaataaaaacttagataaattaagcagttggagcagtagggagatctgcgaccttactggcagctccatcagcgacttcctccgtatttgcagttttcacctcctaaggaaaaaggtttcctccccacccttgagtctgagtaggcgacatagcgtgaaaagcctcagccatctcagtcacttctactccaagaacggagaagtcgaagtttggcaccttgaataaggtcgtataaatgtagttagaaacagcttgtttgtactgtttcttcccattttccttttcagtctccagatcgctagtcaatttctcgaccttcgactgagaaaaaataggccttagtcttcgcctgctctttggctttttggaggtcctcgatgtctttatccttggagttcacgtcctgcttcaacttcttcacgttctcttggagaagagaattttgcttttttaaaagatcaacttctttggagccagcgacgaacgccctcgagaacacagtcataaactgcgtgaccagttctgcccctagcgacatcatctcctcgctaggaatcgcctcaaccctcgacacgaactcatcattcacaaacttgtcttcaagggtcacgaagtcgcgagctctgacggcagggtcgatcatgactttcttccccttgtcctgagcaagcctaacctacctcttagaagaattagctgtgggagttgcaacaacgtcactcttcctcttctgcgggatgatgggagatgtcgtcgcagttctagccttgggctttcggttgaggactggagcttgcttcaggaaagtcatctctgtggagacaagcattatgataagtataaatctatgttatgttatgttacgaatatacacgatgttttacttgatgttggtcgagaagttagtttggatagacgtttgtctattctctcctttttcttatcagaaggctcctagtacaatggttcccgataaaggctggcattctcagggattagcttatgttctcgtagctttacaatcgtgcacaacaatcgccaatcgcgatcttgaacgggtaggctaccgagaacttcagcgacctctttacgggtgagatccaaaacaggtcaagccggtctatttgcgataaattaaaaaaaaatattaacgacttcataaggtaacacaaatataaactaagtgttgagatatgcgacgtactagggcgacggttggaatttttcctaacccctggtactttgaatacgtaaaatcacttagatttccagtcccccatattggaaaccatgccttctaccctattaatttcagaagtggcccacttgctgaaacagtagaagacattgtcggggcccacactctttatatcataaaagtaactgaagtcctccatcgacctccgagcatattccatatacatcgcataaaacactaaggctatgcaataactattcggggttaattggaagagagagacatcgtagcgtctcaggatatctttcatgaaagggtgaaaaggtactaaaaccccacatcgaagaatggggactgagataaccacgtcctctgtacggataatcgcaggattggtgaagggaaaatgaggcttttaagatgtgcgaggacacatggtaccaagtcccagcaaattcaaccttgtgaatgtatctatgtctgatttggtaactcgcaaggccaggtcctcgcatgagaagggttcgttcaattgggtgttgtcaaccgaatccgtctcacttccctcggcattctctgttgggttttgtgccttaaataaaacctatttcaatat

SEQ ID NO: 234588 - DNA, 887 bp, Cannabis indica
tcctgaggagactccaaaggaacattttctcgggttaaacttcttattgtacttccttaatatttcgaagcaccccgtgagctcaatagtatgacttccacttttcaaggatttcaccaacatgtcatcgacgtaaagcattcttcagcccaaatggcatgaccttataacaataaagtcccatgttggttacgaagcttgtatgttcttgatttgggacatgcatttttatctggtttatccaaattatgcattcatgaatgacataagctcgtgcccagcagttgcatccaaaaactggtcaatctttggcagtggaaagcaatcctttgggcacgccttattcagatcagagaaatctatacaagttctccaagttccgttgggttttgggacgagaataggattggctatccacgacagataaaacacctcgcgtataaagtcgttgaccaacaacttatccacttcctgtttatgtgccccttgtctctcagaatctaagggtcttctcctctgcctctttgctgggtagtttggatcgacatttaagtgatggaagaaaatcttagggtaaatccctaccatatctccatggctccaggcgaactgatcctggtttgcccttaaaaaacttattagctgctatttcaatttctcatctaggttcttcccaatgtaaacacacttcatgggatttcctgggtccagaacaacctcttccagctcctcaattggtttccataaatttctttcatcttgaaccctaggatcaagatcttcatccttcttcttgctttcttcagtcaagactgccattaattggtgaccagctatcctgtgctgcagctatatgcgatagcgttcgcgagccagcatttgatcac

SEQ ID NO: 234589 - DNA, 2184 bp, Cannabis indica
ttttaattttttttttatataatagtttatattgtacttatataacacatcctgtaaattgttgaaaaaattaaaataattttatgcaccagaaataaagttcaaataagggtaactattattttggactatgtgttttgtaaaagttactaattagaccttctgttttgttaaatgacaaaatagaccatatattttctaaaatagttaaaataggactctaagctcaatttttaacaattttattttgtaatataatcaactttaagacaatttctaacacgaacaaatacaaaaaatataactaattttgtcacaatatctttagatcagattattattaagttttattttgacaaaaaaccagttcaaggtcttatttgtacaatttttaaaaatacagagtttattttgttatttaacaaaatagaggatacaattagtaatttttgtaaaacacagaatccaaaatagtatttatcctttacataattattatataactattttattttatatgcacatgaaataaatattttttatattataaatatttcatatttttttaaaaatttggaagatgtattataaccatctagctatggaaacaccaaatagtgcatcactttctaaagcaccctaataacaataacaaaattagtcataataaaagtagagtatttcttcaaataaaatctctagggtttcactctcactcactcgctcactctccaaccaaaacaaatacaataacaaaatttctcgatttggcgggagtccgagaaagtctgctaaaagtctaagaaagtgtgcgactgaagttgagatagggggaacggattatggggaaagacgaggaggagatgaggggagagattgaggagaggttgataaacgaggagtacaagatatggaagaagaacaccccttttttgtacgatctggtcatcacccatgccctagaatggccttctctaaccgtcgaatggcttcccgaccgggaggagccaccggggaaggattactctgttcagaagatgattcttggtactcatacttctgagaatgagcccaattatcttatgcttgctcaggtccagcttcctttagaggatgcagaaaatgattcccgccattacgaggatgaccgcaccgatgtcggtggatttggctctaccaatggcaaggtatctttttttgttaatttgttttgctctgtttggttttcgaggaaatttaggcaaagcttgaatgggtaggaaattctggtctatcgtgtaatcatttcttgggaagacttcgggtcagttcagaattcggaaaaatctgctgaaaaagtaaaaacaaaattaaaactgaaaattaggaagaaacataatgtggaactctttaacatgtcaaattaggtttgaatagctagttcatgttgcgaggtttgagatgtaatagtttagtttggtaaatattatgaatttcaaattactaatatttgtatgctatttttgtttataagtatttgtttctttactgaattattttgcctatattctggatttggaccacaggtacaaataattcagcagataaatcatgatggagaggtaaatcgagcccggtacatgccacaaaatccatttatcatcgctacaaagacagttagtgccgaagttttcgtctttgattatagtaaacatccatctaagcctccattagatggcgcgtgcagtcctgatctaaggttacgggggcatagcactgaaggatatgggttatcttggagtaaatttaaacaaggtcatttgctgagtggctctgatgatgctcagatatgtttgtgggatattaatgctactcctaaaaacaagacccttgaggctatgcagatttttaaggtgcttttatttgtctatgttggctatgtttatatattagattttgggagtgaagtaaaacaaattccaagaaatgctactctcttgttttaatttaaacaaaaagtgaggcttttttctcatagctaaaagtaagagttcagtttgatgtaatttgctatactattgagaacttttacagctagagtagaaaagagaaacctcaaaatatgttttttttttttataaattataagatttttttctttttcaaatccaagttccagacaaagttgttatatatatatatata

SEQ ID NO: 234590 - DNA, 792 bp, Cannabis indica
acaaaaaaaaataaaagctatagaaaaataatatatgaacacatggtttcttatgtggttttgcagttaaaattctgcatactccacaagtcaatctttagatttcaaagaatttttttgagggcctctttcataagagtttttctgtcccctctttcgatcttctatgccactatttataattgcatagcgacagttaattacaaagctgaccaaaatatgtttacagccattattcctaaaatcatgggatctgattacaaattaagccaaacaaatgaggtttttacacagctgttaatatctcgcttttattgggctgagatgaacgcgtaaccaaaaatatatggtaagcctgatctcatagggatgccacgctgagaatggagtcaagataattttgatagcgagcagttgcttatcgtttttcttctcgagactaatattgttttgactctgataactatgctttctggtgtcgagatgatcttcctcgcatgcataccatcttcgagcgagataagcgcctcgctgtctgttatcttgactcgttacactatatatactcagtttgtatatcgtacaatatacgctaagtatttttagtgtagccgttttctctttcacgcagcgaggttgatgcctcgtcatgaacgcgtgtacccacatgatttctcgtcaatacataagttaacaatttgtacgtttctatctcacagaaggctattcagcgagccaagttaataccctgcgaattatatttctaacgagttgttccatgctaagtatact

SEQ ID NO: 234591 - DNA, 830 bp, Cannabis indica
ggagatagataattgagtttgaacatcaaaaattaaatcttgaaaagaagaactttttgatgttgatttgcgaagagcattaacgagaatcaaggagtccgtttccaccatatcgaccttgaaattaagttgtctagcccatttgaggctgtaaaacagtcccttggcttccatgtcttgaggacgacagcagccatcaatagggtgagacattgcagcctttacattaccagtagagtctcttataatagcaccgaacccaatctgttttctggtgtcatcaaaggctgcatcaacattcaattttaggagattaggaggaggtggagtccatgctttgtgtgcggttggagtgtcagctggtgccaaaccagcatgaagagaaagctgctgggccgattgaaaactgccaagaaaagaggcagctttagcagaaataagcgaaggctgttgggtaattttaccatgaagaacattgtttcgatcagaccaaatagaccacatagtgcaaaaaatcatttccaactcagatttggtgtagcattctgatatctgaaacaaaaaatcttcaattttcattgaaacagcagctttgttgttaaaagaaaacccagcaattttccacacatgtcgagcatgtttacaagcaaacattgcatgccccacggattcccaagcattgaggcacaaactacatgaggcagaagtgagcgatttcctcttataaagctctgaagcaaccggaaaagcattatggatagctttccaagcaaaaagcttcactttaggaggaagtttgagctgccaaaaggacttccaccatgaaacat

SEQ ID NO: 234592 - DNA, 1202 bp, Cannabis indica
actctcctagaaatgcatattttgatgtgtcaggaaatggtttgagatataactttagtggctcaggagttgacgcaacatgctctaatggaataaatagttcaattttagctttccacttttcagtatccattagaggtgtagactcaagcaaagaattaacatcataaatagaatcatcaacatttaagcacattccaaattataagtttcaaaagattcattcatgtcaatttcaaaaatattttctttgttaatcatgttcacttcatgtatttcttcacactcgatagatttagcaacattaaaaatattcaattcaacagtcatatttctaaaagataatttcaatgcaccattacgacagttgataattgcattagatgtagctaaaaatggtatacctaaaatgatgggtatttgagcatgggcattttcaacaggttgagtatcaagaacaataaaatcaacaggaaaatagaatttatcaactttaattaaaacatcttctataatacctctagaaattttcacagaacgatcaactaattgaagtgttatagaagtttattttaattctcctataccaagttgcttataaacagagtaaggtaatagatttacactagctcctaaatcaagttaagctttgttaataaaatgatcatcaataatacataaaattgttggaaaaccaggatctttatatttcacaagacttttatattgaattatggagctaactttttcagttaaaaatgccttttttggaacattagtatttattttaacagtgcaaaggtctttcaaaaatttagagtaggcacaaatttgtttaatggcatctaagaattggatgttaatacttgtttgaaaacttctaagatatcacttattggttgcctttctttaatggacgtaatctttgtagaaaatgagcttttggaatggaagaaagaatttgatgattatctcttgacaagttatttatgttggaactttgaggttgactttggtctttttcaacttgaggtatgtaatcgagttttacgatttgttttttggacctaagagttgaaatagacctagcttcttctttatgactaggaactcctacttcatattggcctttaggatttgagatggattggctagaaaatcttcctttttctctttcagttactgttggatatttattttac

SEQ ID NO: 234593 - DNA, 1238 bp, Cannabis indica
tcgattttgaccttagataacttgtttaatttttgttgggagtaggataaaagggtaaatttcctacagtggtattagagccaaacaaggcaggaaagctacaatagaaagcaaggaagaaatcaagaaaggatccagaaaaattcggaacaccaagaattcaaatatacattacacagatcacaaaatcaacatcaggacttttctaaactcataatctctataatttcttgaaacaactttatatataattatgatttcaatgaaggttgatattgacagatttgatggttcaagtgattatcgaatttggaggaagaagatcagggctctattggctcagaataaattgctaagggttttaagtgaccctgtggaatggccaactgacacaaccaaggctcaataggaagaattgcttgaaacagcaactggattgataattttcaacctatatgattctataatcagattggttgataaagaagacacacctgctaaaatttggacaaagttagaataacaatttcaaaagaaatcattgatcaacaagatttacttaaaggaaaggatctttggatttaaaatgagtcaatctaactctctggaacagaactcggatgagttcttgagattgcatattgagttagcaaactcagggaagaatgaagccttaagtgatgagaatcaaacaattataattctcaattcactgccagaatcctacagggaagtcaaaacaaaattaaatatggaagaactgatattactcttgaagaagtaatctcacctctgaaatccaaatatttggagctaaaggttgaaagacctggacattctaatggggatgtcaacctgagcaggggaaggcctacacaaaagaaaccatggcaaagcaggggcggtagcactagtagaggttctcagaagtgaaataatcaccacaacaaagggagatcaaattcaaaaggcactaaggatcctaatgggtgttatcactgtggaaagctagggtgtttcaagataaaatgctacttctacaagagaagtaatggaaaattaagtacagatcatcaagaagaatcaaacaagcaaaataagactaagaatgactatcaaaatgcaaacctaagtgatggctacgatagtggggatgtctatgtggctgcatcatcttttaaagatgattggatcattgattctggttgtacattcatatgactaacaataagtcttat

SEQ ID NO: 234594 - DNA, 2407 bp, Cannabis indica
agggatcagagagcacaccagctggccttcaattggatggtatagttaaagtgccatatccagtaagggcagtgttgtcgttacacccatattttagagatacagtcgcttacttcgggatgtgttcaacgcaaatcaccctgaaaagtattaaatacctctcaacaattttgtgctctatgcgaagctaggctgacctcagcctactctgtacgagattgggtattattttgatttaaagtctgctctaaggcagaactatatggggtacttctacttcagttaggtaggccaccaatggttgggtgacaccaacaacacgcctctgtcaaaagtaggtggatatgcccagaattacttcatagcctagaatgtctaggagattcgacatcactgcttccagggagtgcctatctacaagtgctctccccctaacctacagatgagggatagagaaaaccacatcctgtccttctttgtagtgaagaggaacataataaggttggccaatgtagccaaattttagaagtacggcttgtatcctcctgttttagagttgtaggggtcgagggcccattatgtggtgtagatggagctaactactgaggaggtttgcgcaggtggtgggcatgctcctaacatggatgatgatgtgcctctatctcgaataccctagggtttggaaaagattgaaagagcccactgccagcgcttggctcgtgggggcacagttagggatgctactctacagattaggcctggaggctagagctttgttaggcctactaaccccttaaatccatttagaggcaaggggaaggcagccgttaaagattcaaatgattcctcttccaaagatgattgtatttgattgttgattgcaccatcttttatattcttggcttgcattaaatatttgtaacttgtactctgactttgttactttcttcttatatatatatcttctagatttagaggtttagctggtggaccttcagatgagcctttgggtcgctcgagggccaaggtggcctggaccccctattgtggtgacaccgtggggtcatctcttcctcctcctcctcatgggcctgcgctagctgggcagcccatgatagatgaccctcctgtgaggagggatcgacctttgggcaggggctcctagaaacttagtcgggaagcaggctcagctgtggggtagagatctatggagggagttcgtagatgccttgacagagcttttcctactgtggatagtgaacataaggagcttggtgacggtgagtcggagaggctctcttctgtcgatctttgggagttggcctcggtaagttgcacatttaactttactcaatttttgtgttatcgtaagctggccggccatagggattgttgtatgaagctggtcgaccattggtagtgtctttgagaggctggttggccttggttgcaccatagtggggctggcgggccagtattttcttctggcagtaatcttgtctttgttttgtttttaggcctttatgaagcttaaattttttccatggcaactccagggggtcctcgagtgctctctgagagcaagtaaagaccatggaggctgatctcttagcgaggggcaagattgtgactgatttggaggctcttggctaacaaaactaggacatgaattctggtttagaggtcatgatcggcactaggaatcaagagaataacttgctcgctgctaacaactctaggttaaggactgaactcatgaggtgtgaggagaaactgaaggctaccctcgatggccagtaggctataaaggacgagtacgtcagcttgtcttcagagctcatctacgagttcaatctatgaaaccccaaagctaatctttctcacatgggggatgtttctttcttggataacacattggcccaagggaaagcactgtttgaaagtaggttggagacagattagattactgtccagccagaaggatcatcctcggggcaattggatgaggagatggctggcccacctactgaggaggtggtcagccagcctacagaggctatggccgacccacacttcagcgtttcgaactctatagcttctaattcaaccccacttgcacctacacacatgtaactttaatttatcagtatttcagctttatgatttcattagcatagacattttatttcatgttaagtatggccaactggccttttacttttgaacactacttattttcaaccttagggcattcatgttcgtacttttggccttttgaacattactactgtttagccttaaagctttttattatggatgtgtaaccgaccaggcagtctttaattctgactatcttcttaattccttgacatgtaagtatctagatttactttttttatgctaagct

SEQ ID NO: 234595 - DNA, 1051 bp, Cannabis indica
gattaaaaataatttattatgtcaaaaacaagattcaaacattttgtttccacacatatttatttgtttgatttttttatgcataggtgtgtaattaactatttcgaactttgtttcttattttaaaattattttttttttttcaaaacatgagatatctactataattacaatataagtcatcatataaaaaaattgggttataatttctatgaatgtcaaaccaaaaatataggtacttttattggtaggaacaaaaagtgatatgcctcctatatatttatttacttgtgcttctacatccacttttcttaaaaatgtgtctattggtacacttttacttatgagtacatagttataaatagtgttgtaagttcgtgcgtatcatgctgacctgaactatatttatctgtactttcaaaaaataagatgtgccgtgccgttttacagaaaaatatgagtcgtgtcatatcgtgtcaatatttttaaagggtatgctcagcacggcccataggctcgatattttcatgtggtactcgaattcgtgtcgtggtttgctcgtgcttgcccgtattttataatcaggctagcccatcttcatatcctagcttaaattcgtcctttattttttcatattttttttaccattattaaagttatgtatattttatagctttatttatatttatataactttttaataatattctatagataatcatataaaaaaattattagcgtcattagattttgagtatttacttataaattaatactcaaatttttatatcacattctataaataaattaatatataatattagtttttatattttaatagttttaattataacactataatatttagtattatatttaagttttattattattgtaatttatttataattaatacattcatatcttattattattattattattaaattataagatttttgagtatgtcgtgccgtagtttttgggcttgtcacgtgtcatgcctttcgggctaatctatttgtacttatgtgttgtgcttttcatactt

SEQ ID NO: 234596 - DNA, 1725 bp, Cannabis indica
agcaaaaagtttaatgtttgcttattttgaattaaaaattctggttatgagcttatatgtatattagtgtatgaggaatggaaatatgatagctagtatttacaatttttattttttatgacaataaaaaaataacaaaaaagaaatcacggctaataataggggaaaataacatgtataaatcaaattattaccttacaaaattccataattttttcaaacaaacattactttatctctgtaattctctctctctctgtgattctcctccttgatcttctatctgtgatcttcaattttttattgtcaattttttttctcacgattaatcaataatcgagtgttgaaaacatcctcaagatctgattgccatcgccgatcatcaagaacaaagccaaattgaaaaacaaacaatggcgaaaaacaatcaacatcttaatcttagcaacctgcaaatcacaaacgtaaattaataaactacacagaaaaacaatcaatgaaaaaaaaatcaaatacaaaaatattactaaaaaacaaagcagcacattcattaacttcaaaaatttacataatcttcgcaacatgtgtatgcgttcttcacaaaaaattacatatgctcagataaattaaaatatgaaatatatataatatctgaaaattgaattagaattaaaatttttaatttcaatatatatacacacttaaattatactattcaaaatataactgttaatttagtggtcaacagaatatggatacttattaataataataagaataataaaaattgattataataaaataaacatataataaacaactagttacggataacaaaactaataaatagaaccggttctaaaaattaataattatctggttttataaattaattaaatcaaaaatcaatttcaaaaataaataattcaataaaagtcattagtatcgaaaaagttgctgaaaaaattaccgacattgaaaaagtcaccggagttagatgtctcaaatataaacgaaaataaaatcaattctatcacataataaataaatgaaaataataataaataactcaaaccggttataattcaaatagagccagttttataacataatcaataaaaaaatagcactaaataattcaaactaattataattaaaatagatcggttatataacagtcttataataaataaaaacaaataacatcaaataactcaaactggttataattaaaaaagacggttctataacagtcttataataaataaaaataaataataccgaataactcaaaccggttataattaaaaaaaaaacggtgctataacataatgaataaaaataaataacacagaataattcaaaccggttatcattaaaagacaaagaagaaatcaaattcctaaagcacttaatataaattaaaaacaaaattagttccacaacaaaaatgaataaaaatgaataacacataataacctcataaaactgtttataatgtttttcttatgaaaaggtggagatcaattctaaaaatacagaggcataaatattaatagaaccggttccataataaataaataaaaacaaataataacagacaaagaactcaaaaatataaaataaatgaaaccggttatatttatattgaaaaaataagattaacaaaataataacacacaattaactcaaaataaagacttttgttaatgacttagagaaatg

SEQ ID NO: 234597 - DNA, 1054 bp, Cannabis indica
gaatctttattcaaaactagcaacaacaatacaaacaagcaagtcacaaccacgacagctgctgcaaagaccccagcaaccccaaccacaccctattaccaccctttaattacattcagtaaatatatatttttgggacaatctttaaagggacctttactcaaaatccttagccaaactatacctttaacaaccaaacttatgctactgggagaagagcatatcatttcacagatacatctatttctactcctccaagttttcgtacaatgttgctgccataacagtgttaataattctgctttggagatctcctttccaatcacagcacctgctaatcacctcagccatgagcgaggccaatgaaaagaccccagtcacttattgatttcagctcctaccttcttagcgaaaatacagctgtagaacaaatggtcatgagattcaacctcttgatcacaaatcggacaaagctccacctgtatatttatgatcttgctcaagtagtctctagttaggagatgtttgttaacaacctgccagtatataaacatgtgtttcagcacaatcaaattgtcccaaacagcacctgcataatccactttcaactcatccacaagcaagttataacagttttcagcacaaaatttccctccagttacagtaagattcagtttggtttcatctattttgtcacggagactcatcactttagagaaataccaactaacatcaagctttttttagtagttccagacatcttggttcttcaaataaatggaggtaatccatttgacccacaagctatcttgcttattcgcaagggcccaaaggaccttagtcataagagccttgttccacattttgccttctcgaaaaccaactcctccaagctttttgggaagggaaaccttttccccaggaagctctgtggagcttacttctattactgttgataccccaaaagaaatcacgacaattcttgtcaatagctgctgaaacttttgagggtataattaaaatactcatctgaaaattccttattccaagtaag

SEQ ID NO: 234598 - DNA, 3324 bp, Cannabis indica
atatacataacaaaattaataaaaattgtatataaaaaaaaaagaatatatatttaactggtattgtaactaaatatttgtcatgaattaattttatttaaaaaaattaactaatgacccataatgtgatgactctgcaagtgtggaagaatatctgtcgcccactcttctctcatctcgtcaatcatagcttttggatatggctttttgtctattagctacaaaatataaaagagaaataaattaactatataataaatataaataaaatgttaatttatatttgataattattttataaatatttatgtacctctttcttaatatagtcacgtcgattaggcgattgaactagatcttttctcatccttataaaataatagccacactctacattacttggttgatgaggacactacaataatttataatttaaataaatacattaattatttattaaaatcgtaaattattattgaaatttacatatacttactacgagttccttgatacttaagttttttgggatcttcatgttccctctcattaagtatgtgtcatatgcttccttgatcgtttttagaatgacaggacgatttgttatgggtgcattaagagggtctaagtaatatacgtggtatgcttggggtaccaatatagcacacacccaatgcttcctataagaaaaataaattatgtatattgaacatatattatactatcatgctcataatatatatatatacttattaattaaacttacccatgattccaaggaacaaccatgaattgttgttggttgacaagtaaaaaaaaatttccaccaagaaactaactcggtcgtcatgcttagttgtcaaaattgcaacttgatttggatttacaaacatccacaagtgttgtctattgttattgacaagccaagtatataaataactacataagaaaataatattcaaatatagttagctaattttatttgtcaaattaaataaataaacataaatagattaagtttgatctatgataccttaagtagcagcaaatcacaccctgccctattttattctctgcaagaaactcaaatatatcatccttttctatgaaaaatcccgtcatatcttcgtgaaatacagcgtttgagattatcacatctgcaacttctcctttaggccatgttgatacaatttcataaattgctctcaaattgtgtggtaaaagttctggttggatattctgtgtaagagatcctttctttggacgtttttatcgtgattgaatttgagttttaggttgtgtcatagaacgttttgatttacttttctttgtttgatttgggttgcttagtaaaagttcctgtaaagcatgacaaagattattttattagtacatatatgtagtaaagtattgaatgtaatataagtataagtttacctcgtcagtccaatcatcatatatgatcaagttcttaggccaagatataggcacaccaatagcctgaacaatagtaaaaacttctgcttcggggatagctttaggtattaaagccactggattcagagcatgtttgattatcactcgacaatataatccggctagcggcaatgtatgaatagtggattcccctgtctccacttgtaatgcgaatgcaacaatgtgatcaattgatccaagtgctagccgacatttacgctcctacaacattaacatatacaaaagggacatataagtaatcatgaaataataataaaaggaatactttagcaaaagaattaatacctgaggcgttgacagtggatagtctacaggagaagacatcggaacatagaaatcttctacatgttgttgtggtggctcaggtacataggtagatccactataactttgttgctgtggattttttcttgttgcttcaagcattgatttcaccaactcttcttgttgacgaatacgctcttcttgttgacgaaatcgatcttcatactcattacgtattcgttcttcttgctcatgcattagtcgatccaaatcatcatgtccaactttctttttgcctttctcttttttggatgtaggctgtggagtgtgaaaatattgagtgggggttactccataacccaccccacgaacatagcctcgtgtctcaggattgcccaatgccatagtcagcacatcatcagaaccttcaggttcccatttaccctctacttctagttgtcggtaatgatcctgccatataagatgcatataagttaattaatttaaataattgacaatgatgaatatcatagtatgcgtttaaatttattttacttacaattctttcttttacttgtgatgcattaccatcaagctctcctttcttgttttttcgacctaatgccctaaatcagctctatccaatttagctgctttgtccccaagcaactctctagcacgttggtatcctcctcttgataggtggtggttatattcattttttgcacgaagagcttgcatcttctcccttaattctatccactccggagtcaatcttgaattaacaaatttaacccaatcctcttgtgtaatgacaccctcatatccccttggtcttgttggtggaaattctcctggatttttctccaatttcttgtgcacatgttctcttgtaagatttgtcttataatctttatatcgttttcttgcttgttgcaagaattgctttttatgttggggttgtaatttaaacgtactctgcaaattaagaaattgtcaaacacatatagaaaaatattatcaattggaaaaagaaacaatgaagaagtgaatgtaccttcattatttcccatatttgtgtcttatcttcttttgggaccttaaaccaattctcatgaagaattgatacaattctacgaacagtagatccaagcatagatgcaaagctcaccctacccgtcccaaccaattgacctctttcattatactcaactggtattagatgtccctcacttctacatctattaatgtttggcaaccatgatggtcctctaccagttggtatgctaccatggtcctcatgttcatctatatctatattctcattatcttcattttcctctatattctcatcttcaatttcctgtatattatcatcttcacttgaattttcatccaaaggatcataagatgacatctgtataataacatcataagtgaatgcaaaacaacatattaattgagaataacatggaacagaataatataggcaaccatacaaaataagtttgccataatcaacaataattcaaaaatactgaagtgttacaaaaacaaacaaatatt

SEQ ID NO: 234599 - DNA, 1026 bp, Cannabis indica
tttattatgtttgtatttggaacaattttatttgtgacacatatattagacattttggttgacatatacgaattatattagatttaatcaaaattttatttgtgacaaataatagttattatttgatttaataattttattctaaaaatattaaaagaaaataaaaaattaacatcaacaaagtgttagcattaagaaattgtaacattaatcaatagttattgttaagcaattataacaacaataaaatataatattttttcatatataacacaataataatgtaattaaaacttataagattacattttgaaaatgttattagtgaatgtaacataatgaactaaattaatgttaactatttataatttataacactaaaatattgttataatatgctatttaataatatgtgaaaatataattacataagttgtcttaacagttactaaaatgttataaaatatatttaattacactttttgagtgttattgtaaatattttttcttgtagtgattttctccctccttaattgtatattcctaagtgttgaaaaagaagtcattttatagctttgggttaaaaccctatttttcatcagattagcaggtgggccgcgactctacattgtagtgtcacggtctgtgtcctccaagcacaaattccccttcaaattaacttcacaattttgtactttattaaacatgtaatcataattggtaaatttctagcaattgaagttggtttatactttatacatactaaatgtgaaatgtggaaagttggttgacaaaaattttagaacttgcttgcttacttattgaggtgaaatgataaattatatatgactaggaaagtgatttagtcaattattggaccgattgtgcctttcaagccgagcttgattaaatttttcttagttaccctctttgagcttaaagatatactttttattgttaaacagttgtttgagcttaattgaacacattattatttattggttcctagatttgtatcatgagcat

SEQ ID NO: 234600 - DNA, 1208 bp, Cannabis indica
attgaatttgatcggttactttttagggtcaaacaacatccaatctgcacaagtacgaattttaaatttttcaatccaatccaattcgcaaaaagcggatatggaacttgtggattggattggatcggatagtttatgaacacccctagtctttattaacatgttgtttatcataaagacctaattcatatcataacgatgatcaatagttaatcaacataaatcctgagttatcatgaactcttgttcatgttattaggttttttgattcacttattaaagtttctcaaagaagatgattattacaacttctgttttggaaatctaataatatggatggttgggaacatgatgtacaattatagaatcctgactttcctaacagatcgaatgttggttccctttttaagtgttaattttggaagtgaaatattgtgcacaaattcaaatgagatcttgaattaaaattctactagtgaattaatggaactaaaggataaagaagtaattagaaaggtaaatggtattttgtccaaaattaattacgaaccaacacatggagggctaatcactgaaattgattatatcaatggacactgcagttaaacttagtaaatataattccataattattaagagtgcaatttcatattttgcgtaattatggcatatctaattccatatgtaagcctagaaatttaaaattgccataaaaagtggccaaatttaaatataccatatttaggtaacaaacttttaaaaattcgtgtaaattctactacaacataaggttgtttatcaagccgctcaaactgcctgcaccgcaaaaaaaaaactgtagtttgaaattctttgcaatgcgatgacggtttgaatttttcctaaaccgcgtggtgcagtatgctttgcggttttaaattgttaatatgcggttcaaatcgcaccgaaccgcgtattataaaaatactaatttttatatttatttaggtccaatatgtgaaagtccagcctaaagtcctctaattattgtattgttaaaacttaatttttttttatatttattttcaagtcttatggtatttttgataagtgttgctcaagctttattatatttgtgatagtttaattatttagtgatagtccaaaccgcaaaaactgcacggcaccgcaccatttttcgcgatgcgatttctgtagttttttagttt

SEQ ID NO: 234601 - DNA, 822 bp, Cannabis indica
gggcataaaacccaacagagagtacttatgttgtttggatagcttataggtttctgtgtttaatgtcttttacatgtttaaatttatcacgaaagtagaaaatttatatgtgattgagatttatatatttgagaagactataaattactcgagtaaacttgttattgcatagaaagtaggaataagaattgaattatattagaccataataaatagatataatggaaattaataacccaagttctaatcattgttaattcacacattaatttacttgttttctatttttattgcttttagttttaattttttattaaaattttgattctaccaatagaagtaaaagtataattttaacgtacttaagtacaatttatgtgagttcaattttatctgtgtgagtaatacttacaatagatacgtacacttagtgttaaaatatccacaacaacagtagaacactcaaatgtttcgttcatgcaaatagctaggctagactctatttttcaatattttattatatttttgtttttaataaaattaaaggaaaaagaatgaaaaagataaaatgtagtattgataagttaattatggcataaaaaaggcccgtaaaaaaataaatagaataaaaacttatattctattaatattatttaattatattttaaaaaagtaaacccgtaaataaatttttacataattaaaatggagaagaatttactgtgaattcaaaataaattactgaacatatctttatatattaaaagtgcctatctaacgacatttcttggtttaaagatacttaaaaataaaagaatattc

SEQ ID NO: 234602 - DNA, 621 bp, Cannabis indica
ttaataataaaccattttatttaatataaataaaaagtcacccataaatttctcataaactaagaattctgttatatagacacattttatatagaatagatataagatgaaatgtttttaaaatgtatgtaaagtaaatacaagtacattttataaattaatttatatttttaattcatttttccaaaactcaatctaataaaatttgttttaacttcattaaatatacttttttttttgtaaggtagctttattaaatattattgattcttataatattatttataaataatattttatataatttgacatataatactgaatattacgaaaaaatatatttttatattttgtttaaaaaaataaaaatcgagttacaaaaagtcttagtgcaactcatccaattaagaaaaaagaaaatagtaacccgtcaaatgaaattaggttgatttggtcgggttataccccgtccaaaccgaccactaatgctttttttttaattttttatttatatattcaattactatattttagctaattgtattaatgagacaaatatatattgaattcaaagttgaaatcaactacttataaaagaaaatactaatttgaactttatat

SEQ ID NO: 234603 - DNA, 1538 bp, Cannabis indica
tagggttatgatcgggtgtatgggcgccaggttataactcgggatcttagtatgttttatattatgcctttcctgctgagtcagtcgactcacaatgctattttcttgtgtaggtaagggcaaggctaatgctgaggagccgtgagagcgagcaggtgaagattgtacatgtcggggcggttaggcctggagtgtacgatctttggaacatgaaggcctttttctgtatagtcgctaggcgacaaaattagttttgtatatgtatagcaaacttttgtaaatgtattttgtaacgggatcccgaaattttataatgtaatactttatgttattaattaaataagtaaattttaattaatcatatttttcgttaatctcgttgattagcaacgagctgcacaatacgtttaaaatcacgctaacacgcctaaattagttagggtgttacatcactaacaagccctaagcctatataaagatagtgatacgctagggttaaacggatgaaaaccttgctagagacaaatccttaagagattgaaagtcttctttgtgttttaagagtttccaaacttaaagaccattgaacagtattttgcatcttcttctttgtgttctccacaacaccaagcttccattgacaaaaactatcatcccagacacatttctcaaggaagtgagaccattttgtcttttcaatcatcatccttatcagatttatgaatgctgggtctcccatgagccttgtgttcataagtcttgatacagatttcacctagagatcttttttttactatcatccacacactcttgagaacataactctggtgcgtcgagtccaaataataaaaataaagtaaacgtagccccattaccatcataaaatgggcagtgaactactaaaaatccctcgtgtctttcttaattattataattttatttagccaaatgaattcatcgcagtcctcttattttttacgatctctttaaattagttgatgaaaaactgtcaataatatatatacataatatatcaaagaaaatatactataagttttttgagagattagttttagggttaaaaaattattttatttttcacacatcctctctctaaaaccctacatgccactctctctctaccccttgcacacaccactctcacctttgagtgcggtgtgagtttttctctatctcaatcacaatgtcgcgtgagttgagaatatgatgtgatcacaaaatttgttcatatatcaaatttatatgctcaatcttattctaagtgttgaagctggtctggaagacgtttcttcaacaagcctatccttagattggatgtttgaatttttatacgaaaagttgcaaggaaacactgataggaaataagaggtattttcctattttaattagttagatttaaattatgtaatattatgttgagattcagggtttaaggttcatattggattcaacaaaataatttttaaactctgaatccaatttctactctcgttgtgtgactctgatatgaaccctaa

SEQ ID NO: 234604 - DNA, 816 bp, Cannabis indica
tcaccatcctgaaaaatgtccatagttgcacattataaacaacacttaattaatttaaaaatagatcaatataaattatttttttgacatgcatgattgacagtatataacatggttacacacatagaagattttctacaagttgtcaagaaattcaaataatttagaactgaaattatcattcaaatatataatgtgttacacacactaataaaaatatatttgaattctgataatggtgaaattttctaaatatttgtagaagattcatccagaccatctatctgactacattatccaccatatcatcatgtggaaaaaacattaccaaaaatactaaaagtgactataaattgttagtgatttcttaaccaataatttttaaaaatatattgcagatattttgtatatatatatagtttagggttttgtaaatacctgctggcgtataactggcttcttcacgggttgatcaggcattagtccgagatggatatgaggataatgggcccactgaaacaataccaaaccagaaataaatccaagctatatatatacatagagctagagactgatccaacaaattaacacaatgataaaaaacgatccatggaaaatattaccaactagatattatatatatgtataattaatcatggctattagttatatgttttaattaattaagtaatggtgaatcaattgtctcacattctttgcagcagcactaaaggcctctctgtggcttatatctggatttccagctttgatacgttggatctcatctctgcacaagacaatataatatccttaaaa

SEQ ID NO: 234605 - DNA, 710 bp, Cannabis indica
gaatcgatggagactgatcattcgtcatatacatataataaaaataaaataaaatacaaccccaatttaaaattaaaaataaaacaataataagtgtacagagagagaaagagagttaaaatgagagaataaagagattatagtaataagtactcaataattgtataataccttattaatttcttaattttttgaaactacagaacaaacccaactctgtacgctgaactttccaaaggccaaagccacactgcatggaattggaccaatcaattgatcagaaataaaaaaatacaaactggagaatgtttaaacccaaaactaagacttctttatcttaatataccaacaacaaaatattccttagaatctcacatagccacaaacgtgattatcaggaaaaaaaatttcagctgggaaaagggtcaaactgggacttcgtaagtgagcccaaaatcccagaaaataacattataaagcacaatagtatataagagctagcattgtgttcctgctaacattgaagcttaaatagaagaagaagaagaagagaagagaaccagcctgagcgatgacgaggacaggagactactgagcacgaaccagaccaccgtgggaggcgaagagagagcgatgactgctttgggttgggcagcctgggctctgtcgacggagagagaagtcgaaactgagatttaggtttagaattt

SEQ ID NO: 234606 - DNA, 1281 bp, Cannabis indica
gcagaaaacctatcctataagtgttattctcacacgaacattcaaaacctttatcaatatcacatgcttataatactaatatatataccaatcaatgatataaaatatcataagcacatgaacatcaaacccacaatacagtcatatgtttcaacatacaccctgtgcacagatgtccactcttcttacttcagttcctcagtatatccttttctctccctcgaacttctcgctgagtttctttgttgagaacaagatcgtaaatccaataacacaataacacttaaaagatattcaagcataacctaatattacaatgaaatcttatgtcaaactacacaacacattggtcaatttaacttgcatgacacatcaaacacaatcatttatcactatgatccacactaacacataagatgtactcaaatgaacatttttaatgtgaaacatgaactcatacaaatattttttacgtgaaattttaataaaataccatttattaacaaaatatacaaatatgtaattatttaccaaaatcagaagctaacattgttttggtcaagaacagtcatcatttgttttctctgtgagttctctctttttcagttcctaatccccttttcttttacgtgggttacttttatttatacgggacgttcttttgattgcatgggtaacatgttgtttacctactctcctcttgacgcgtgtcctttctttctattccttccaccttgctacgtgtctgcgttttagccagcatctatttttattattgctctctcttggtccgacggtgttatatccttctaggaagtgcttatctctccctttgtagattatatctcttttctccgtcaagattcctgtctgatgcggattgggtctcctcccgtcggagatatttgtccttactaaggctctatcttggtgtttttccttattacgttctagggacaagtcttccgtcagtaggttggtcgagggactccttttgggttcttacctttaatatatccttctcttggcccttattctgtcagcaaactttggttctagccctccatctcttctttcaattttcgtcggtttttacttctcttttttgtcgttagtgctttttgttcgtatctaacctttagggttcttgttgggctgcacagtgttgggcctttttaatgtacccggacttcggacttttgagtacccattccgtttgggccttttgatgcttttattttgttttattgggcctttgttctgtgctcatattttcccctc

SEQ ID NO: 234607 - DNA, 811 bp, Cannabis indica
taaaatatattccaacagttagtacccacactaatgaatatagcaagggtacatgagagtcctcccctaaaaattgcttggagagttccccgtcggaccctacatctggaagcaagatcctcagggaatattgctctaggatgatcaggtcgagagcacatgaattgatagaaagctcatgaagtatctcatacaaaattataagggtcccagacaaaggaatttattcaagctatgcttgcgcaagccttgttgaattcacccactcaacaataatgcgcaacaaagaaaaaaaaatagggagttcaaaaaacctaatattttctacaagcatagcaaaaacagttaactatgcctatctcagtgaacattcagatcactctaacgaggacaaaacctaaacaccgccagacatagcaaaaatacaaacaaaaataggccaaacatacccaagcatgcgtaccaagtaattcatctaccctacatagaacctactcgctccaagttaagtggcaaatgtaaaagggtaaggaagtacttacatgttgaaggtgaaggttctaaaatggagacttgtatgtcatgctcatgctgatttaaaggcacagcgggaaggaatttatcgagacaccagagtctagactgaagggtacgagcatgatctagaagttcatcaacgttcgtttggaaacctagtgatctcagtatcctgagggatctatgttgaggtctggggggtggtgcatctagatttaatcgtgaacataattgaaaaagaaggtgaagacactcgtttatgtaaatggacatt

SEQ ID NO: 234608 - DNA, 810 bp, Cannabis indica
cataactcaaatgaaataagcagtaaaaatggcagtatacgcagaacaaaaatggacagtaaaaattgcataaatttatttcctgtcccttaaaaagtaatctctgagactaacataaagacaaaacaattgtaataattttttactgatgagtacgaaacaactcaaataaaaggcatataaatatgtatatatcataagtcaaagaaggtattactgagaggagcattgtgatttgcagaactagtgatatatagagatggaaatcttatgattcaaagagctcaaaattcagaacaacaaataatgccctctgtttcaagatgctaaacagcggccagtgaccatcttcacaaaagctaaagtgatggagctttaaacagttattcaatggaccaaactttcgtacaattacaacattcaaaactagggaaattttcatagtaatgctagaagcataaaaaaggccatgacagatcttgatgttgatgatgttgccatgttgaaaagagaacacaatttcacaattaaactaaattatgacactttttcctcttggcttgctcttgaacccaacaaacaaatcctacactctcacaaagtggctatagtgtttgctccaacttagaaccaaaaagaaaaaagtaataaggtatattctaaaacagtatcatagataacccgttagtcaattacatcgaactcttgaatgaaaacgataatgaggcatttcatcaaaatgtacttcataaccattgaggcatttaatcaaacaggtaacagatactagaaaggcagattaatacatac

SEQ ID NO: 234609 - DNA, 683 bp, Cannabis indica
gtatttcttacagagaatgttctatgttctttttccgatcccctcattaatttggttgaggggtatttatagcgattggtaggaagaagaaaggtcttaattgtctttaggtgccatccttgggcacgcacaagttcccaaatgtataaaatagggcatgcacaacctacgtagtaggctgcctaggttttaggtgagattagccttcatcccttcttgattgatgtaattcttcataatagagtcgtcacttgcacccttaattattgtgtaatcgctaaaagacgggtttatgacatctgacatgtcctcttatgggtgttcctagacgcttcctccatgttgcatcaaatgcaaagtgacagtttatctccagtttcgctagtctagaggggttcatacgcccgtcacctcccggggaggaagtagggcagttcttccgacatccaggaggttgctcttagactagttaatggttcctttagaggggatttgtttaagtactttgctcatctctaggtaatgagtcttactttgccacatgtcttatgctgagactgccacgtatattgggaaaaacttggggcaacatttaccaccaagtcttatttagttgtagataaataagacttgtacattatctctagcctcaatgaactctgtgaccatcattccctgtcttt

SEQ ID NO: 234610 - DNA, 751 bp, Cannabis indica
gaaaagagcaaaattacaatcaatataatgaaatactttatcctaaaaaaactatctaaatataattgttaatcttaattacacagttagactcaaaatgaactgctgcattttgtatataagcaccaaggcttttacaaataatttcaaaaaataaataataaccccactgaatatcaaatatcagaggcaataattgtagcaataattgtatggaaccattattaagatggatcaataatttcaaaacgtgcttaattaattaaaaaaatcttatttaaaattaattttgaataagtctaaatttaattatgttgattagatatatgaataatttagagggaaatttttaaaagtattttttttttatttataattttatagtctaaaattttttaattataaaattacgcttgtaaagttttaaaattataaaaatatactttgctcagcaaaaagtaaaaaaaaaaaataactaaaaaacaacaagaaatcaacatcacggcaactataaattaaatataaaacagcaaaaaataaccagaaaaataatattatgatagttataatacaactataaaacaactaaaaaatggtttattagttttattgaaaaaatatttttataaataaaaaaattcaaaaggtaaagttaaaaaaaattctgtattgatgtatctttgtaattttatttttcaaattttgagtctattatgtaaaaattttttaaaaaattctgaataatttaaca

SEQ ID NO: 234611 - DNA, 686 bp, Cannabis indica
aaaattagaaaacagtaattatatatactaaaaattcaaagagtaactttaaaatttacaaaatcacataaatttatcataaaccaagaattctgttatataggcacactttatatagaatagatatatatcaactgtattagtactgagaagagacacatgcagaacaaattaaagatagaattaagtttggatacttacatttaaactcaacttttgagtaactttggctctttaacaattttaaattgtctcttcaagatcttcaatggttgactcaagttctgagatttttcgatccttctccttagccaaaatagttaaacgagaaacttcagtttctgccttcatcttactcgcttcactctcatcaacactcttttccatttcattcacctttgcttcaaattgggctatgttctcgataaacttcttctcatcggataaaccacatcaatttattataataatctcatgcataaataaaagtaattaatgataaagttatgatctcattaccttctgttcattttgcaaatactcaatcttttgcttcaagtttgcgttttcttttgcaatactttgtacctttttcttttctgatcattattgtgaagtatcaaaaatggtaataataatcaatgttcatgtacttatttaagccatttgtagcgaaattctcttat

SEQ ID NO: 234612 - DNA, 1528 bp, Cannabis indica
catgggaatgaaaactcgaccaatattcacaaaggccatgtatgatctaccaaaatataagttacaaaaagaacgacaaaatagataagaatagtgttgcaacaaaatctattgatgaatatgcttcttccccaagattactgtcttcagattaagattttagactccactagcagctctaaatgaacccccactaacacagttcaacaaattaaacacacttcctccactatttatgtaataaagtcgaaccttatagatatggtgatcatgatggggacgatactagattctagtttataaatgatttagacactttcagataccataaaaacagagggcatagatgataatttacattaatagatagttggtgcatatccttctaccaaaacttccatttatatctacagttctccaccgtggtgcatatcctataataaacctttgctttctaattctttggccgctgctacatacaacaaaaagaaaaaaaaaagtgaaaaacgttagacaaacttatagaacaaaaactagtcctttgagaatatcctttatcaagtaaagtattgataaatataatcaatacaaatgttaagtatattaacaatcttttctctttactagcaatcaaatagctcagatggagatacgaaaaataataataataaaagtattaaaacttaaacatcacaaaagcaatgatgatggactcacaacaacattaaaaagcgtgaaaaagctcacctttagactgcgaaagaagaacaacaacatgcatagtaacattattaggaggaagctgcaaacgaagtggatataactttccattcaaagggctccgagtacacattatgatgccctcaataccagtttcttcctcaaatctacgagtcaattcttcaaccccattacccctataagtgaaagagtaaccctccaccgattcatcgtttacttcaccattttcatcagctatatgataataaatagtcctcccatccaactttggtggcgaatccacataagaattagttgactgcccaaaaaaaaaacaaactaagttaccccaaatcaaactcccaataatctaagcaacgaactcaaaaatcataatacaaacaattaagaaagaaaaagagaagaaacccagtacatgaaattaactataattacctcttgtctcgagtaattcccagatttaattgaaggtgaactcgattcagaatccaaagaatcagaatgaggaatggcatgagccgacgatctcacacgtggagactgaacctcgatctcaacaatctcaacatgccacaaaatccagtcctgagtggaggttcgatatggaatatcgtgggtcaccgagtttctccagggaggcaaacctgtattggctcggaggaagtgtccacaccgggttttgaacttgacgtggttcccctccttaatgggttcccactcaatcgacgaatcaagtccccttggaaggctctggaccactttctgaccggtcataccaagcaagaaa

SEQ ID NO: 234613 - DNA, 805 bp, Cannabis indica
aagcaaagaatttatttactttttctttttgtcttttggttcactacatatataccataccatagcttcacaaggcataagaaatcaaacatatagtactattaatttgtgtgaacttttgttattaattaagttggttgcccggcaattccttgattcatttggtgagtatatctaattatttggtcaaattattttagtattcttacttaaaacatataactaatatttttgattaatttggcagttgtctttattagattgaaatggagactactcaacactacttttgtccccaaaaacatgttttgttggtaaaggatagtgagattggtaataaccaaattacttgtcaaatatgcgagtcttctgtcgcagctccattttatgtatgtcatacatgtaaatattatgttcacaagtcttgtgtaattaagcaacttaatcacccttttcatcctcgtcaccctctatctcttattttaagacgtacttattgcgattcttgtggccaataccactataacagtttcatgtttagttgtgttgaatgtaattttgatttggatgcggattgtgccttgatgtcaaactccataataacatgtccagaaggtcaaaattgcatccaacattctactcatccccacttgttactacttgttgacacaagcgatgctatttataaaaacattcatgttacatgctttgcatgtcaatctaaagattcaccatcagatggtggagtttattatggttgtaatagatgtaagtattttcttcataaacaatgcattgaccaatt

SEQ ID NO: 234614 - DNA, 960 bp, Cannabis indica
gttggtaagatttacaaagcacgctactacccaaatggcacttttatttctgctgaattgggacaaaatcccagctttatttggaggagtatttgagctgctcagggactggttaaagaaggtgctagactttcaattgcagatggttttcgagttaatgttcttaaggatccgtggctaccccacgattccaatccttatgtcattactaagaaccaagggcttcaaaataagtttgttgatagtcttatgactgttgggaacgatcttgggatgttgagctcatttcggacatgtttttggagagagatatgggtttaattctgaacattcagttaagtgcttctgtggaaagagatacttggtattgaaacatggaatcgtcagggttttactcggttaagagtgcttataaacatcttcaatcgagtagaggaaattggctttatttggaagataataactgctggaaaaagttgtggcaattggctgtccctcctaaggttcgtcatttcttgtggcgagcatgttctggtagtcttccaacgaaggttcagctccaaacgaagcatatcaatgtcgatcttttttgctctttttgtaacagagaacatgaaacaatattccacgtgttgttgggctgcaatttttccagctcctgctggtttttttctgcagcagtcgtgcctcctgctggtgcaccagatgactttttttgggtctgctcgaagggaatcaagttgatgtagtggtggacgctgctatgatcagtgggagtatttggaaaactcgcaacgagttgctgtggcagaagcagaatcgagcagctttggatgttgtgaagtcggctagatcagtccttgcaacttggaagattacaaactttgagtcgcctcatgcttattttgctacgggtgatgttactaatagcaatctttgggctaaaccagatcatgatac

SEQ ID NO: 234615 - DNA, 1656 bp, Cannabis indica
caaccaaaacatgcctttcttttgtttaccaattttttaacaatttaacaattcatctccatcataatattaattgtgccataattaattaagtatttttatttaagttttcagttttatattaattaaaaatttaaataataaaaaaaaagtcaatgtagagcagcggaacaaggcaaaccccaatacattacacgtgttacaatgatgaatggggactaacgtcactcgcagaaaacgcgcgtggcaccaactttgaagcgaatacagtcaaattgggctctggccagtggcattttcgtaattacagtccaagactccaagaaattatatacacatattaataaataataaaggaaactatttcttaatttccgaaaaagaaaaaaaaaggaaactatgtcattctcatcttactaaatgtttttgttatttttaatgataataataataataataaaaataataaagactaaagtaagtaataaccataacgagaagagaagaagaatcagaaatctagttgcagagcaacaacgtccacgttacactactctccaaagctcaccacccaaggtaccaatcaatctaaattttctttctttttctttttatttttcttctctacccaaatttactgtttggttccccagaaaggaagtttgtataataattaagcttattattgctaaaaccagtacttttaatgtaaagatcgcttctttaaaggttctgtctttttttcttctgttttaaatagactctgttgtattaaaatcttattattaagagttgaaatgagttttctcaagaaaaaattgaagctttttggaagagatttgaagatcctgaacttgagtaatagttcaagttttggttgaaattactgccatttttggtcaacaacttactcaaatcatgcattgatttcatttcactctgttttttttttcttagtttgaatgttgttttattaaaataccaatgtttgacccaccttttaaattagtattctttaaaagaattaaagttcttcaatttctccataatctgaatctaaaccccatataagtgccttaggtattgtcactgaaattttctcttttttcaggtatgttaaggtgattgagagtgaaaatgggtcagaaacttttcactaaatgtcaagctgaaacaaggagattgatttggactattggggtgatgttttcactgttttgatttttcagtactttgaactcccatatggtatttttattccatctttatttccttctgttaaggtaccattagtagaggaaagtaaagaaaatggagatttattacctaatcataagattattgatcataataatagctcaatttacaatgcttcaaactcaaatgacacttacttaactcagcttaatgacacaagaatctctggttctacaccaaaagaatccttggatttcgaaaaacataacaaaactgatgttgatcatggaaagatcaacaccacaaatagtagtttttctgttggttctccacctcaagataattccaacacctctttagtagtgaaaaaggaaagtcctgagccagtgcataccgagcttaaacaaaaggggaaaacctcttccacgaacacagccccgaagattactaagaagcctg

SEQ ID NO: 234616 - DNA, 852 bp, Cannabis indica
taaggtttctcatacctttatgtgtttattttcatcgttttagaatttcatattaggatgttaaaaacatacttgttagcaaatctagatcctggtaaaagatattccaacagtaatttgttccacaaaatgcactaggtaacctaaaattagtacaagtataaataataatcaccatatagtagtatggtaacaaaagggataccaagacatactgcataaactaacaacaacataagtgtaaatgctaatcaccatatagtagtatggtgaaaattgttccaaaaaacttatgtaaaataatcactaattaactaaaagctaacattaggaagagttttatgcaagataactagaataatgtttgtgaaccatgaatgtaactacttttgacttgataccagccttttagaatgatgagttttgggagagttgctcttttcagtccacatgttcttagacctagccttcactgtgctgaattgggagtctccaggagacttagatggactcagtacgggttttgttgtccatgttgatggaagagttgtagtaatttcaaattgcttcttaactccctccataactgaaggtttagccttgttactatcgtgggtcacaattttcccaacaaactccagactagcttcaataggatcaaactgacaatacaattgaaagatccaatttagttaatacacaaattgaaataacataaaatgacatctttaagaggtcaatttagttatatacacaaagtgaaatagaagaatactaatcaaaacaacataaaattacctgtttcatgggttcatttccctcgctcagtgattccatgtacttcattacaaa

SEQ ID NO: 234617 - DNA, 1003 bp, Cannabis indica
gtagttatatttttgttgttttacagttaagttgttctagggttattttttagttgtttttgaattattattttattttactcaaacatagtgttatcccaattttcacactatgacttggcatcacatgctggtgacacgtggacttgattctccatatctacctgaaagagatgtttcgagcagaacacaacatatacttgcatggatgaggtcctcccaaccgagcagtggacaatccgagcagcacatcaacacttaacaattccagaattttcattgtgaagcacaaagcaattcctataaatttgggatcttatcacagagatatggcaagttgtccaaatcccacaattttttgtattctaaatatgtaatatgtgttcttaccaattatagacattgtaagtaaaagggaaaccttccctcaagcatgtagccctataaatagtgatccattctcactggtaaaggggtggaaagaattacttgagagggatctaagagagcatactcagagatttcacagtaagagctttaagagaagaaacattgtgttcttcgttcttgagtcaatacaaatcaaggggagtaggctattaccgaactgctcagggtcgaacctctttaaaaaccttgtgttctttatttatgttttcatattatatcttaatcatatcctttattgcttattattaagactcattgtaattggctaaaagcgaggtcaatattttcgtgctttcattgagagcaagaatcataaacctgctctttacttcaaatctactcataaacacgatggtcgtacaaactcgctggggtgtagtcaatcaggtggatccactggcaatagatcccacactgctgattccagggaatagaagggtcccaccagtcactaaccctgaacaaccaatcacccatccaccaaccgcgggtcatggtgtgacgtctcctatggctggaatcacacctggtgttcaaaagactagaaatacca

SEQ ID NO: 234618 - DNA, 1157 bp, Cannabis indica
aattggcagctcccttgcggttaaatttacagcgttcagtgattcatatagtataaaagtaaacatattgggcctggacaatatgaaagaaaaaaaatgggtctggatagtaaaaaagaaagtattgtcgtgtggcagtattcactactacaatttggccttttagtgacactctttagtgacccacgtaaaagtgcgtgtcactaaagagctaagagtgatttttagtgacacgcataatgagactctaaacattcggtgttagtctcttataatgggtgtcactaaaaatatgaagagtcaataaagagtaatactcattactttgtgatttttttttaaaaaaaatattgacctatagagtcatgccatgagggactgcaaaagtgtgtcccgacttacgtagcgcgtcactatatcatagtcttatatttaattatttttaaataaatttaatattatgatatagtgacgcgctaaacgagttgggacatgtgtatccagtcatgcctcgcgcgtcactatatgttaataaaaaaaatacttttaaatttattaatttctttaattttttatttaagtaaataaataaaatttgttttttttttaaagtaaataaataaatgaggtataaaatgcacattatgaaaccctaaagcctcaaactcaacattttccctcactgtgctctacccacaccgacggcaacccttcaccagaccatcctttcatcgtccaaccccaaggcaaacccgatgaaccttgctgctccctctccaccctattgcccaagttacgggctctctcgtctctcaccctcacaacaatcgcatcaccgggatcgtcaacggctagtgactcaagtcaccgtaggcaaaaatggaggttgtgggtggtctcgtcgaaacgccacgtgaactccattttttctctccgccactcacggtcaaacctctgtgaagccgaacgaactatcaccggcagtcaatgcccaatcgtctacaaccaccaccaaagctgcaactgctctgaagctctccgatctttgaaggagaagatccaaaaacctcaccagattaaccaggagtttgattctgtccaggtctttttaggtttttcttctcaaaggttgtttgcgataatggaagcttattgag

SEQ ID NO: 234619 - DNA, 1095 bp, Cannabis indica
aaaaacgattaaaaaaatctcacctacatgggattatttatcccaccctgctggatgggataaataatcctagatagataaggttaactggattagttatccagacttctaacatgcccaaacactgaattggacaaattagcctgtctaatccaatccagtcctgcgtaccaaacaggcccataatatataacataaaaaaaaaaaaagacataattttttataagggctgaaaatagagaaagtttgtatggtattggtaagtgcaaaagtactgatgtcttcgctaaataatgtcatataaaaatttaaatttttttattattatttattattgaatcaaatctaataatttaatattttttatattaatatttatagttgtttttttttttaattaagatgaatgggtgaaagtattctattaagtagacgtaatacgtaagcaaaatgtaacaatgtaagcgtgtggttccatgatgggttattgtaattaatattaaagctccaaaatcagccatgcatctttttctttatgaagatatttatagaggtagatgagatcaaagatagatatatgtatataggtatatattattaattaaggcttggaaatttaaagttttgtactgaattaaaggttgaaaaagaaatcctatattatattatattaatatatagggacaatgtaaccatgaggacggcacgcagtatagcattgtctcctgatgggggcaaaggtgatattgatagttattaatattattgattattcatatattatatgcacaaccctacgcaaccactgaatcaaatcaccatattttataatgaaattaatcagcatataaacatacacatatttatatatatatatatatataaatatatattatatatgaaaaatgttaaataatcaaaatactatattattaataattatcgagttttacacaatttaatttaataattattaagaataatcactaactatttgtaaagtgtaatcttaaagtggtgttaggcaccactatagtacatatataatcatatctttatatatactagcaaaaagttacgtgcgaggcacgtata

SEQ ID NO: 234620 - DNA, 800 bp, Cannabis indica
catgcttgttagtaaatctagatcatggtaaaatattcccaacagtttttacctaaaaaacttaaattatgatagagttatttctacaaattttttagatcttttatcttctaacagactaacaccactggaatcaccacaatcgtagttatacaactccaaaaattgtcattttactaaaactgcttctaaacctacaaatttcttaacattaactccataatattaattttaatttcacttatataattaattaaaagaaatttacataaaatactacttttggcaaactttttacacatttatgtttaattctttttaacatttttacagtgttcataaaaataacaccaaaacaacaaaaaaatcacataaaaatagtaggaaaaaaacataaaaaaataaatgtaaaaataacaaaaaaatcaacaacaaaataacaagagtacaacataaaaaatcatcaaaagaatgtattttatgtaaataaaatcttaataaccgtaaagatatttaaaactctatatagtcatatttttataattttttcgttatttttgtatttttttgtaataatcccattaattaaacttactaaataaattataaaaccctaatggacttttatattgggttttaattaaatgattacctatcttgtgaaaatatcataatattttaccttcgcatttaataaaactttaactatctttagaaaattgctacaactactctaagtaataatctcaactcactaacaacataaataaataaaataattatcctcatgtaattgaaat

SEQ ID NO: 234621 - DNA, 1412 bp, Cannabis indica
ataatttgtagttagaagagtgtggttataataaagtgtacaaattattaaaaacatatatatcattaatcatttttaataatattattaatcattattgttgactcaggttttcgacaaccaattaaatgagataatgataagagctttgggataattagggtagatgatttttacgtggttcgggcattaatgagtcgtagtccacgagtctctgttattaataagagtatttcttttacagagaatgttcttggtatgtttttctctctcctttttccgatcccctttctcatttttctcaggagtatttatagagattggtgggaatagctaaaaaggggtaacttgtctttgagtgccaaccatggataagcacaagtttccaaaatatacaaactagggcatgcattacctatatagtaggtatcatagaggttaggtgagattaaccttcatccttccttgattgatgtgatccatcataatggagctgtctctagtccctttgattatcgtgtaatcgccctaaatcaggcttacgatgtctgataagtcctcttatgggtattcacagacgttttcatccccatgctgcattaaatgcgaggtgactgttcgaatgggttcttctcgacccggaggtaatttactatatcttaactcccgaagaagaaaacgtgcctttttccctttctcgggagttaactctccgaaccctacttattgtctcttctatgcgacctttaactaatctctgggtgaggtgtcttcttctgtccacgtgtcatacctggcagctgccacgtattttaggaaaaaaccggggcaacaattacccctaagtcttatttagtactaggtaaataagacttgtgagccatctccggtcttaataaatagagtggcacgtgccccaggcgcgtgggtaacatttatgatcgtcatcattgatttttatttccattggtagacaacgattcgcttcccgtccattgatagactcttccattaatgttggtgtcagagcaatactcaaacgtttcaaccgccttttcttctctttacacctattcatcctatccgttggatcacagaattcgaatcattacgaatcttcactgtattacggtgcctgatcaagacagtcttgcacccttaatggcctataaaagccaacacttttctctactgggtcacttttaccacctttcaatttttagtccatccaacccatttgacaaaattccagaaacctccaactatctcctgctcttctttcactgctgttagacaaaatattaccaccaaacgtcgttaacctcttccttgctgcctttgtgtaagtttttgttcagacgctctctatttccttttcttctggttgtcagggtaaattaaaattgatgata

SEQ ID NO: 234622 - DNA, 1142 bp, Cannabis indica
tgtttatgatttcttttatggatcatcaccagcaaccaataaagacaaaatatttttatggtcccaccccctctctataaatatataagcatggctataaggcacggtgtcaggtactagtggtgcttagcaccttctttacatgtcaagttgcgattagttagcgatactccataaaaactattatattaaactatatgagacccgatacttagttggaccaatagcgatattaacacatagaaaggtactagccaccactagtaccctttagcatttctctaaatatatatagctacacctctatatatatctagtatctatattaattatattggaatgtaaatttgaatttgtatgtttcatattatacaccataataaaaattaataggcattgaaaattttgagtttctatcctttgtgtgtatgctttttcattcaaaaaaatctcactaaataacaacacaaaaatatgtactaaaaatatattttttcataatattcttaatttttttattctctttctttttctcattctctcgtttctcattcgtaaactaaaaaagcccactcatttctcttatgacgactcatttgcattttatcatccttgaaacctaggtccctgaaacctcacccccttcctttatgccatccatgaaactagaccactaaaaccttgaaacccaaatctcggaagcgtctagtcatacaaccattgaagagactattcaattttacaattgcacaaccatcactgccacctccattgcacaccgacgatcaatagaattgattttgagtgtgtttgtgaaatctgtctttgttttaacattttttttacgtttagactttataggttcgatataaactcgatgaaagctcaatacaatctcgacgagcttgatatatactagatggagctttcgttcgaggaatgaagatgaacttaatgggttttcgaagaaagctctgtggtatagttactccaaatgaaaaaatctacataagttgtgaaaagttagctgtctttcagaagtgtgttcccagatagctaacttgtccatccggaagaaatctcatagaatgacagttttcatctggagggagttcccatatgactatcatgtccactccggg

SEQ ID NO: 234623 - DNA, 676 bp, Cannabis indica
ttaatttttagttgttccgcttcttttcaatttttatgccttctcctgtatgttatcttgttgtgactcagctcccacattttgctgcatccgttatgttatttcttttcccagccaacttccattctctttttttttttttttgtctttcagatttcaccctttcaatgggaggtaaggctattactgtccacgactctttcattctagtgggtggtttaacctgtgtaatttgaaaccaacatttgttaaacatacgaaacaacagtgaaacaacccaaaaacaacatttacaaaaccatgacagcccatgtattaatggttttaaggtttttgcttcatctcgccagaattaatggttgttttgtggctgctctggtgttgctgtgatagttctgtccatggtgtgaaagataaatgcctcttttttcggtgttaataatataaaagaaaaaaaataggtcagggcaatacaaatgtaaaacccaatatttgtccaaaacccaatatttttacaagtttctaataaaataattataaaataatatattgtgaaaattaagactcattgcttgaaaaaaagggatactttaaaaaaaaaaatacaaaaataacaaaaaaaaattataaaaatatggtatgtacggggttttcaatatttttacggttatttaaa

SEQ ID NO: 234624 - DNA, 1171 bp, Cannabis indica
ttgaggagagcaccatgaagacgtacgcttcatcaaatgcgatatttcttgatacatagcatcaaccactagtaggatcgaaacatttccattattttccttaattgtcatatcccacaaaatgcacatgatagcctttttatcaaatttactacggatgtgattcggtatgaatatatcattaaggtagaataaatattattctcaattatatgttctaattttatattttatattaataattatagatataattttagatcacaagctcaaaaatattatttagttcaaacatgtcactgtaaaaaacaactccttttagtgacaactttgtaattaatcacaacataaattttttgtgactacttttagtcacaacaaaaaaattacttatgactaaaacataatatttagacacaagttcttactaatttagttttagtctcaataaatattttgactaaaaacacatttagttacaacaatttgtgatttttgtgactaatacttttagctacggattttttagtcacatcataagaatgatgatttgtaattaataacaactattttacttttagccacaagttttgttgtgactaggctcggccctggcataggtgggctaggcctgtgcctagggcccacctagcccagtggcccaaattttattttccccttttaaaattatatatttttttttactgactttaaaaaatatcacatttacataagggctcaaaaataattttttttttgtgacccacttttttttaggacccgccctagttgtaactaaaagtaaattatgtatattggctaaagtatataaaattgaacctattaaagcatgcgccatgcatgcacaacttgatttgatacataacatacgtacgtgtaaaacttacaaagtattattgtttttatgttattagcagcagcaaccttcttttttcctttttcaatcctagagtctttacttaattataatataagtagaccactattgaatttcgttttcatcaagcgtcaatattgttaatatagtaattaaaaaaatgagattaggtaaaattttaattaaaaaggcctaatgacacgaactttttgtttttatttttatttttatttttaaagaacaaaaaggtagttgctgaaaactagagaaggt

SEQ ID NO: 234625 - DNA, 2084 bp, Cannabis indica
gaattgaatgctatgtcaaattacccatatagaagtaagattctttactaaataataaacatatcaattaaatttttggattctaatctaattaagcttatatttatttaaaatgtatttatttaaaagattataattttaatcaatatatttattatatttattacgaaaaaaatattcaaaatatacattaaaaaatacaataaatatacatctccatttaatctctaaatatatataacaaaatataatatattaaattgggctgagagattccttttttgttttttttttcaatattttaataatcattttatattcttacataattaaggaaacttatcaataataccatattatagaagtcttcctattactattgcttaatcatacatcaagctttatcagctatacatggaaactgattatggctttgtttggcgttcacatgttattatagaaggaatagacatcattaatatctgccttggagaagattactcttccagcggatttccactacagtgtcgttttatattcttatataattaaggaaacttatcaataataccatcatactttggaaattttcacttttggttccttcctttgatattcatttctttccagagttattactttgcttgctatcttgttttgaagcatttatattagatttcattacttgttttcgttaaccacattgttttaactattggatttcattgcttatttattacaaattttgattacatagtttaaaaggaaatttaattttctttaaaataaatcttccaaaataccattaatataaaataataaaaactcaaaataatttcaacttcccatattaatattttattctcttcaaataacattaatatataatttaaaaatagatactatcttataaaaaattattaaaatactattaatatatttgaatatagcattggcctattttagttgttgccattttctttatacataaatgagtaattatttcataatttctaaaagatattataattatttattggaaatatgtttactttttctataaataatatgtagtcttcattcattcacaaaaagatctttgtctcgatctttgtctcgagaacgtatcattaagggttcgaatttttttttaaactaagttgagttgcttgcatgaccttttttcctaatctcctggttagtattttcttcttcttgttgtattttttctatacaccataaactgttttgattaaattactcaaaaagttttaaaaatataattactcatactatttattttcatttaattgtagatgtcttcagagaaaggagaaaagatgtgtgaatctagcttggacaacaatttattactatcaatgaaagaagagatgtcatcaataaaagaagagatgtcattagtgaaagaaaaaatgtcagcaatggagagagtcataagttcagtcaagatagttataggaacgacacaacttagtgtgttagtgatagagaactatgtacaaaaacgcattcttattgaagaagaaattaagaataatgaaaatgtaatgaaagaacaagtacttgaagaagatgacgttaaagttgtagaatcaaatactcttgttgataaagatgatgttaaagttgcagaatcaaatacacttgttgatgaagatgatgttgaagctgcaattgttgatgaagatggtgttaaagctgcaattgttgatgaagatgctgttaaagttgaaaattaaatagtctcattggtacaatacaagaaaattttcaggaagtagataaactatttaataaatcaaaggcttctcggggcgatatttctatcaaaactccatataagcataacaaaaagagaaaacttgatagaaatctttatgattataatgaaatagaggtatctcagttattgtaattttttttatatgatttatatttattgtggtttcatttatatatattttttttatatattaaaattttcttctttttttgtaggatgattctactgaagaatgatgagatcataaagccagcacgaaaaaaaaaaaattaagtggtgt

SEQ ID NO: 234626 - DNA, 686 bp, Cannabis indica
ccgtgccatggttagggcccttgccaaagacaggcctggttctactattattgccttttttaactttgagtcatgcaataatccttgcattaatgcctttgttgccactaaatcagtgcactttgggatgctgacgtattcctcaatgaatctgttgatgaacttttccaagggctcgtctggtccctgatgtattagcattaagcatgtgtccacctttgcagtcctgacacttatcgcgaagtttgtctgaaacctcaagatcaagtcttgatatgagtttattgcaactgatgtcagattgtggaaccagcacagagcaggaccccttaatccctgagtgaaggtcttgcattatattgcctccaggtcctccaatgggatcaacacagttaacattttttgttcaaactgacatacatactctgatgggtctcccttctcgttatactctggtaactttggagctacgtaacgttgtagggcctctacacgtaaaatatgatttccaaaaggtgagagagttgatccttccattcgtgcccactcgctgtgtactcccatttggctctttgcttctaaggccagtagtttattccacatcatttcctgcagcttttctgtttctttattcaccatcgatggatttctaataaccattggtacggtagttcacttccagggtg

SEQ ID NO: 234627 - DNA, 1776 bp, Cannabis indica
taaatgattgaggcctcatttcagtaaggatatattgcgacataaatacctaatgttttagattttatacacttaaatactttatctttatttttggaggtaaaaatacccaatgttacaattctcttacatttgttaccaccactacttctgttaacttataaatatgaatacgtggaggccctagatgtattacatttatttattttattttaaaatttaatattcttaatattaaaaactacatgctacttgtttcaaaaaaaaaaataataggagatatgcaaaactaaattgtcataactgagtgaactagtgcagtacatgtgaaaattattatgagaactggttttttttttaaacaagtaacatttagtctctgatattaagactattatgttttaaaataaaaaaaataaatttaatgcatctggaccctccacgtgtctatatgtatgaattaacggaagtagtactaatgagtgtaagagaattataaaattgggtatttttgcctctaaaaataaagataaagtatttaagtatataaaatctaaaacattaagtatttatgccgcaatttaccatttccgtatttatattagtttactgaagtatcatttataggtagctaagtgttttaaaaataaaatacattaaagggtagaacgataaatttatccctattcagtgtaggtcatctatagaggatctttgactattacgattgtaacaatggataatcataactgttatacccaaaattcggttgccatttcagtggaggactcgtgtcatggtaaggggaatatgtgtaaaggcacgctacccaaaataactatgaaatcctaatcccctaattgggattactaatcaaaatagcgcagaatttaaacttttataataaacagaatgaaaataaaacttgtaataatttaaactttacaacagttgggatccaaaaaatatttacaaactttattacaagtctctttctgttagccggcccaagcggtaaaatagagtttcaaaaaaaatacatcactggtagacccttaacccgcttggtctgatgtggctcggacatgtacattcttcgcctagctcctggactcaaggctgatcagctaaagccttaccctttcctgcacagtggagcacccgtgagccaagcccaacaagacagtataaatcataacaataataattatatgctcatcatgctatttacacagtaatgccattcatatatgtctgtgtgtcacagacccgcatgttacactcacatgcctatttatgtctacgtggcgtagacctatgtgttgtgctcacacatctatttatatctatgtggcgtaatcctacgtgttgctctcacacgtctaaatacaataaggccttagaatggttcatctcgtttatggttaccgagtccaacctaattatgccttaaacacataatccttgaatatcattacatttaacaaggcatggcaattacacatatatccctagggtaataaccctatgctattagaccgttcctattagggtattaaccctaatcccggttactaaacattcacacatatcactttcaatataagcaccaatgcgcatactctacgtgctaactactgtcttacctgttgtcctgcaatatcagagattccgaatccccgggtgcttctaatcaggtgtcagtaatcctagtcacacaaatctaggattttcataaatagggttaacccctgatttcactttcataaaatattc

SEQ ID NO: 234628 - DNA, 921 bp, Cannabis indica
gggcatttcattttttttcacacttgagtatatatatattttagagagaaatacatgaaaattatttataataacaaagtatatcagtaaaaatattctccaactaaaagcaagatttatccaattttacaacatagtcaaaccgtgacatataggttgtacgctatagaaaattaaaaatatccacaattaaatcttcaaaagaaacaattaaaaaaaaaagcatttaaaggtccaaaaccatcctagtgtttgtcttaactatgcaattggaagcaacaaaaactataatttaaattatgaaaaataattttgcctctatctcatgtgatgcaaagttaccaacatatattagtaggttttgaaagagcgacaacaactctccattagcttcccaaactatagtaccaacgccaataatgttcgtgggagcatccaaagcaacatccacattcaatttcaagtttcctataataggtggttgctacgacgcttgaacttgagtaggcagtgaaagccttggagtgacactcatgcacgttattttttgaacacttgaaagttaaaagttaaaagcagatcataatatctattaataatttttatttaatgatataggtattgtcttttaaaattgtaatattacttatatttattatgcatattgttaactgaaattttcagataataatataaaatatgttaaaattaaatagatgattaataaagaaataacattagaatttttgcgtggttaaggcgttaacgagccttagttcgttaagactgaaaaagccttattataatgtccgtatttaaaaattgactaatttagatttaaactcattttattatatctatataatttcattaatcgggatcccgagtttaaaatcatttgttgaaaatacatgtattgta

SEQ ID NO: 234629 - DNA, 2361 bp, Cannabis indica
taagtaatgccgcaaaatctttaccgcaaatactatagttgcgagttcgatcgtgagtagggtaccactactcgtactcttttaactaccgagaagcctaagctattacctttccattttgcataagaacatagcctagacctagtcttgatggatcacaataaacaacaaattttttccttatcagaagaaagagttagtactggagcggtaatcaagcgctactttaactcctgaaaacttttctcacacagatcagtccaaacaaactttagattcttctgggtcaattccattaaaagtgtcgctatctttgagaaaccttcaacaaacttacaatattgtcctggattttgattgtcgttcttctttcttcttcattcttggattgtagacaatatctaataaatggcccaccataccacactggaaacatattttggttttggcactcaccctgatggtgcttttgtatttgggacattctaggtatgatctgaatgtagacccgcaactttgacaaccacctctgattccctgaaactttctattacttcccaatgtttcaaaagcttcagccttccgtttgtaatctcggttgccactgtcggtccccttactaacattaccaaccacactaggattcgatgttgtgacggcatccttagcagcttgctctttaattacttgttgctcaacctctttagcaatcaaggctaactctaccacaatcttatataatgagtcatgatcggctgtaatcttcaagtcccaacttatagtggcattcagcccccttacatgtttttgttttcgagtgaagtccattagcactaggtcaccagcgaacttggatagacaatcgaattcgagggtatacttggccactgtcatcttcctttgagtccatttcacgaattcttccatatgcaaagttcttatggtgatgttataaaatttctcttcaaacaggctcttgaactcttcccaagacatggtgctaatgtcttgggtctgccccataatatcccaccagacgtgggcatgatcttgtagcctaaatgttgtaaaattaacgagagttcccgtcactctcatgttatccagaatgcaagttatagttctcatccactactctgccttaataatattagtacctctcaaaaatgctagaggttgcagcttgacaaaacgctcaaataccgaatctcaatgtggcaaaataaatcctgagttacccatcactagaacaagagctggtggtaacacttgttctgttagagctacatgagccggttgcctaaaccgatgcaactcatctccttgacgaagtatgatactttgcattttgaggaacatttgctgctaatcggcaagtggattagcaatattaacccctgcatcatcccctagattctacggaggcacacacggtgttggtggattggttttgttattaccaggctccacaagctcgccctatggtctagttgattgattagggtctattttttctcaaatagccctaaaatcaacaacccgacgagtccggcaccaaatccgcacttacacacttattgcgttaaccctaactcatacatctatgtttctttattaaaataaacatttataaatttaaacattaatgatgcctttcatatcacattcattctaaatgttcatatacttcctaaaaatgaaagcggtaaacaaataattacataagaagttaagcatttactctcaacacttactgcaccacgagtcgagcttgtctctgatgatgattgtacatgttcagccggtctacaagaagtttaaaaaccttagcgctctgataccaaattataacgccctaataattaggccaaaaacattttttgataaacataacctaatcccgctaaaccaggattactaaaaataagagcagaatttaaactttaaattatttacgatatgaaagcataacttgtaactatttaaactttacaaaccattccaaaaagatttctcctattttgggatcccataaaaattttcacaaaatattacaagttatttttacatttaagcgacaaaactgagattacaaaatacatcaactagttgacccagcccgggtggtctagtatggcgcaaacatgtacaatcaactgtcaagccctcaaactcatggctgataacaaaatgataaaccctttcctgcagaatagagcactcgtgagccaagcccagcaagacagaataataatacaacatgataattataataataattacattttatcccacacgccactgcgtatatattgtgccactgcactttttatcacactattcctatgtaatgatgtcact

SEQ ID NO: 234630 - DNA, 643 bp, Cannabis indica
tttagtgactcacacttttctgcatgtcactaaaactcagttttgtagtagtggatgcttgtgactagttagattatgtaaatagtaactagttataattagttactaaatatagagattcttttgttgtgatttaaattataaataaatcatcgatgcgtgaggagagagacatactaggatttcaagtaggattcgatgcattaatatagttttccctaaagaattctagaaatcctaaacgtactcattgtctacgtgtagattgttgtaataaatcttaagaaaatattatgatgatgaatgatcatgtgtatttaagatgtattaatagaagttatactacttggtattggcatggcaaatatttagctgatgatccatatccattagggaagtggagggaagatgatattaagggtatgatttcgatgatcattcattggacttgcttgacaaagcacaaaaggaatttcttaatgatcctaaaaattcgataattttttaagtgatgtagataaaaccctgttcgatggttgtgaaaaactaagattacaatggtaaagtttaacaacatcaaagcatataatggattgagcgataaatattttactcaatttttagctgcttttaaagatatctt

SEQ ID NO: 234631 - DNA, 804 bp, Cannabis indica
ctaggtcataacctaggcttaataaatatttaatcaaagtcttgataataatcaaggccacttccattcaactattaatctttaaccacatacagtgcttaccacttttcttaccttagttcagaagtcaagagtacgggccgacctgagtggaaaacaagctaggcgatcccggtcctatgtcacgacaattaaaactcaaatgaataccttaacttgatattttccggattaaaaccctaatttaaaaccgattagacttagccttaaccaactttaaaataactcaaataactcaaaaacattcaaaggcaggtactaggttcaaccccgagtcaaaacagggttcggagaaaactgttaggctatttttagcctaagttttgggtcacattttatagttgtttttcttctttattattatttttggaatagaattacgcttgttttctttggtttcaggtttctacacttggaatgtagaaattggacaaatttcggaaaatagtgatctataaaatagagaaatattttgaaagaaaataaagctgaaactttaagcctaaattcgactatgttctgatcatattttggaagaagtcaaaacataaaagttttagatctctttcttatctttccaacgcatcttgaatcagcccatttggagtttgtatgagaaagttatgcccattttactaaaagagatcgaagcagaaaattccatctcgccgcggcgagatttccatggccgcggctagaaagtctgggcagaaacgtggttttttgatgcacttttggccgcgg

SEQ ID NO: 234632 - DNA, 1557 bp, Cannabis indica
ttaaaagttattttagtactttaacgtgtcataaatgggttacaaacgtgttgaatacttcataaacgtgttattgattgacatgtttaaacaaaatatacttataaacgggttacacgggtcgtgtcgtgtcaacccgtttataaacgggtcgtgttcgggtttcatttttttgacacgattattaaacgggtcgtgttcgggtcgagcatgtacctgttatacatgggtctcgatacgacacgaacacgacccgcgaacacgaattgccacccctagtttgatgcaaccttcgaccaaccacccataaccaccctacaaccatcatctgattgaaactttcgtctgatgcaacctgcgcaaccacacagcaactaccctgcaaccatgatctgattgtgtaagtaatagtgtaagaggtattttggtaattaaaatcacataaaaagtataaatattgtccacacttatgaaggtatttttgtaaataaagtgttaatttatattttcaatgtaataatttattaccgaaggaaaacatttttgaataaaaagttgttcaattaatctttcgaatttgcttcatttttatttacatgcagaggaaagaaaagattctgacctacattaactgttgtataagaccttgattgcctaagcaccgaagctatcagtaaaactttcagtcatttgtcttctattaatggcttgtaaatttatggatgagattttttatcaccagaatactaatcagaagtttctataattctcttttgtgtgcaatataactacatacatattaactataatttaactttgaaattcgtttgatacatatttaaattaaaaaagaaaaaaaaactatacacacaaatatgtattgtttaatcacaaaatgcaagagatggatctaatttattgatatgaacacgtatctatacataatctccaaccttattaacttattatttaggctaattatatgagacattccaacatttcaaataattggttctttcttgtcattgttgccttttcttttcttggtcagctgatctaatattttacaagaaaacaaactaagttgtcgatttggatcttttaactggagcccgtagagaagataagtaacttgcttctgctttgtccattccttcgaaaaggtaaccgaaaggcggcatctctatgtactttccagaacctggaacaaccttcagttcatcattttgccaaacaattcttccacccgctatggttacttcaacctttccctgagaaagatcacaggaacttgaaatactaagaataccatgaacaagatcttgagaacagatgcgcaaacaccaaacaagtttaaagttttgtgaatacatgaataattaggcattttcgtatcaacgaaagaagttcttaagcaaagagattaagtagaagaattgaataataggtgtgacaaataaacgcatttaaaaacagttgctaaaactatttcataattggatgaaatttgaaagtaatgtcatttatatttatcttgccaatgcaataaggtaggaa

SEQ ID NO: 234633 - DNA, 2016 bp, Cannabis indica
accatgtataagatgcatagactactcctctctattgtactaaattaattaattaaagatagaaactcccatgcctaccttatcatacactcgaggggcggacccacatgtaggcgagatggggcagtggcctccctagaaaaaaaatcgcaaaagaaatatatatacaatgtagttagttacgatatatatatttgtaataaaaaatatttataaatataatattagttttagtgtaatagttaaactacattatatatagggttgaagtcaatgattcaattcccataaagatttattttttttctttttaagtttacttttgtccctaccttataaaaataaattatgcctctcctcattttaaattctcagtccgaccactgcatacacttacctattcctacttctttgacgtcgacattaacaataggcacccataaataatgtatagtggtatacttgagataacatgatatattcttaaacaaaaacttcttaatttattacatatatagttaaagaaacacacataagaagatgctcttcgtacatttatactagctagctttattttggtctctttttcaatagttgtggttcatacactacatgagaactttttgaatcgtcacaagatcttccaactaggggctattgatggaatatgtatgaaaccgaactctgaagatataaaaggagaaaaaaacaatcaaaaagagatacatatcttagctactggccattgatgctaccaacactataccccacaaaggaagacatatgcgcatttgtaagaaagttcataagaaacttctaagaaatattttagccctacacacatggcacatggagagacctagagaatcttaaatatacagttatatccatataatttattataattgttattattgctaaaatgtgatatgggttttcccactaactataaaaaagttttattgttagcgaataaaatttgtgacttaaataaaaatattgtagctacaaaaatgtcattaagcgagtatattatttttcaaaagaaatattagtggttgggggtactactaaagtcccatattaaatagaattggaaagaatattcggtatataaaaatggtcactatctctattggaatgagacctttgaaaaagtggccaagaacaaaaccatgagggcttaggcccaaagcaaactatattataccaatatagagataaatggtgtttgacggtccaaacaagatcccaaaattagccatgtgaataaatcatcagatttccaaacaagagtgttggaatcgagggattcagatactcacttaagaggatcttgagtgttgaaactgaaggattcaggtttagatctgtaatcgtctgaggggaggcaatgttgtcctttatttcaggggataattgttaggtgtacaactaaagtcccacactggctagaatggggaaggatcttgggtataagcatggacactatcttcatttgaatgagaccttttacgaaggtacccaagaacaaaactgtgagggcttaggccaaagtgaatgaaatcatactaatgtagagatagatggtgtctaacggtcctaacatttgttacaaaaattattatttattttaaaatatattttggagtaaaactgaattgatggaaaattatatctaattattccattttagtaaaaataaacttttcttttataataagtgttattcgtgtttctggatgaaggatacgttacaaaaagtggaaggcgacgaactaaaaaattaccaattaagtccccttaattactgaaagtcacgaaaagactaaacaaacttaggagaggtccgaatctgggtaaggcccagaaatttaccacaaagagaattattgtccaagacccagaagccttctcatccctctgggacccggagaagaccaaaccaactaagcttacaagaagtgtaacaccctaactagcataggcgtatttcgtgatttttaaacgtactgt

SEQ ID NO: 234634 - DNA, 886 bp, Cannabis indica
tgtattagatttttaaacacccccatacaatattcgatccgatccaattggatatttgaaaataacatccaattcgatccgatcataattagatatctaatatttggcggtcgatcggttgttattagatcagtcgattctcattagatttgatcgattcatgcatacccacaatttatttggatagaagtaatttaattaatatatctacttattgaaaagctaagaattgtattgttttattatttgcccgttattatttctgaaacaatattaattaaattcaaatttagaaactaaatatatggatcgattttaatattttatgtaatacaaaatatttgaatgtattactaggtgcattaattagttatatttcatactatgtatgtatttaacaaatataataaagagagtagaagtgatacttataaccttttattataatttcttaaacaatttttacgttcaaaataatattaaaatattttttttcattgcagtattcgttatagttataatattattcctgtaaattttaaatttttttgtaatagtatacaataccaaaagcagaattcttgatagtagggccaaccctcagttaatttgaaccctaaaaaatatttttttaggggctatttttataaaaataaatagcatttttaaaaattattaaaaaatatgtatatttattaaataaattcatttaggcccctgataggggtggggcctaagtgcgggtctagcccaccttagcctagggccagccctgcttgatatttcagtttaccacgtgtgttcaaaaataatttcaaacttatatattttttagcactgtaaattattcaaaaaatttcaaaaatttactgagaataccaccatg

SEQ ID NO: 234635 - DNA, 1183 bp, Cannabis indica
tgtattttgtaacgagatcccgggattttatatatgtaatactttaaggtttaaattaaaaaagcaaattttaattattcacggttttcaataacctcattgattagcatcgagctgcacagtacgttaaaaatcacgctaacacgcctatattaattagggtgttacaacacgtgtcaaattgggaagaatacgaatcaatgaatgtaacagtaattatatttgaaaatggaataactcattaatacagaattgacagagtatatttacaacttgttggctaaaaggtcttatgcaagataaagatacgccaactggcctcgtacattaacgagaaaccatacaaattcagatgtacaaggtgaggcataaaccacactatgcattaggagacgagacatggtgactggtaagacacttagtgtataatacaccttatacagactaagtataacaatcaagtaaatccaaacaactaatagtgaggcacccatctcgctataggaaggcgcactcatggaccttcattaatcagctccagacacctttcaatggggttcacagctccgtcaaatcagctctcttagatagaagctgacatacaaattatgctggctactgaggtccaccttctcgcgaagaactgcaattttcagattgagcattatgtctccaagcacaagaacgacgaggcttacatcataacctcgaaaagacatgagaaaagttccagctcgctacgaaggctattgttaccgtgttcccagcgagatatcccaaaacgttacggtttacaacatatttaatacacgtttaccttgacccaataaaagcggacctatcacagctgtgtgattttcaaatattaacaacatttattttacgtggtatgtaatcaaaccccacaatttcaggggataattgttgtaagatatcattccactatgtaattaattgccttactatgtcattataaatagaggcaagttacactgaaaaaggaacaaaaaaatcattagagaaaaaacctgagaactgtatcaaaaatctaataagaatgacttgtggattatgcagaattttaaccgcaaaaccacataaaaacctttgtgttatgatcttttctttgccatttttaatttttgttcaagtttatcattactcaggttcaaatatagttaac

SEQ ID NO: 234636 - DNA, 1477 bp, Cannabis indica
tcagtgggaggcgctagtggaggttcctcccgcagaggcaagggcttgctattcagatccatcaagatgttcgtgtcactctagccagttgtagaggccaaatttgtggtgcctaccgtggtagcaagattgacacatttttagtgttcatggaaattccagtcgtggctggaacatggacattgagatctgcagtctttgggtcttgaggaagacccgaagatgcatatggtgcaacaagagttcttctcgtgttaacaacagcgtttgatcaaatgtgatatcaactcgctctgaatgaaacttttgacctcaaaaagtagccaaccgatagaagagtcgtattaagctgatgcttgccacatgttaaacaattagaactagaaagtaaaaagagacaaggatttttaaaaaggttcgacccccttagttagcaggtaatgacctatgcccctttagttatattgataccgagggataacactattcacttcatcattaatgggatctgatatagctctcataaggttacaaagtgcgaattgaagatggcaaatctcaagggttaaggaatgctctagttggaatgtgtgagagaaagagagagagtcagacttagaacattaacaacttaaatgagacttaaagagacttagtgacttaaggtttttagggttgagttaaggctctttatatagaagagcttaaaccctaattaacaaataaaataagtatatatttacatattaaattggtaaagtctaaagattaaaatgccccttaaacataggtattttttatctactttattaggttgttaaggctcaatttgcagtttagctggcaatccacttgtaaggctgtgcaccaagatcctgccaggtccaatcatggccggacaggcacctgcagaaagcaggctggccggccttgtgctgtccagaggctggccggccaaccctcttgaggtggctggtctgtcacttgtcgtcccatttgagtgcttagactcccgttggctaaggtgctgacttgacctccttgttggtgagctgtactgccacgtggcgctgatattatccacttaatcatgccacctcatgtgggcaaaaattggaatctattctacccagtttttttgacggtcaactagacaacggtcttagagatcaaaatgaatattttatcccacttttaaaaacagttgggaaaatctaatttttttagtagtgttattttctaatgtaaaacaacaaaaaagatatatgaatagtttataatttaatgttatagtaaatatactaaaaaaaaataatattatgatataaaatttatatataaaaaaaaatagtgcatttaggcaaagctagccttaaagaaaaaaaaaaaataattcagctttttattaaaaaaatatatatgttatttttgaaaaccacaaaatatataagaggtaagttgagaaatactattttta

SEQ ID NO: 234637 - DNA, 821 bp, Cannabis indica
ggggcgttgtcagaccgaaaacgtttgagagtacatttgaactgagtttgtacataggaaataaattctggtataatctttatcacatcagatttttgtcttagcaaatatacccaagtgaagcgtgagtaatcatcaaccaaagtaagaaaatacttgaagttagagtgagagggaatatggtaaggaccccatatatcacaatgaatcaagtcaaatttattttcagcaaagttattgttctttggaaaagacaattttctttgcttagccataggacaaatataacaaggagattgtttatgtaaggaatctacattacagtggagattatcactaagtaaggctaatcgtttccgagatgggtgtcccaatctggtatgccaaagttcagcagtgatggtattaactgtagcagtatcgaggttcattgtgtagagtccattttccaatttacctttgccaatcaccctcttgctgagtttgtcctgtatacagaagtcattagtgaaaaacttgactgaaatgggcaaattattagtcaagcaacttactgaaataatgttatatttgaaatttggtacaaaaagaacatcagtaagaagtatttctttagtgacagcaatagaaccactttggtgcacaagcaaggtttcattattgggtaaaataagcttagtagtaggtaaagggcataggaattgaaacaacctgatgttattgcatatgtgtctagttgcacccgaatctataatccaagattcatttgaaaggggcagggtattatgagataggattatacctgatgtgcctcctgaggt

SEQ ID NO: 234638 - DNA, 2391 bp, Cannabis indica
taaaagtaaaactgatatgtgaatgttctgaaaaatgatataccataatgttaaatctttattctatgtgaaactgatgcaattctagatatatcattgatctaaaaaataatataccacaatattagaaattattttccaatcatatttcacatttggttgaaaagtctaaaatatagcactaaataggatatatccaaaagtgaacttgatatacatttggttgaacagattagaatatcatgtagcaacatattttagtcttcaatcatatatttgttggtatatatatataaatatatatatatttacatcaaactttagtattcacatgtcgatatttgaatttttatactgttctttgtttcttataacttttttcagctatggggaaggttcctgtaacaatattgtatgatggatattggaaacaaaaaaatcatgggctacatgttgacagccatgttactagatgatgatacaacttttcttgatgtcttagagctattgtataaagagttgccccaaaagttggattgtaatggccactacattaggatgtttgtagatatgaatattggagagaatggaaataatattttagaggttgttggtgatagaggtatgagtaggtacctacatatggccaattctaacaaggaaatcaagtacccactcattgtgacttttgaggagcgtccgatggtggaactagttcacagatctcattccaataatgtacgtcttgttttgaattaatcttctacaatggaattagatttatcttaaaatgttggaataaacattgaagcaaactcgacagactgttcttgtggttggggcagtagtcgtctagttgctctaagttctccttcaaagtatgacacaaattttgtggtaggatcatcatctagtaatgaagagagcagtagtagttcggttgttctaagtacaaacatgaacaattctccaaatattaaaaatgtagactgtgcatttgtagatccgactggaatagaagatctaaaagtcaaagacatctttgaaaataaagaacagttaaacacaactttaggtttgatctcaattaagaaaaaatttcagtatgtgactgttaaatctagccaaagtagattggttgtaaaatgcatggtctcctcttgtgaatggtacatgagagcttctaagtacggtaatggagatttttggatggtggggaaaaatatgtcaaggaccattcttgtccaattgatattgtgttaaacgatcatcagcaagctagtagcagactaattagttcttgtgtaattgacttattaagagatgatgtttcaacacgtcctaagaaaattatggctcatatgttgagagaatatggagttcatattagctggatagttggaagtaggatttatttcatgtatttgttcatggcatttggatcatcaattgaagaatggaaatattatagactagttatatctgatgagacatttttaactacaaattatggaggaacactgttttatggcttgtgttatggatgccaataaccatatattctcaattggtttttgtattggagagtcagagtataatgcttcttggttatggtttttccaaaagttaagaagtgcatttgggactcgggagaacttggtcattatttcagatagacatatgagcatcgcaaatgcaatatctacagtgtacgcggatgcagcacatggtttatgtgcctatcatttgttaaacaatcttaaatctgcattgaagttcactggtcatgatgtgctttttgataattgctcaagagcttatacaaagagtgattttgagttttatatgcgccaaatggagtccatcaaactgagaattcgtcaagatggttatgagaaatgggctagagcatattctactaggaaaagatagaacatcatgacttctaatatatctaaaagcttgaactcatcctataaaaattctaaaagctttcctggtaatgccttttttggcttatttctttttgtttctgcaagtatatattttttattaataggtatatgtataaatattattacgatatatcaatcatatttataaatatatagcattttagtattcagtatatctataagggatattggcggctaaaccacatgaattttacggtttggaacacttaaccacaaaaactgaatttttgacggctaaactacctaactctggttccgtttttctctgtacaactacgtccaaaaatcacagttaagtgccacagtggactgttcacgtgtacacacctgtacacgtggcaatttttagtggtccacgtaatattatttaaaaataattataaatattaaaaaattaaaaaatcaaaattttttt

SEQ ID NO: 234639 - DNA, 1757 bp, Cannabis indica
ttaaaatgggctttatttagggtaaaaatcccaacactattaatagttcaacaaaaaataaaaataaaagaacctacaattaacacgttaatttttttatctactctttctaggagctcatcttctaatagcgatgttaggataaaaatattgctcttttgaggttcatctgcaaatgcccgcccccaaattcaaatatctggttgtccgagagattactcatctgaaagatagaagatcttttcaacgtgttgtgtgtgcaatttaaggaggagtgtcctcaaacggataacaatttcaaattgaaaaaaatatcaacaaaaactaacactaaaataaaacaaagtctcaaggtattcaaatgcacaaacattaaatcactgtgaaacacccaatcatttggtgaacacttcaaactctgttagagtctgaaatcataggctggtaccaaactctgtgcgaacaatcaacatgttctatctaaaagtgaaaatattcaaggttcatgaagaaaaaaaggtgcgaatattcaagttacacgcaaaataacagtagtttttccatccctaattgctcttctcgcacccatcttaatcaagctctttgcttcctaaatgctccgccaaataaagttcgtgttcggttccaattcaacagttaaaaagttaccattgggaaaatatctggctttatacagcttagtaacaagagattttttattagtaatcaagcgccatccttgtttccccaaaaaagccatattatagtccctcagattgcaaaaaccaagacccccagcatccttgtgacgacttagtttttgccaactcatccaactaacaccttttgtatgtgaattagattgtgatttccaccataatttagccatcaacccctcaagagaagaacatatttccttcgtaagaaggaacacactcatagcataacttgaaaaagattgagtaatagattttagtaataactcttttcctgctttagaaagaaacctggttcccaactgagaattttctttttcatcttttcctttagaaatcccaaactagcattcttacttcggcccatagtacaaggtaaacccaagtaagagctatgttcagaagcatctggtatccctagtaagttgcaaatgtgaacacaatcaccagctttagtattattactgaagaacatagaagatttggcaaaattcaccttttgcccatatgcacgctcacagatagctaaaagattaaggacattagcagcttctatatcattggctttataataaatatagctatcatcagcaaataacatgtgagaaatagtaggagcaccttttgccacacgataccccattaaccaccgactctgcacgaacctcgtaaccaatgatgagaacccctcaacaataggggtaagcatgggttggaaatgggccgaccaacccggccaacccaacccgaaactgaggcgaaacatggtcacattccgaatctcacatgggttgaaaacgaatcccaaacccgcaccaaaactgggttgataatcgggctaatagttttccaaccctaaactacggccgaccagcccaaccaaactaaataatatctaaaaactaaatataggtatagattttttgaaaaaaccctaaacctaatacaacaacataactcattcctctctctccaacaacaaacccactcccagccgtcactctcactcaaccctttttttttattttgaaaaaaaaaaac

SEQ ID NO: 234640 - DNA, 684 bp, Cannabis indica
tatcccgctatactaaaaatactaagatgtgattctaatagccatacaccgtgttccaatgttgtcgggcaccaaaatatgcaaacttataaaattgcatacatgacatattaaatgcattctgaattcaaaatatatcatcataaataaataattcaatactaaaatatttttcctaattaagtcctaattatctgctaatttccaaattaaagctaagcggcctttacaaatgaagtctgaagtaccattctctactaaagcactcatctcttctatcattgcagcaagccaactaggatgagacatgacttcacgaactgttttaggaatagtgatagaagcaagagaagcaataaaagagcaagaagaaggagacatatgattataataaacaaaagaagaaataggataggtacttttgtgtttaccttcttatagtgcaatgggaagatcattgttagggtttggatctgatgacgaagaaggaggtgtaggatatgaaataggaggcagatgaggcaaagggggcatacacctggagtacaccataataggaggtggaggtggaggtggaggtggaggagacggagatgtaggcatgtcaagagatgtgaccaagtcaggtagaagaacaagagactcgtcagaacatgtgtcaggcgcataagatgtgatagaata

SEQ ID NO: 234641 - DNA, 2088 bp, Cannabis indica
agactttggtagaaaatcaatttgataggaaaatcaaagtcttaaaaacagattggggtagtgaatttcaagctttctctaaatgtgttattgaaaatggcattgattttaaacattcttgtcctcacacctctgctcaaaattgaagagctgagaggaaacataggcatatcgttgagatgggcttgacacttcttgcccaagctcacatgcctctcaagtattggtgggaacatttggagttgcttgttatccttgtattagaccctatcaaactcacaagtttcaatttcattcagttaaatgtgtcaatcttggatatagtgattcccacaaaggttacaaatgtctaagttcaacaggaagaatatacatttctcggaatgttatcttcaatgaagacaacttccctttccaatctggttttctaaacaacttccaacccgaacaatctgtctgtgttagtgttccatcgtggtctgcattatttcaatcctccaagagtcaatcaaatttggctacaccaagttccatgcaccaagtccctgaagcagcagccactgagattaatcttgactccactgatcctagtgatcaaaattcacatcaggtattagactcacccgcatctattgattcacagtttcacgtttgtactcctattgacaaagaacagaacagtagcatttctccaattagtgttgcaggttcaattccacagcctgaaacacatgatactgctgaccaaattgaatctgcaactctgaagccctcgcatcctatggtgacccaatcgaaagcaggtatctttaagccaaaaatttatctcagtcaagctcaatggcagtggaaaaatgatgaaccagctactgttgaggaggctctatgtcaacctggctggaactctgcaatgggagatgaaatgtcagctttgagaagaaataaaacctggtatttagttccaagaaagccaggtatgaacatcattggcaataaatgggtgttccgagaaaagagaaattcagatggtactttgcaaagacttaaggcacgtttggttgcaaagggatttaatcagcgacctggaattgattttggagagacctacagtccagtaattaaagcttctaccatgagaatcattctcaccattgctgtctctaaaggctgggaaattcgtcagctggacattaataatgcgttcttgaatggcactctccaagaggatgtttacatgttacaaccgcaaggttttgaagatcaaaaccaacctgatgcagtgtgcaaacttaccaagtctttgtatggtctaaagcaggccccgagggcctggtatgacaggctaaaaggaaccttactcagctggaattttacaaaatcaagagccgattcatctctgtttttctacaaagcttctggtacaatcataatggctctaatctatgtcgatgacataattataacaggaaatgatgtctccaaactcacgaagttcattgaaaaattaaatgaaatgttctctctcaaggatctctgccctcttcagttctttcttgggattgaagtgcacagggatgacactggtttatacatgagtcaagggaagtatgtcaaagaactcctactcaaaactgaaatgcttcacctaaaatcatgcaacactccaatgacagccgggaagcctttgtccaaaacagatggtgaactactttcaaacccaacagaatacaggagcatcataggaggtttgcaatatttgactcacaccagaccagacttgtcctttgccgtgaacaagctaagtcaattcttgaaatctcctactacaacacactggagtgcagccaaaagagtccttcggtatttgaagggaacaacctaccatggacttcatataaaaccttcagatcgattggctataacagggtagtcagatgcagattgggcgtgttgcccggatgatagaagaagtgttgctggctattgcgtctatcttggagacactcttgtatcatggtcgtctagaaacaggcagttgtatctagatcagtacggagtccgaatatagagcacttgctcaagtggcct

SEQ ID NO: 234642 - DNA, 921 bp, Cannabis indica
tactcacatatatcatttttcaatataagctccaccaggcataactctacatgcaattactatcttacctaatgtcctgcaaacgtggagattccaaatccccaagtgctcccgaccaactgtcggtaatcctagtcacaaattttaggatttacaagtatagggttaatccctaactccactttcacacaatataaacttggcattcaaatcaccgatattcacatagagctcgaaacgagctttccaacgatataaagaactccaaaaatggagtccagatcatcaagttatgaggattcgaatattacattcgaatttgcccagaaataaaagggcgggccgcgacactccccacataaggccacgacacctgggtttgaatcccaggccaacaaccagaggcgggccgcgacccctgggttccaaacccaaaaaacctcaaaaagtagcttcgaatttacatggtcaaacacaccaaaatcaccccaaaacctaatcaaactctcagaccataaattagagttgtcaataaatattcagagagttgaaatacaaatttcatgcatcaaatccaacaataaaaaccctcaaaaatcagatttaacaacatctaaactaagctccgaagcttgagctcaaatcaacacaactccaacatccaagacttgcacaatcaagccataacctccaatttcaagcaaacaaattcagagctagaaataacataataaacactaaatattacccaaagcaaagatcaaaagttttagacacaaacatgatcataacaccaagaacaacccaactaacacaaacatgcaattcaagatcattcaaagctcaaaacataatatccaacataaatttcagctactaatttattcagagttgaaacactacctcaagcctcaagcaaga

SEQ ID NO: 234643 - DNA, 1236 bp, Cannabis indica
ggcacactaacaaagtcttaaaatgcaacaaaccaaaatagttttacatattaaattatataataatataattcctcattaatacataattaatttaattagggttgctaatccggttattaaaccttagagtattacaattagttactagtgtatagaagcgggataaagtcgaattgaaaggtatgagacgacccataaattcttcttatttatttcttatctattttatattattctatattattttatcacgttatcagcacgactctctgcccgagccccaaggcaaatattttgttaaagttcttgaattgtttcaaggttaagatccactaaatatatatttatatatatactcatctagctgaaggttcgattcacgaaactctctcacagagagttatacacatattctcgtcttcccaatagatgccctatcggttggaagacttagcggaggtcaaacagaggcaagggggacctttgaaagactatctccaaagattcatgatcgatgccaccaaggtcaagaatctgacagaggaaggatggtacactaccatcatgagtggcataataactttgagtgagttatggaaagacattcgtcgacactcgactcaaaacatggttgattccttaatcgggcagaaggctgtgtcaagcttgaagaagctatcaaacaagcctaaaatgggagaccaacaggtgctggacagactcaaagtgttggatagccctcaggtctgtcccacatacctgtcagcatgattagtgttggccagccctccaaaggcccaaaataatggaggcaagtgtggcagcacaactctggcccagcaaaaggaaaaagggggaaattaataatctcccaagccacaagactcacaagagtacaatgattttggccatgataccaacgagtgcaagcacttaaaattggaaattaagttcttgatcagaaagaataatctccatctacgtcattatgtgaaagacgactaaacacaggcacaaggtgcccaaaatagagacctagtaccactgccaatggcgggtcacctaggggtcatattggcataccctatatagcaagtgaaaccagtaaggccatggagcgctatgctcagactctccatcatgagcgtaaaaatgacatcctagctgtagaggaaagagattccaagcagcttaagcttggagagcctgatatctccttcataggaagagatg

SEQ ID NO: 234644 - DNA, 779 bp, Cannabis indica
taatttatttttagtcacaataacaacaagtgttgtgactttattgtgactaaaaatacattaatttagtcacaacaaattgtaatttttgtgattaatacatttagctacggactttttagttacaacataggaataataatttataattagtcacaattaaaaggaaaatatttgtgcagtgataatcttgcaagtgtcaaattagtttaatccgaaaaacccaacaagaaagtgtccaaagatttatataattggtaggttgaactttagttaattaggtaccctgaagggtgatcacctgacttggtcacgggtcacacgaacctgcaaattgatcgtgtcaagtgacatggcatgtactcacccaaactatagatgctttcatgttttttctctcctacttttattcccatacttactactattactctactaccactcaatactatagatctcattctataaatatagatatgtgacaatttcatcatttgctttcccctttccacaggacaaaacccattagcccctcattattccttccttataatattattccacattcttcactctttcaaattctctcttcactctctacttcatggcgaataataataataataataataataataataataataataagccacaagaagaagctttaaaataccaggtgatcatcatcatactatatctttgttataaaatattaatcttatattgtgttcctaatttgttacaaaatttgtctgaatttgtagacatgggtcttg

SEQ ID NO: 234645 - DNA, 718 bp, Cannabis indica
aaataaataattatgtatttttcgggcatggattttagaaaaaattaacttttcaactttaaaaataattactaattttatttatgaactatgattataatcatattttgttttttaatttttaccccggttaaatcgtactctttttaactaacaaaatcttaaaatatattgtaaattaataatattcaaagttaaagagaaaatatttaacatttctaattatttgaggggacaatctaactaataaaaaaaaaaacaaactcataaccaaaataccttatttattattaggctaatttagatttttactaatttcgacatttattgaattattcccctaaactttttaagttgttaaaaaattttctgaataattgacattgttaaatttaaattttttttattctaattttactaaaaaaaattcaaatctagcacatattaaagtttagagaagtagatatcaaaatttaagaaatacgattcagtacatgcacaatcgttatattagtaaaaatttgacgaaatcaaaaagaaatatttaaatttaactatttcaataattcgaaaaaaaatttaaaaatataatttaatatatctaattacccttcttattatatatatttttttaaaaataaagtaaaataaaataaaaccactactaataaagctagttcaccttcttcttgctcaaaatctccaaaaactctttcta

SEQ ID NO: 234646 - DNA, 1282 bp, Cannabis indica
tgcatgtgcactacacaatactagtacgttgtggtataagtattttttctatacataatttaaaataaatactaaattggttatagatatttatatatatatatatacacatatttagtacaatttcgtttatataaattatatataggaaagctttttttaacatgtgatctcttagagcttttctaattttagaaaagttttgaagattattatgagcctttatatagatgcatggattattttttaatgagtaatattactaaaaaattataataattaaatgttaattttaaaaaaattatttattaaaaatgaagttttaatccaataccgataataaaaaaaaaataaaatttttatacttaattttattatttaattaaaaagaaattaaggccttgtaattgaaagtgcttatagaatgtacaaaataaatttttgagtaatgaaaatacaatctggttcaccaaaaaaaaaaatctattttaaaattatatctcaaaaatatgttaatatttatataaacacttataaattgaaaccaactgtgtcacatattcttaatgagaatatggatgaaatgattaaataacatacacttttcattatattaatatatcacacacacatccacatatacattatgttactttatataactaattaattaaccactcaataattttatattcaaattaattaatattgtaataataataataattatacattgatataagtatatacttattaagatctaaaattatattacaatttatatactaaaaaaatatggatagcccaaaatttagggtaacaagcatattatttttattaattatttttaattttattattttcagtttgtgaaggccgtacctctcttaaggttagtggtaattataattataataataataatcacattattaataataataataattatattatttcatctatgatgaagaaagttggtgaaattattattgggtcaaaatattcaaagaagaagaagatgaatatgatgatgagaaaagctcaacaagtgttacaagtaagcattgagaaacaaggtggtcatggaatagtttttgtgtctaaaagggttagtccaggtggacctgatcctcatcaccattaattaatcgtcataattataattagagcagtgctaattacaacattctattctaatctctctttctttatttccatccgaaaatacatgttagaatatatattttttcatggtggtgtacttcggtattgttacagt

SEQ ID NO: 234647 - DNA, 1072 bp, Cannabis indica
atctgtgcatacatgtctcaaagatgattcaggccttgaagaagagagtaggagatagctcgggcttgtcttctctggccaagaattctaagggtggtgagactctgtccaaggagaaggtgccagttgatgaggtcattgaactttccgaggagcgacctgtggtggaccttccagttcagaaggtctcgaaatccaagagttccagaggagggagctcggacagatctgaacaagttaggaccccttcaacaaatgcggcgctgtgcacggaggcctagagaggcaaagacatggtccaacaatacctgaacctgtcacttcttgaagtgaatgatcagctatccggagcagacagtgaattatttttggaactggtcttaggaggggttttgaaggaattactcgggtaaatctctttcttttttatttctttctctttttttgtagctcggactttgacacatttgccgtgcaggccaatgcgaagatggcttacacgtactcccgagcaaaatcaactacaatcaagaaccttgccaccaccaacacattaaagagggatgtggaattggccaagaaggaaactgaggatatgcggagccagctcagggtcatgaagaatgaacttggggaggttaacaagaagcttcttgctgtcaacaccaaggttgatgagctgaccaaatagctacaagatatgccttcgaccgagcaactagaggctaacaatgtttctttatctaaagaggtcagctcatcaaccttggtgttaagaactggaggcggatgttaagaacaatcagaccatggaggagcaacttgtgaaggaggtcagacataagcaatccagggtggaggagcttgagaaggaggtggatgtcctggaggaagctgctcttgaggttttttatgatttttggaaggccaatcccaaaagaaaccttgattatcttggtgataccaagattctgttgggttttgtgctctaaataaaacacatttcaatataatcagatttactaattaataaagatcagaaatcattttatgttgcatggttcacataatt

SEQ ID NO: 234648 - DNA, 1071 bp, Cannabis indica
tataaataatatttgaatcaagagtacataacataacattttaattttgaaataattaatatattataagatatagtatctagtatttcatttttctaattctctatctctagtaaacattaaatgtaaaagcaaaataaagatagtggatgaactacattattttcacttaacaaatatttcattatagaagtatgtcccataaagaaagaagaagaagaagaatccttttattctttaatgtagattttatgtttgatttgctacttctttttaagaaggttagagttgcatgtgtttgtattgttacagaactaggaatttggtgattggaaattatattctcttcttagctacctaagctttacaattaggtatgtgaataatgtgatatatggaaaacaattgtgtgtgttttaggacaaaattcttttatgatattaatttttaaatttatttatttatgtttggtaaaattttcttatatttacatatttcgtaaatttgaagtgtcagttgaatattattgttagatatcaactggattattattgtattggcttcgaagttaaacttttacgtatacaaaagtatacatagtagtcatccaatttatatttaaccgtgatatttaattgacgcttcaaatttaaaaaaataaaaataaaataaatctaaaaaagttttaaaaaaaagaaagtcaattgtataaaaactaaaatataaacaagtttcactattaattactctctatatatgatatataatatattatatatatatgaatatgtgtatatgtatgcatagtatattgtgtttttatgttgcactatgctttggatgtagtctttttcagtagttttactctatagagattatattaaagtgacagggataaaattggtaaagtgtttaaaaaaaagaagtaaaagtaatagacttcaaaaaataaggtaaaaataaaagaggacaatataaaaagggtatggagtctaatttcctcaatttttttattagcacgacacgacctactatttttattggtcacgatacatctcgacccactatttc

SEQ ID NO: 234649 - DNA, 1491 bp, Cannabis indica
ttttaatttaaaatacttaaaatattattgatatttttaatcttatttttaaattttcttttaataattttgccttaacaaattttttctttcttttcctatttaattaatttgaaaattatttattacaaaaaataagtaaatactattttttcaattcaaaaaaagattttttcgaacaacattatacaactctttatccctaggctcgacgatgtttcaaggtggctattcgggaaccatggacctataattctaagctccaataaactagattatttattgagtctcatcaactaaataatcatgtttattaatttcatgattactccactatataaatatggaactgaattcttagtaattagataattatatttagtaaattttactacagtgaccattgatataatcaattcttatgattagccctccttatatcggttcgtaattagttttggtcaagttactgttttacccttctaattacttagttatgctttagtaccattaattcactagtggaagtataatttatatcccatctaaatttgcgcacaacttgttaattccaaaattaacatataaagggaaccaacattcaatccgtaggaaagtaagaattccattattatagattatgttcccgaccatccacattacaattagattcctaataaaatagaagtttaaagaatcatcttctttgagaaacttaaatgagtgaatcgaagaaactagtaacatgaacatgagttcatgattactcaagatttaggccgatctactatttatgatatgaattaggtctttatcgtaaacgttaagtttgatgaaaaaaattttattcacatcgatccctatcatatataatctctattatatacaataacttcacttagatgtcatgctacatcagtaatctgaatcaagattacttgcaccgaataacaggcatcagtgaactttactagcaactattcattaaatattctcaaactttaatattttgttgaccgctttattcatggctaagtaattttaattctccgtacaactacaagtcacaacctcatatatgattaaagaattttctgaaatttatataaaaattattgaatattaaatattaataacttaacatccaagcatgtatcaaaatgttcaactcttattaataatccaaaatatttttacatgcttttcaaggcataaaccctaacactaactagcccaatacactttacctcgtatcgctatattaagggagacgcatattgattatccctcttatcaaccacaaaacatgtagacaagggtagaataataaaacctagtgaagaccccctataggtaagtccccaacacttagctacatatcaagcataagcttcacttgccttgagcagtgagtccataatgggttcaataaaaatcaatatgtggcaaggtacaagcttgttcatccacctcttatgtcatgacttacca

SEQ ID NO: 234650 - DNA, 1376 bp, Cannabis indica
aaataaaaagataaaaaaaaaattaggttcggagtttgttagttgaacctacaattaataatattcaagactaattataaataaataaaatatattaattatagtgtagttttcaagagttaatttgagccattagattaaatcaatggctataaattactatccctattgatatgtaaaatactcaatccctactataatagtatatatgttatatgtatatgagatatataacatatatgtttatataattcatattatgtatgttacctacatattatattagttggcgtaaaattattatttgagagttataattcatgcatgggagttatatattaattttgtacattaatatacaaattatataatctatatgataataatgttgatagtaatataatagtgttcattactattgatgtggagattattatcacatatattatgaatgaagaaaatttaaaattcttttttcaatagtgattttgagaagaaaaaaaaaatgtaacttgtgagaagttacagtctttgagaatttaaaatgataattatctcattttatgttaataaaaaaaaaagtaaactatgagagttatacttatgagaattgtcttctcatagcaagaacaaatggatcaaaagtagatccaaacttgtgaaatgagccataaattagaagagtaattttggactcaaaataaagtgaatcaatgtggattcaaaaattgtaaagagataacaaaattggagaagcaattttgaattttaaataattaaagtggtgaacaaaattgatgagaattttgttaactttggtataatatttgggttaatctcattgaggagataactttaaaataatgggtaaaaataatcacattattttatgagtagtaatgtgagtttgatattttagttttgttgagaaaactaaaaatgtcaaatagtattttttaaagttaccttaagaaatcatttcaagagaaaaatacacaaaagtaatattttatatacactttatggtaaaaatgtgggggtgaactacaaatttaatcaatatgtgttgagacagcattgagtaatttatttgattttgaattcaaattctaaattgaatttggctatgtgcatatgtaaaattttgacatatttagtgccaaatttttgtgaaaataatttcaagaaggaaattaaatttaagaaaaataatagagaaacaatagttttctatcaagatattgtcttgataatgaaatgtgaaagtgtgggggtgtatactccaatatgagaaagtttagacatacttggtgtctaaaattaaaatatgagaatttagacatgtttggtgtctaaattagtgtatttttgatatg

SEQ ID NO: 234651 - DNA, 1517 bp, Cannabis indica
tctgacacaaatattattttatttttttcataactagttttttttttaaaaaaagtaactagttttcataggctaattagcaattttcccccccgaactttgacatataaatctaacattcttaatagtttagggggaatttttaacggccaaaaaagttcaggggacacgatttagtacatgtcaaagttcgggaggaaaaattgctattaacctaaaaaaatgtagtaaaaaataaatggaaagaaaaacaaaataaaaatgatagaaaaataaagtgtatagttaaaaaaataataagaaataaataaaatgataaataataataataaaaagaaaattaatgagaaaaattatataaatataaagatgtagggtactcaaagtttacaaatttaaatacacggacttttaaattatgacaaaacaaataccataaaaaaaaagataaaaataccataaaatatgcataaacaaaattattccatatttatcaaaaactaaattatttaaaatcccatataagatattttattgtattagtacataggttaccaaataatattttgaactgttaaaatacctatattttgatgcaattagttgcagtcgtctatattttcatgcaaaaatctactttcacagacaaacttaatagtggaaagagacaaacataacaagcttacatactttcacgataaatatgcagacatatatattaagctatgtgcttatcaatattgatttcttacaaactatatatggatacaatacagctgagtatatatatactttgtagtgatatgtacatatgcatttgagtaaatgtatgtgtatatataggattcgatgtatatccatatatgcacgtggatgtaattatgttatgtatactagtatgcgtaccatggttcaagtaactctactattaccttaattataatcaactgaccttttatatagcctattacattctattattttcaaagctaataaatttgttattatttcaaaaagaccagaggtaagacagtaaaaaaaaattgtgggaagagaggctaagcagcagatgattaatttggatgcataaaagagcaaaagaaagccacactactcccacatgtcatagtatcaaataaatgagaaaaaagaaataaaataaaagtaaataaaaaaaatcatgttgagaaattggtgcgagagtacctaggaggagaattgtagagtttgctcaaagtcgaagcaaatccaatccaagtctggcagaagcccgataagttggaggttggtaatatatttttataaggagcgggcgcagagtgatcaggaccaatcaatcaactatcaaactcctatgtggatcacatatctcaacgtggcagataagaagagataacaaaatgagtcatcttgcggccaagaatgaatgacatgcaaccaacttggaacaacactaaaaaacaatttaaaatttgtcatcttccaatttaccctttttcttttatgttttcaactag

SEQ ID NO: 234652 - DNA, 1359 bp, Cannabis indica
tgaaatggtttatttagggcacaaaacccaatagtaccttcctttggttgagttttcatattacaatagttattagagtattgtcattatggcaccatatgaaatgttatatggaaggaagtgtcattcacctattcactaggatgaagccggtgaacagagatatcttggacccgaagcagtccaaagaactagtgaggctattgagaagattcaagcttgtatgcttgcctcaaaaagtagacagaaaagttacgctgatccaaaacatagaaatattgagttacaggctagggactttgttttcctttgggtgtcaccaatgaaactgattcagagatttggaaagaatggaaaactaagccctagatttattggtcccttcaaaatcatagagagggtaggttaagtagcatatcgactagctttaccccctactttatttggagttcacaacgtcttcattatctaaatgtttaggaaatatgtgtctaatttgacctatattgtaagttatgaggacattgagctctagacagaattcatacgaggaatagcctgttcaaatcttagatagaaaagagaaattattgcgaaaccagaccattccagtagttaaggtgctatggagaaataataaggttaaagaaagcgacttgagagttagagtcccagatgcaggaatagtaccctgagttattcaggtaaattttaaggacaaaatttctataaggaggggatagttgtaatatcctgaaaaatataattatgtttaattagtcatattttattagttatgtagttataagtcttaaagtaaggtgttatccaaatttttgtcctcatgatgtggcatgcttatgtggatagaacttgtgccatgtggcagtacaactcactaaaaggaaggccaagtcagcattcgagcaaacaaatactacaacactcgaaaggggatcaagtgacagaccagctcaatctcaagagctggccagccacccctcgcttgccccatggtcggccaggacaggggcagcatcatggctggccagtctggccagcacaaacccctggccagccacagattgcactataggtcccacaagacactcctacacatggacatcaaaggtgggatgcaaattgggccccaaaagcccaactaaatagctaaataatatctaaaattaggggaatttcggtcttttgtaaatatctaactaactgtgatatttttaagggatttggattctaaacctaggctttaaggcctgttatataaacgccttaacctttagctaaaaacctatgttgcctaagttgcctctaagctagaaacctcaaactctcaaagtgtca

SEQ ID NO: 234653 - DNA, 737 bp, Cannabis indica
aaaatacgaaaatcggcgattcttgaaaattgaccatccggaattccggttggtgcagccctgtaccattcggaattccagatcaccacaccagaaactcgaaaatttcagatcttcaaagtcccaaaacatgctccaaacctaaccaattgttcccaaacttcacaaaacaattttataacatatatacaacatatctcaacactcaaaaccaacaataaacttaaaatcacaacttcaccattgttgagtgagttttgagttcttaaactctaactcactcaactcaaactacaactacaaactcaatctatacttcacagtaaacaaacataatagatacaccccaaatctcaatataacacaaacaaacttaaacaaaacctaactcctcaataaatcatacaacaccaaactttttctaccaaaaacacaaggatagaaaagagataagttaccttgatttatccttaagcttagaatcagtttcaagcagagatttatggctgaaagatgaagaaaaagtctgaaaatcttgggtcgtcttgattttcttctatggcccaaataagagaaagaaaagaaagaaagagtttggaattttgtctagtttatcacttatatcctcatttatcaactctactaaataaaataaataacttaaaacctaataataatactaatcctcaattcagcctagaaaccacaaaagacaaaatagaataaaaccttggtaa

SEQ ID NO: 234654 - DNA, 1056 bp, Cannabis indica
atcctgatcctcttcaaccacttgctgctctgccattggcccctcatatttcttcccacatctcaatgctattaccttacaagtctcttttgggtttgccttcgtagtgctagacaaattatcttgggtgcggttggccatttgagtagccaacttccccctttgagtctccagagttctaatcgaagcccttgtttcagccgtaaaattgtagtagaaaattagactaaacactagaatttcgaccattttttttgttgagtgggttgttgagtttgttgggtttgctgttattgttgttgcatgtatccttgttgatgacgattcccttaaggaaaatttcaattctgagggtagttcccaataacttgagcttgttccatgggcaggtcatcaacttcaataaagtggcattgctcataactatggggtcctccacacaactcacatttaacttgttcatcttgttttactttggttgtcattagtttagtagggcttcaacttcagtagttagtttcatgattgcatcaacttcatgcaactctgccactttctttgaattgctccatcccttggccactattgatttttcatgaccatctcttctaagagctcataagcttcattggcactctttctcataaaagccccacaagctgcagcgtcaatgagagtgcgagtagtacagcccaaaccgttgtaaaaattatgaaccagcatccacttttaaattccacggtgaggaaactttctgatcaagtctttaaatctctcccaagcatcatagagagattcattattaagctggtaaaagttattgatttttattctcagtttggcagctttggctggaagaaagaaatttgagaggatctttagggccggttcatcccaagtgttgattgagttagatggcatagacatcaaccaaatcttggctcgttcttacagtgagaatgggaacaaacttaggcaaattgcatcatcgctaactccattcatcttgaatgtttgacaaagctccacaaagttagctaaatgcatgtttaggtc

SEQ ID NO: 234655 - DNA, 809 bp, Cannabis indica
aaaaattaatatcgttttttgttttagtatgtttgataataaaaagatgtatttgtattgtattgtatacacaatgcgttttgaaacatagtctctatttagctattatagctgttgtgtcttactagaagtagttatactaatttgtcctcaaattatataaattttggcaagttagtttttaaattttattttctgataaattaatccttaaactttaatcttttaacaacattaagtctccactattagatattgatattttaattaaattgtatttgttttacatactttaatgtattttttgtgttaaattcaaataatttcattttttaaaatttaatattttaataaaaatatttaaattaatatatttttaagtactcatataatatatattgtataattataatatttaatatttttaagaaaatgtttaaaatattctatattttttgttcaatacatattattaataaaaaaaagagtagagatattaacagactcatacgatggtaaaatctcatgggtttgccagcaagcataagttaaagataaattttaaaatataacttacttcagtatttaaaaaaaataataatattattgttgaactcaaaaattggccaactgacagcgaggttgtattaatctaatattttccacttgttacacaattagaactagaaagtaggggcgtacgtcggtcgatttagtcgggttatagcatatttttatcaacccaatataaatatcgggttgtaaatatttaatcgtaacttgcccaatcaaaaattagagaaagttca

SEQ ID NO: 234656 - DNA, 2173 bp, Cannabis indica
taagctgagttgaaaggacgcttttttcgcgggtagttggtgcaagagaattccaagcttatggaatggctccaaactcaagatgaaaagttgcattgcaataagcagtaaagcacgaggaattcagttcaacaaccaacacactgctttgagccatcatatgaaagaaaaaaaaacatcgacatttgaaggaggctctaatcgatgagaggggaaggaacgacgaaggattgtagcacccatattgggatatacggaactcaataaaagacaactgacgaatgacttgatagagctggaaatgaaggatcatgacgctacacttgatatggattggctatccattcatctattgctgaaagtatttggtcgcttttggaaacaaaggccgaagaccagattactttcaaagaagttaagctagccttatgaatttctttaatctcatccttaaagattagccagataaggaaggtatggtgtcaagcgttgttggccaatgtagtgcacaaagcactggagacacaactaacaatgaaaaacacgcacataatctgtgaattccaaaaggtcttttaagagatctaccggggataacctcagacaatgacgtggagttcatcatcaagttagctccaagaatgcttcaattttgaaggctccatacaaaatggtgattaacaagctgtagaaactcaaagtatagctacaagagctcctatacaaagggatctttagaccaagtttctcaccttggggtgctctagtaatctttatcaagaagaaagatggaagcacgaggatgtgcatagactatcgtgagctcaacaaggtgaccatcaagataagtaccatttgccaaggattgacgatctctttgatcaattgcaaggctcgactgtgttctcaaagatagatctaagatctgggtatcaccagctgaaggtccggaaggaagacatacccaagacagcattcaaaacacggtatggacactatgagtttttagtaatgtcttttggactaactaatgccccagcaaccttcatggatatgatgaatagggtgttcaaggagtacctaaataagtttgttgttatattcattgatgacattcttatctactccaaaactgtggaggaacatgaggaatacctgaggatgactataaaccgacttaaggagaaccaactatacgccaaattcaagaaatgtaaattctggttagagaagatcatatagtttccaaagaaggagtccaggtggatcctccaaagatcgaagcggtcaagagctggccaacacctatgactgcaagtgaagtaagaagcttcttggctctagctagttggttactacaaacgcttcgttgaaggattttccaagatagcaactcctctaaccaacttgacttaaaagacgcaaaagttttcctggttagacaagagtgaggatagattccaaacacttaaggacaaactaataacagcccttgtattatgtgttctcaataacaaggataagtttgtggtgtattgtgatgcatcgaaacaagggcttggatgcgtgctgatgcgaaatgacaaaatagtagcgtatgcatcaagacaacttaaggagtatgaacggacgtacccaacacatgttctggagttggcaccagtagtttttgcgctaaaaatatggaggcactatctctacgagaagaaatgtgaagtttataccacaacaaaagcctgaagtacttctttacgcagaaggaactcaacatgaggtagagacgatggctagagcttgttaaggactatgattgtgaaatcaactaccacccgaggaaggccaacgtagtagcaaacacgctaagtaaaagcagttatgccagcttggcaatactagcacaaatggagaagtcactacaataagaactccaaagaagtggtatatagatcattacataaaaactagctaacctaaccattgtctcgacgttgatacaagaacttaaagatgcacagatttttgatgagttcttacagaagaaaaggacaggcttgcaagagaagaagatggagaatttatctgaaggtacaaacgacatgctgaggtgtaagggaagaatgtgtgtagccaacaacgtagaagaaagatcatgatggaagcacacactacaccc

SEQ ID NO: 234657 - DNA, 889 bp, Cannabis indica
acaaaaataaaataattacaaaaaatgtgcaaaaaaaattatttgaaaaacttatacattttgaaaatttattacataaaactatacattttgttagagctaattgacagctcagctttgttttctgttttgctgatagttagttatgcaattaactgttcagtgtacaactgtaattctgttatgattgctgttgtaattggttgttagttaattgttactctggtgtgcttgtataaatactgttacattgttcaataacagatttgagagattctttcatctccttcctttggctctctttcttcctctttcttgttttgcatttctgttctttcattcatggcaaggagatttaatatggtatcagagcagtttccacctcttgtggcaaacatggcgactgtgggaaataactctgctgctgctggaaacaatactactggtacaggaatcaatggagctcaaactcccagcaggaatcacacgaatcaagatccggtgttcttcaatcacatcatttcaatccgactgaacgatcacaacttctttctctggaaacaacagatcttggctgcaataaagggaaatcggttgatgaaatacattacaaaaccaccgccaccatattttctcaatgaagaaggtgctgcaacaatgagagaatcaatccgatttatgctaattgggaggttcaagatcagctcctggtgtcatggttactgtcatcaatgacataaatcttgttaacaagaatggttggatgcaacactccgcaccagatctgggaagcattggagaagcacttcaccttgaaagccatgaaagaatttcttgaatcaacagtgagaggtctcagatatgctttagtacgccttagaccagacac

SEQ ID NO: 234658 - DNA, 1118 bp, Cannabis indica
agtaggtaaatgccattgtggaataaacacatgtatcatacttgcttttggtaaaatcaattttcatcataaactcatcaaatctaaggttccattgtctaggagcctgtttcagtccataaagtgatttgtttagaaggcatacctgacctggtttgtcatcatagccttcaggtatttccatgtaaattttctcctctaggttgccaatgtaggtaaggcagttctgacatccatttgatccaccttaagatcaaattttgcagccatggataggacaactctgatggtagtttgtttgacaacttgagagaatatgtcattgtaatcaatgccttcctgttgagtgaatcccttagcaactaatcttgcttttaaccttggaccttcacaccctggaataccatccttttgtttgaaaagccatttgcatttgattatcctctggttttctggtttcttgaccactgtccatgtcttgttcttattaagagagagtttctcttcttcaattgcttgaagccatgctgcactattcttcccagtgatagcttcattatagcttgatagctcatcactatctatgtcttcagcaacactaagagcataagcagtgaattcagcatagccatacttatctggagcttttgtggttcttctttctctgtctcgagcaagttagtaagtatccagactagtttgagtgtctctattagtgttatcttcctcaatgatctctgtgttctcaataggtctagattagattgtgtccacctcaatttgttcccttaagttgctggtttctggtgtagagtccttgacacttttcttcatagccatttcctcctcactaaacacaacatccctactaataatgcatttcttatgccctggttctaggcaccataacttgtaccccttcactccattagggtagcctaggaacatacacttagggctctaggctatagtttgtcctgtctgtagtgtgcatatgcagagcaactaaagacccttaaatgatctagcgttggtacttgacctgtcgacaattcttgtggagttttgaaccttaatggagcatatggacacttgttgattagataacaagctgtctt

SEQ ID NO: 234659 - DNA, 643 bp, Cannabis indica
atagttttatataatttgaatgattaaaatcgagatgaaacgaatgaagtttattaattgttgtaacactcttttaatatttttcataaatattgaaaaattattagttcatatgtttctcattttattatgtgggcttccattttgtgttatttcatagataaataatgagtttccaaattttaagtaacttggaattttgtttaaggtgttactcagagttgaatattattataaattcgatatttttttatcataacttttgtatatttattttaaaaataataaataatgatagtcacaattttttatatttgaacaaaaaagaaaaataagaaacatgaattagtaatttttctatcattttctatttttcaaaatcataaaattaaaaataaatataaaaagttactaaacatatcttgttcttaaaaaataaaaatagttaccaatcacactttttatttttcaaaaataaacaataaaattgtatttttattttgatttaaaaaaaaaaaaaagaatgaaaagtgctaccgttaacctcctattacaatctctacgtccgaaaaatatgtcggaatattttttttttaattttttttctacgagggcgttcgttatgcttacaacatcatccttg

SEQ ID NO: 234660 - DNA, 571 bp, Cannabis indica
taattttttaataatcgtatacgttgtagtcatttaacatatcttttaaaattctcacttttgaaaattttaaaataatttacaatatagaaaatagtctgtaagtattttttttcgtatcgtgctgaaccgacttatcaaaagataaaggtcatgtcatactgtgacaaaattttaaagagttagcccaatacattcataaatctacatttttgtgacatactttacgcggatcagtccatttttcataaatgggttaatctattttcttatacgagttgaattgagactttactttcttactattttttttacaagaattaatcagtaaattatatttattttttacaatacaattatttttatataattgaatatttattaataaatatatattattattattacatgggtaaattacgacataaatacctaatgtttcaaattttatatacttaaatacctaatatttatttttgtaggtaaaaatacctaatgttacaattctcttacaccgttactactaagaatgtcaatcgggccgaactgggcccgacccgccacaaacccg

SEQ ID NO: 234661 - DNA, 1015 bp, Cannabis indica
tcatgtaatagctttcataaatgaaagttactacggtgacaaaattattccgaccaatgatgaataaagattaattatcattctaactgtgtcaattacttttatagcaagtcatgaatttaccatcataatacatacaaagggtttgctctaacccaaaggccaaacatacaaaaattgaacttgggaaatgcaagtgaccaagagttataagtctgcttggtcacttaggaggcagctatacctgcacaaaggatcggtaaataacaagctcaaaaaaacatattagtttgcacgaaaaatactaaaacaaggtaaaatattcatttaaagatgacaaagcatgatataatcttgagattaaaggctacccggtcagccagtcatctcaaagcaaaatgaagcattaccaagtttaaagactacttggtcggtaatattttatttaacaaaggcccatgggccgaacaaaaagaaaaataaagaattttacaccgcgaaagtccgatcttctttttacggattgacttggtcattggaggtcaaggtctatgtgttttgattggttgggagtgtggaattggcacttcagggttttctttggctgcctgacccgtacagtaactaagatatgcctctttggtatcagcaaggtaatcaatgtttccttttgttttgaccttctagaattcagaccctccctcttgtccttcaggccattgatctcttaggacagagcctcgacgtcctcctcaagctaggtggtagtggaatataatcgtgattatatgtacaaaagttaaattccctaatttgtcagttcactggatttaaactggcctgataataagcgataggtatacttacaccttggataagtgttatgtcctttccagggcattggcaaaatttaccagtatcggatgtatggagtatacattagaagggactgatattgatcttagataaaatatcataaacttactattatatctttctaagtcaatatcaatgg

SEQ ID NO: 234662 - DNA, 1525 bp, Cannabis indica
tttactagccaattttttttaacctcggagtgtttattgaaccacatctaatatttttaagtctatcaaaatccaatctaattatatattggatgttaagttttaccatccgattcgatctaattaatttcagtcatccaatcaatccaacatttattgtgtgttagattggatcggttctatctattagatatatttcatatatatatatttattggtttaatttagatttatcatatattttagatttagtattttttggatcagattagatttatttaatattttaggtccagtatgtattaaattggactggatacatctaattcaagaaaaaaaaagtaaaattttaatgttaatttttatatatacatatagattttacgtataacaatataaaatctaattactcatataaactaaatgaaaatactaattaattcaattagatattagatgtattgaatttttagacacccaatccgccttccgatcacaattagatatctaatatttgatagtcgattgtaatcggatcagtcagttctcattggatttcatcattttaggcacacccctaagttgagaggttttttttttttcttgaatatattttcaattttattcactttctataaaaacatacaaataccgcgccatttttctaatttcctatttcttcatactcgttacttctgtctctgtcgtctgtttcaatcctctttatatttttattaattattaattatttattaaaataattatattccaatcacagttcaaaacccaactaacttccttattctctctctattttaaacctataaaatatatataaataattaaaaaaaagaaaagaaaagaaaaaaaagacaaggaagagaaaaaaacacagcaccttctgaggtccgattctctctctgtccgtgcgagcgaggaaccggcgggagtctgatctcgccggaatttcgagctccatagccggaatcttcatttctgttcacctccgtgctttagaatcgtccatttatcatgtacgtttcgtttcagttgagataaaaagtaaatcacctatgttaattttcttttttaattttgttctggatttgggatttgatggtgaaattatgggttggcaatgcaggtagaagaaaacttgtttttcagaagaagctccatttttgtttgaaattcccttcttctctcttttttttttttcaaaagaaatttttgctttcgttcagcctttttttctctttcttgtcaattttccagagagaaaattgccgagaaagagagcaattgcggaattcggatgttttgttaatttcccggaaaggaatcgattttcgggaacaggctggtgatttggttgcgtggttgtggctctattacattagggttagatcctgctctctcatgttttcatttgatctcttatgactataatttcaaattttggtggtcaatttgtgaaatttcggagtccgattgtttttttaatttagttattattattattatt

SEQ ID NO: 234663 - DNA, 819 bp, Cannabis indica
caagaattaaaaagacaacttgccaagcctcctatactctcaaaacccctagatggagaagaattaggaatatacctggctgtcaccaaatatgttataagcaccgtgctgataagagaagaaaatacaattgctaacgccttgtcatgcttgagagcaacacagtaacagataaggccaacctagtcccgatccagttcttagaagaacctagcataaactgtgcggaagaagtcaaaatgatagacacagcaccaaactggatgacacccatagcagcttatctcaacattggagaacttccaaatgatgggaacgaagcttggaaaatgatgtgaaaggttgcatgatatatcatagtagaacgtgtgatatataattacactctcaattatatagaacgttctatatgttctacgatatagatacactatgaaattatctatcattttaatcccaataatcaaagatcctctatagatgatttacattgagtagggacaaatttatctttccaccccttaatggattttatccttaaaacactcagcttcttataaatgatatttgagtgaactaatataatcactgaaagaagagctcttccatttatatatattaatccaagctcgaaggaaatcatcatttcacttgtttgtccagatagaaactatagattctgtatctataattagcgctcacactcaattgtactattatcttcccaagatgtacgtgtgacccgagcaaaatggtaggctttaactaacaactctaaaacacacaagtaacacttttaagatcaaacctaatcatgtc

SEQ ID NO: 234664 - DNA, 1475 bp, Cannabis indica
ttaatctttcaaattaaattttaattttattttcatgtttgacaaataagttagtaattacagttatctaaaaacgataatattctgtaagtaggcagtgtaattagactcagttctcatagaggttttatgaaaattggatagtgtaattgagatttgagacccatcaactaccttaattacatgatttactttgtaattgattagttgaacaaacacatgaaactttgtaattgttgaatgacactcaattccagttacatatattgactttccaaacaaataaacaagtggtttttgcattatgagtttaatatccatgccttgtttcttcctgttacagccagttacaaaatttgattcatttacaattgataaccgacctggagagcaatgggttagtttgaaaagaaaatttgaggatgaagacattaaaattgaagctaccatgtttgatggggttgttacttcttcaaaaactggtgcacctgttgttgcgaaagatgatgtggagtttcacattagcacgattgttaacattaccgaagagggaagtggtcatttggttgaggtcgtgtgctcggcttggccagaagaaatagagatcgatagtgtttcgattcgaaaacaagaaaatttgcctgctaagccttatcctggccctgtattcaagtaagaacttctgcatttgtcttttctaattaggaattgaacttatattgaagaatactttcttcttttttttttttagcgtaaataccctctttttatacagggaagttctatttgcaccttataaaattatttatttattattttttttgaaaaataaactcatcatttattaaacgagtaatttcgttaccaagctcggtaatagctcaaccggaacagtgtccaaattgaaaacgcgatcagggtgagatatagaggcccttgtaaaggaatgagccgctacatttgctgttctttttacaaataaaaagaaacattacgcaaagtactaagtaaatccttgcaatcactgacaactttgccaaacaagaaaagcataaccacagagctacagatagtttgcataaccgaaagacaatccgtttttaaaactacactgagccacgaatgatctttgatccaactcaacacctcccggatcccaattgttttggccaccacaggagaaatcgaaccatagaacaactttgtaccaccctctacaaaaaagccattggaatctcttgccacaaacccaacaccataggcagagttatcattaaacatagtcgcatcgacattaatttcataaaaattaaagacatcaagttaaaagaggtataatttgaagaaattgcattgtataccttttactttatttattttaatttttactttcatttttatattctttaagatatacttaattttatagatgatatcccattagagccgttaaagttaatataaattatatgcta

SEQ ID NO: 234665 - DNA, 1933 bp, Cannabis indica
aataatgagcaaagggagctctcattttataggaatggggtccaattaaattaaaataaaataataaaaaaaattgcacaaaattggctagaaaatccaacactatcttgtgagttaattttgaggcccaaattatcaaaattgtagaggaagtgtgagacaaacttggatccatcttgaaaataactttaattggccacttgaatcgcgttatttggataaaaattaagagagttatagccattttactgagtcgtgtgcattgttgaaagtgactgcgagattaggctcacttttgggcgcccaagttgacataaacgtcaacttgggcacccacaacttgatttcttaggctttaggcatattttgagatgactgaatgatgcgatattcttatttcattctttgaccttggggaagttttcctggtaattttacttgatatgcacgggtgatgcccatgaatcactagtgacaactaggtgacaccccgatgatcactagtgcacatgggtgtcgacggacttgcgcgtgacacatgtacatgagatattgacttgcaaagcattcaaatcttattttggggacaaaataagaccaatttttggagtgaaattgttgtttgaaggacagaacaccaagccctaggccaatgtcaacttgggcgcccggtgtgcttacacactagcgcccggtgattcctaggggctaactcactactcaaatgatattttctcctgattccaactctcataattttttttggagcagaacaagatggaatcgcaatcagatcgacggaaccaccggaagtgaggctatgtcaacctgggcgcctagtggctggggtgttgtcaccctaggcacacaacttttcatctgggacctagatggcatctttttcttcttgaaaccacttgaatcttcctcgtgaacaaaaataagcgaaatgcccaaaaaaaaacttctctaaaaagaagtcccggagtgccttaggttgagatacaccaactttggcgcccatagtggcctcaaggcatgcactgggcgcctaggtgggcaacatctctaaaattggcctcattgatgttcaatcttatttttggtgaaaaagtgctccacaaattttagtttcgtcaaatttgcacgagcattatccaatgaaacaaaatcggtgcccaagttggaatgtcaaccttgatgccatagttgtggacgggctccctcaagatgtcattgatgaaatatcatgtcaacttggtgcccattagggcttcttagtgcacaagtaccatttctcgtagacttatctccaaagtttaaaacttggatggggcatgaagcagattgcccctaggaaatccctaagaaccaaaactgatgtgagacggtgcacaggatgtcaacctgagcacctaacactgatgttattccaaggttgagctctaagatgtccacatgacatcctcaactttatggttcattgttttagggtcatggcaacctttgtgttgaaggagagcagtcagaaatgactttcctggatcttggtgcttacctaggtgcactaagtttgtaggtaataacactgccctatcttgggatgcgagccccggatattgtttccttcgttccacgtgtaaaaaatagtatccacttcttctagccaaatttttgggtaaacatttgtcccccaaattagtatttcgttctagtacaatgctaattataaacggaattatggctgttataccaatagtcactctggttgcttcctggaatgatgattgacgttagaaaacaacacaagtattctagcatgctttgtcctcactcacacacttcccgggaaaacttcccaggaggtcacacatcctaaaattaccccatgtcaagcacgcataactgtgaataagatgcaccttgttgatat

SEQ ID NO: 234666 - DNA, 1029 bp, Cannabis indica
tcggttttacccacgtaaaaccagactttatcattttttacctaacgtaacttcatattcctcaacagcagttgatgcacaatcaccccagagaatttcagttcattcgcattccaaaaaactccaaaaggagtttccttcaccctcttggtcaagttgaaggcttcaaactttgctttaattgaagcaaagtacccattccctctgtaagtgatacgcccaaaaaatctaattaattggactaaatcgcacaataatcgcataacaatcgcacatacatcgcctaaccaaaactacaaaatttataactacctagtaaaaatcgcaaactaatcgcatagaaatcgccaaaatgtcatttctaagtctaacaaaactttcaacacttaaatcgcataaaatgtcgcacaaaatcgctcaatatcgcatcaaaatcccaactccaaaaaaaacttcactaactcacattatatcgccaaaaattgacaaaatgtcgctctaaaatcgcataaaaaactatctcacacaataccctatacagactcgcattacgtcgcataaaattgcataaaatcgcacaataatctagaaacccaaaacctatgcacactcgtattacgtcgcacaaaatttcacatgaaatcgcataaaatcgcacaataatctaaaaacccagaaaacagctattgctcgaaacccatattcttcccacaattttattgcacaatttatcccaaataacataaaaaatagcaaatttcatttcaatacaagaatcaattacaaatgtatgcattttaaaggagaaattcaaagaaaaattccaaaaaactaacctggattgctacgattggggttggtgggattcaagtggctctcgttgttcgctcgggtcgattgggtcgagagggcatccgtcgatggggtcgattggagtgggtctcgttgttcgctcgtgggtctcgttgtttgctcgggtcgtttgtcggagctcggggtcgagagggtcgtgggagcgaggggtcgaca

SEQ ID NO: 234667 - DNA, 1000 bp, Cannabis indica
tagacagggaatccccgccccatgcattaggtgcaggtccccgcggggtcccatccggatggagaaaatgtgcatccctaggcctaacataagattgagacggtcgtgcaccactagtatctactttagcatttttggccaaaatttaatgagtggagtaactatatatatacatttaattattaattatatataatattaaatttttgtttgaaactaatattgctttatttatgtttttgctgaaataactattactaatgttgttttatttaatcgcacattaattatactcttatctgttaggattgggttgtgtaatacaatttgatctattcattcttgtttttggaccgagtatttggtaaatggtaattggtttttggtatttggtatttggttttttttgtttgtttttaatcatgtaagacatatagaacgaaaatccagtgtcaaacgtaatatattaaacacaacatttttgtacatctcgactgctccaataaaacaacactaagttaatatatatttctagaatcaattaaaccaaaaattaatttagttttttaaaaattatgagtctgtaaaatatataggtggaaggtggggagaaaaggagctgatcaaggtgacggagataggaggcaagtgatcgatatcaatgacagagaatagagacgtagggatgaggaggaatagagaatagggtttttgaatttgagtctggtgttaatatatattacattatttttcatacttggatgctcccatactctagttatattgactaaaaatttacctaacattctacttctctcaacacccataccaacaattacaaatcatataccaatgatattgaattttgaatctatatcaaattaatgcataatttttcttttcattttaatcattcttttaagagtaaggatataaatactcaaagttttgagtttgtaagcggcataaatctaattatttttttagcagtataagtact

SEQ ID NO: 234668 - DNA, 1202 bp, Cannabis indica
atattactctatgtttaattattataacaagataataaaagcaagaatgtaacaagacaaagtttaggttagagtttttcctttaattcaatttcttgataatttcagatttggcttcttcaatgttttgaagatttttcttgtttcttgacgttgtttccaggtgttgttgaatcttcttgcttccccgagctctgataccactgtaggaaattaatggcagctgaaactgcccctacacccaacaccccaacagtcaaaaaccaggggtaaaaaagtctttctccctctgtgcggatcacaagggaatattcccttttcaaaacctgatctcctttttcaaagccctactacatttatggcagtataaaagcaatctttattgctgaaaaccctagcaacaacaaacccttctcttctctaaccctagcatccggcccttccctttctccttccttttctctttgaaactttgctttcctgctagaaaaccctagccgcacctccttcaagttttgtgttgcagcagtcaccttcgactcttcctcctcttcttttttctgcagaataacaccagccgaaaacaccttgttttctccttcttcttcgagctacaacagtagcttttatggacgagtccttgtttcccttcaaacctacagcaaacatacaaaaccgagatacaaaatagtagcaacaaagatctaaaatgatctttgttggtttagtagagaaaagccgaaaaccacaacagaaaaataatgaagaacactacggatttgatttcggagttccccttaaaatcaagggtacatctccgtcaagcttccctcaaagacgcttgaatctccactataaatgtcaaaaccggttacaagttcatggagatttcatgctacaaaccagcaggtaatctcaaccttttcctctcttttcttcactttatttctcttggtttatcttacattatctctcactaactctctctatttttctctcttgtttctgaggtgactttacaaagaaaacactgctgccattttctctctgctggggccgaaagcttcacttgtgaaagtggaaggttgtacatctatttatattgttattgttggctattattgtgtttgtttctgagctgagaaatagttgtaatttgttgttgatattttccttgtaaagctgaaagtttgttagagtct

SEQ ID NO: 234669 - DNA, 1592 bp, Cannabis indica
caagcctatggtataccatttatgtataaatcatatgacttagctcgattcattgcttctgaaattggtgaacctcaatagaggttgacaaggatactgttaaggagggtactagcccttacttaaggttgagaattcttctggatgttaatcttcccattcgaagaggtatgaacattaggttcatttgtatgggtagggaattcattaagtggatagactttaagtatgaaaggctccctgatttttgctttttctgtggtaaacttgatcataccaaaagatattgtcacttttatcttcaaaaatgtgatgaaagccagtctgatcctccttgtccttataccattcttttaaggggcaaggagaaaattgtggacaaatccatgcctttttcagtacttaggggtgaacattcaaaccacaaaatcgacacctaccagtaaaccgactgttaaaaaaaccaaaaaaactaggcgccacgtcataatacgaaaccgtttaaaaaaaactagaccacaccagtgtaactggcggtcggttacggttttgccaataagctagcggttataacagtaaccgaccgtttaatgattaatctaacatttacatttaatatattatataatatatattaaatgtttttccatttatatatataaataatgttactttacttttgtgtcaggaaggaggaagggaatctttactttacattgttcacattttaaaataataattgatgtttttttctaaaaaaaataattaaattattaccataactcctctcacctaccttacctcactccacgcctcactaattaccactcacaataattaatctttctctctctcactctcagcctctcctcaacatttacctttctctctctactagggttaccaccaactaaactaaaaatcaaaagaaggaaggaaggaggagcggctggagcgctagtggcttgctacctgctgcgactggagtgggaacgaaaattataagaaaaaaagggtttgagagaagtaggagtaagagtacgagtaagagtaagacaaatagcaaggggaagatgagggagaaggggaagacatgaaaaaaaaatgagagagttgagtcaagacaaaaacgattgacatcagatgtgtgggatcattttaagatgataccaaagaaacatcccaatgacaaaccaagagctgcttgtaattattgtgggacagattatgcaacagacacaaaattaaatgggactagcactgtgacagtcagtagtcccgtgatccgtaaggggaaacaccgggtaagctgtgcaatcccacaccgcctggggaaggtcaagtgggatgattctgagactgtgtaggtatgggactacacagttgaagagggcttaaatggattgattggtactacctatatcaacaaggtgcatcttgttttcggtagcccatcacgaaagaactccacagttaagtgtgcttgacttggggcaatttcaggatgggtgacctcctgggaagttttccaggaagccttcactatctatttatagcattccactagggttaggtttgaattatttggcatt

SEQ ID NO: 234670 - DNA, 1431 bp, Cannabis indica
gtccttttgttgcagtcaaaatgctaggaaactgtcagactaataatggtcaagatttcatcaatgaagtagctaccattggaaaagttcaccatgtcaatatcgtgagattgataggattttgtgttgaaggaaaaaggtgggctcttatatacgatttcatggctaatggatctctagacaaatatattttttcacaagaaaaaatgaatgtctccttatgttatgccaaagtatttgagatttcagttggaatagctcgtggtattgagtatcttcatcaaggttgtgagatgcatattcttcattttgatattaaaccccacaacattcttttggatgaaaattttattccaaaagtttcagacttcgggctagcaagatcatgctcgttggaaaataacttagcctctttaaccgcagcaaggggaactttgggatatatagctccagaattgttctacaaaaatattggaagagtatccactaaatctgacgtgtatagtttcggaatgctattaatggaaatggcaaatcaacgaaaaaatgtaaatacagaaactgaaaactcaagtcgcatcttttttcccatatggatacacaagcaattcaatgaaggaaaggacatagaaattaacaaaaatgaaccaaacgaggattggaagacaataaagaagatgatcatagttgcattgtggtgtatacaactaaaaccttgtgatcgtcctacaatgagtacagtcatagaaatgcttgaaagtaacattgaatgcctacaagtacctccaaatcttcacctatatccttaaaaccaagacaacaataataataagacatatttctcatcaacaatttccgtggatgagtattctactgatgtcaacgaatagaacactacttatgtgacaattatctaatttgtgagcttgtaaaagaaatttttgttaaatgatgattatcattttgaagataataatattcttttttttttttctaatcttgttagagttagatttttgagttactagtttattaaggaaaagacatgaaactttatattcattcatcattgatacacaatgagtactctttctcatgggctgataatgaatattatataattaaaattattttatagatttttaagtatgtgttatttttatataattctatttttcttttcaataaaaatattttagtaaaataatattggaaataaggattcagacacaccagaaagtttgttagcaaattagttttattttttaactaacttacaacgtttataacggtttattgttgtaacagctctaagagctttctcccttttcttgtataaactctgcaaataattatagttcaggggtactccaagtgtcttgagcagttgttgcgaaaattattgaatactatgcaagtgcacgcaatcaa

SEQ ID NO: 234671 - DNA, 695 bp, Cannabis indica
ctttgtttaatattttttatttttctgattgttgcctcattacttttcttgtaaaataccagtagaaaagtgtgtattttgcaatttagctgtgaaattatttatagagttctggatgtattttttacaatagtggataatatgactagtttagataatattagataggtattttcatacaatggggattagtttcaaagttaaaaggaaccccttccttctagatgattacaacccctatatctttgtatttttttttctttggttgttcatttttttttctctcctttgtatttggatttttggtttgtagtgcattcatttgcttctttttaggtgctttcttttctgaaaaaaaaaaaaaattatatatgctgaaaataattagagtcattgctattacccaacaccaataattgagattaggaactctgtcttaaatatatgaaagtcttatggtcatctttatagttctctgtaagtgacaatgtgtgtttacttctcatagcaaaattaaaattgaaaatttgatgaaatatattcaagtaatcctaaatacataagatgtgcttcactttttaaaagaaacactactgaaatataaaatggtgacaatattattgaacttgtaaaaagaagtatattttatatttatagtctcattttatgtatcatagcacacatatatatatata

SEQ ID NO: 234672 - DNA, 778 bp, Cannabis indica
atcagaccaccattcacaaaggatgttgattaccctcagaaatctcttgtggggatcgcctgtaacgatcgactgtatctacttggtttggattaatcggacgatcttcagtcttggaatccttcgttcccaatttaaactgaggtttgaagtttctgggaacatatggagagtgacaatccaattcttggatgaaattcaccaaaaactaggagtttatggaatatggctagactaagccaccattttatacttagaacccagtaacagtaagctaaaggttgggatatctaacggttgagaatgaggtagaagatgaaaaagcgattcactaatactaataatgaccctcgaaactgtggagccgttaaaattgagggcatgcgtggtcttgaagaaaggggttgtgacgaataaaccctttgtaagcatttaaaaagtcctttttattaaaaagaacttggcaactgttatacccaaaatttggctaccatttcattggaggacacgtgtcaaactaaagagaatacggatcaatgtgtgtaacggtaattacatgtaatggaataactcattaaatgcggaggtgataaagtatatttttaacttgcagacgataaggtcttatgcgagataaagatacacaaattgttgcctcgtgtattaacgagaaaccatacggcattggatgcacaaggcaagacctcaacctcgttacgtacgagtagacgtaagtgagatataataactgtgaaaaagacttagtgtataatataca

SEQ ID NO: 234673 - DNA, 1530 bp, Cannabis indica
agatatgcaatctatagcttctacaactataagaagtgaaatgatgatttcctttaagcttggcttaacgtgataaatgatagagcacttatttcagtaattatattagtttactgaaatatcatttacaagtagctaagtattttaaggataaaatacattgaagggtagaacgataaatttgtccttactcgatgtagatcatctatagaggatctttgattatttggattgaaataatggatgattcatagcatatctatatttgatatatagagcgttctatgtaatatagagtataattctgaatctatagtggcgtaaggagaaattaataatttagaaaatttacttggtaaatttcagatctaattattgatagcttggttacataggcctatggtccccgcactaactggaataatattattttgtagtctcaattaattgattttaattaatcaattataattccaaataagagtgttttgtttgtgatttttcactaagcaatgatttatttgagaagaaaagaaattttagggtttgtttttaattaagagactttgtaaagtctaattaataaataagttaaatggaaattttatttgataattaattataattattaaatagatagaattgacatttatagagatagtattaaagaatggcatttgagaaaagaaagataaattttaataaaatggcaaaattgaaatctactaggccaaatagggttttggccaaggatgattaataaagctatttttatcttttttttatttcattttaattctaaacctaaccctaatagccaccctataaataaaataatatggctcttatttttagatgatgttcagactccttttgtcagacaattaaaaaataaagagagccattattattttcaaaatcttcttctcttctcaataattcgaagcctatagtgattgagaatatgcccacacatgtcaaagtaatacttagcatagtgaggaagattgtgtagaaaaactatcaactaaaggaggtttaggttcagatcttgatcatattgctacaacagaaaggatcaagggttagagatctgaacaaaatgagtcatactattctgctactattaatgtaaggttttctataaacttttatgtgtttatttcatttttttaggaaattcatatttgggatgttaaattatagttttataatcaacatacatgttagtaaatctagatcctggtaaaataagttctaacaaaaatatcattatagtcaatgccctctttctatgtaaatcatatggcaactaaccttgccttttaccttgttccttctactcctgaaattccttctttccatttaaaaatctatttacatctcataagtctcttattcaatggtctcttgactacaatctaggtttttttattttcaagtgacacattttcctcttgaatggcttgcagccattttgcaccatcttttccataattgcctctaagtagcttttaggttctacactct

SEQ ID NO: 234674 - DNA, 523 bp, Cannabis indica
atatttctctattaatttaatataattctgaataatggatagtaaatgtgccataaaatgcaactaaatagaggaatgaaataaaaattatttaatttttattctatttcatttcattacctccaaccaaacgctacttaaaatattatatatatatagaaatatatattactagatgaaattaataagtgtcaagcataaaattctatgagtgtacactgaaatcagttattcaagcaatccgtcctatgccatgaatgtttttcgcttgcctgcgaacttggtcaatgaattacattgtctttgtgctcaattctagtggggtggagatgatgatttaagaaatatgcattggtgtacttggatcagactttgttagcctaactccgatagtggtatgggatttaggaacctctttgtgttggataaagctcttcttgccaaacaagcttgcaaggcgtacaattgtccctattctcttggtccaagggtattgaagggtctctatttttctaatagttgt

SEQ ID NO: 234675 - DNA, 779 bp, Cannabis indica
aaaaaaaaaaaaaaacttgagaacaccaaaattttctcactttaatgaaaaaatttgacatagattagaaaattagaacaccaaaatttttttgaccctaaaagaagattttgcttaaactaaaggaaagaataatatttgacaacttagcttaaattttctatgccttaatgaaataatatatgtaacattaaagagtaaagagacaatttttatgttcaagaagctttttctttctggtgttattagaatctaagttcaagaaattatttttcttttaaatatgtctcacaaagttgactttgaattcttattttttcaaaagttatgtggaataaaactcccatttatttgtttttctttataaatttgagatactaatcatatataattaaattaatgcaatattgactttgaaaatatactatcacgtatacacaataattatccaattaatatttaacaataatattaaactaacactttaaatttaaaacataacaaaattttgccaccaaacaccttttagaataaaataagtaacataaagtaatgttaggtatcataataccccatacaaaattacaaatgctcaacatatcttctatgaagtagcaaaaatcattgataggattctacaatataaattcaaaccacactaactatgcctaatggttgattttgtacatgactattttataccaattgtcactaaagaataatattatactaaataatttctttcaaaccaacatacaaggctaatcctaatcctaatc

SEQ ID NO: 234676 - DNA, 880 bp, Cannabis indica
cttcttccaataccagctcgagtttggtttttaaatgtgagactagaagggattgtctttgagatagatgagattgacccatttaacccaaagaagatccttcttttccgcccaaatatacttggaaagcatagcatagttccatttggttccttctttgaatccaaggcctccataagctttgggaaggcacactttctcccaagaagtcatgtgaatcttaagtctctcatctttagtgccccataaaaaccctctgcataacctttccacttcttttgtaacactctgagggaggacaaaaatactcatccagtagtttcggagcccaagcagaactgaatgtataagttgggctctacctgcatgtgacagatgtctactagcccaggtgtgtaagctttgcttgattttataattaccattattgttattaataaaattactaaaatatttttataaatatatttataatttattatataattgaattaaattttaataattttcagtaaaattatttatgtaagaatagatgccacaacaaaaagaagaaacaaatgttaaggaattttattttatttttgctaaatagcattgaaatagtattatctccaaatctaacagaaccaatgaaaatataaaatttggagtgtttataaaatactcaatctagtctaattcaattcgcacgatctaatccaattaaatctgtaaagtgtggatatttacacttgtgcagattggaaaatctaaaatccgcatgtgtggggattgaatgttgattgacatgaaaaaaaaatcgatccaatttatatatattttaaaaaattatatatacaactaatattttactgaaaaaaataataacaatttaaaa

SEQ ID NO: 234677 - DNA, 1142 bp, Cannabis indica
gccgcaagcttgatgtattccaccttctaatcgaaccttgttgaaacttaaagatcttgaactcccttcgatctccttgaaaagtgcttgcttcctcctgatacaagacttgaaaagcaatctcccgaaagctttgaaaaccttctctcgaaggtagcactgttgttgttcttctttgtagatttgaatacaaactcaagacaatacaaaatacaaataaacagagtaagagtcgaacaagctcttctctaaaaaataaagactctcttttctaaagatatgagtgaaatacaaagatacaaaagagatactaaacctagttgctataaggtgtatttataatcaatatacaccttattgacatctcacacacggtctgaacaagaccacaacccaatagaaaatatttcctaaaataaaacttcaatcagccgaggaatttccatttctgtacctacagaatcgtgagtagtaagtacgattttcctttcatagaaaaggaaagtttagctccgtttttctcctcaagaaatctgatcaaacaaaatagaaaactcacacaagatcagaatataacaactagttaaataaaaaaaaatgagtaaccaaacttaccatttttaccttattttccattaataggaaagctagacaactttacttccaggattacattgattaatataaaatttaaatacacaaaataagggaaaccaatttaaatactccaatcaaaattaataataaattagtcttgacttttgtcatggttggaaagttttttttagaattgtttgtgtgcgttgttttttacgatgttgttttggtggtgattgtagattacggtggtgattttttttactacgggtcccagtagcagcctaggcaaggaaaatgagtgataatgagaatgtgtcgtttgaagaggatgacgacagactggtattagaggatgatgatggtgatttatcggagatcgatgatcgatggtgcttggtggggcgtttccttacaagacgcagtatcgactatcaagccatgcaacacaaagtagattccctatggcaaccgaaccaaggtttgtacgttaaagagcttgacccgaatcattttttatttcaattctatcatgaaattgatat

SEQ ID NO: 234678 - DNA, 710 bp, Cannabis indica
aggtgcgaaagagaataaaagaaaaagaataagaattttatggattgaattagaaattgaattacaatatgcatattccttttatattagcatctagtaactaattacaagaagtagtaacctgtaatagaaactaacttctctacaaattgaactaacaacactaattaaccaacttggtaaacctgacttaactaactacttagacaggtaagtaggacttaatagtcaccaattttacttatatcaccacttgtagttcttttatgtggagtttagtatgaggtttagactttatggaaatgagaatatcaaacttaaattaaattttaatgaccaatgggtttatgttattaagtgggtctcactttttgaattaaatggtagtaatgttaattccttccacaacttgggtttctatattccctccaactctactctctctaattcaaactcacattaaaaaatcctcattaagtggcattttgttggaaggaatgaaaatatagttagattcggaatgacattccgatatcttaaaataaaacaaaacaaaagaatgaaataaaagttgccccctgctgttgatgcaaatatcttgccaactcactcgtatgtatagatgagatgaaagttagaagtaacaatgtaaaatagagagcacacagaagaatttatagtagttcactccctgtgtagcgacaataatg

SEQ ID NO: 234679 - DNA, 1250 bp, Cannabis indica
cacccttcatgattaacggtcatgacttgacatattcttcattaatttaatctcggtatttttgtgccacgtgttgctactcttgacacgtcatcgtcgttaaattttgtagtaaacaatatatataatttaaaaataaaaattatataaatattttatataaagaaattttaattttaatttaaaatacaaatattaatgatattaatcatatttttaaatttattagtttggctataaattaaaataaaaagaaaaattatgtagatattttatataaaaaatttaaatttaaaatattataaatatttttaaccatatttttaattttattattatttattttatatttacataattatcagatacgttaccgaattaaaaaattttaaaaatttaaaaatacgtatatatataatcacattcaaataacacataaatgtagcaatagtaaaaaaaaattaaacatacatgtattgcacttaacataatttaattaaacttaatgaaaaataaaactatttatacgtgcattgaacgtaataacaacttaatgaggggcggaggtacatatatatgtagtgtggccttggccacccccaaactttcataatttgttaactattttttatttataaatagattttttttctattttgtaaaataatgtccacctttattatatatatataaataattttgtggatccagaaaaatcaaactatataattaaaagagaagttatcctttcctttcttttttgtttcttttgggaaatgactatttattatttaatattatatttatttaactattacaatttatattcaaagcctactacttttatattttctttaggcaaacaagaaaaagaaagtggcaacaaaaaaattagattaatctttaggttattttctaaattccctttcacatttagcaattcaaaatttttgcagcaagatactattctgcagtaaaaggtattcacattgaaattaatttttttttattattctattatttatatgcatacagaaaataatgtgtgtatatatataatttattaattgattacaattttgaattgacattagagatccactcgtcagcctccactctacatacaatacaaaagattgatatcaaaacaaaggtatgtcataaattctaaattctaaattttaaatttgttctttactcaaataaatggttatgtatttcaatttcattattttattgattataactta

SEQ ID NO: 234680 - DNA, 858 bp, Cannabis indica
gaagaagaagaagaagataactggcgatgaagaagaagaagataactggtgatgaagaagaagtggaagggtaatctttagcagtcaagatcctagcatattgagctcttaaactttattgagcattcatactataaccactactgaggcttaacccaaatcccaactcaagcccagacttatctagggacgaagaattctcataagaaaaaactaaattgtcatctttagacaccgtagagattgacccacttgttaatgaagctctggaaagaccacaaccacaatcacccaaaacaacaccctgcattgaaaaagcttgtgactttctatttttttcccgaaaacccagaaaaaaaaaataatcgtaaaaaggggatttaagaaagggttaattgaaaagaaaggctatggcgtaagaattaagtatctgttcatctttatttttttttaattttcttttttggttctctttctttctttctttgtctctcttttctgtagggttacagatttgaccttggttagggtcttcgatcacatacgggatgtgggggacaacttgggattgagacactggtggttcagacctcatggtggccaatatggagaataaatgtggtaaaatatatagggtattttgagtttcttgaattttttttgctaaattgtttttctgcagacagttttattttgctttttggtggtcttcaatgtcgatagtagatgacgatagtgattgggaatggtggtggggtgagggtcgggctggggatggggattggtgaagaagaagaattaaaaaaaaaaagaaagggaaaagacaaaataattttatgattttaaaataattttctt

SEQ ID NO: 234681 - DNA, 881 bp, Cannabis indica
tacgccatctgtcatgtcgtttatggatatttcaatacgtcttatccaagtccacgtattttggaaaaagataggggcaacaataaccaaatagatgtactttgaagttctgctctttaataaatttattattttattttaattattcaaatatattttttcatgtttagtaattatttttttgcactgatattattaaaacaaatttagtcaaaagttagaaattttctaccactaaaaggtagattggtttgtgaccctaataataataagtatagttataaaatatagtagtctcaatatattttgacatacttattatgttatgacattttatttttaactatgtatttgttatctttatacttaatgactacacaaaataaagaattaactgattacttttaacatattttattaatattttatatttaattttatttcgtgaaaaacattttaatatattttttaaaaattattattatatttttttatactccataaccctttattttaaacatctttttatatataaaagaatattatttatttaatatttattgtaatatttaaaaaataaaatacataacctaatataaaactttgcaaatctagtatctattatataggaattatttcacaaatacacaaaaacaattaaaaaaaattacaaaaatacgatttcacggaattttaaacatttttacgattttttttattatatttaaagaaaatacaatctttttatgtagtactcactacaacattaaggaccaatagcgccgggcccctcggccgccattggtctagattctggccgctaaagggcaatagcggcggacctcggccgctattggtccgccgctattgcttggccgcta

SEQ ID NO: 234682 - DNA, 1170 bp, Cannabis indica
ttgtcacaagaaaaaaaaattaactaaaaatttatacctgttaataacaatgcataaaagtccttgaaaaattcatatcaatctttataaactccataacaatgcataataataatcaatgaaaatttcgtaacaattcttatttatttctgccttagtttaaaatttaaatataaatgtacaagcaatttaaaaagattgtgaggctaaagaacttcaccaagatcaaaacttggtggattctcacctctgcaaacaccaataatagatttagaaagtagttaaaagtgagcaagagattgacaaacaaaagtaaataaagaaaaagaatggtcttccattactaatattcacaactaaactaattaactcttgagaaagctgaagcaaaacaaatactaactcttgcagatcatatataaacacctatgatctctgttgagaaaagagagaacaaagtagataaaattaaataaaaaaataagggaaataacagtgtttgtgagatgttgagaacaagaatcaagatttagtataccagactctacttctccggtggtgggaaccttcacaaaattcctaaatctcagaaagtaagagataaaatgtatacttaagatgatggactcaaactcaaagcgtgaagccttttcaaagagtcaataaaccaatcagaaaacactagtaacatttgaaagggattcagaggacaatgatttcagtaatttggtggtatcagctttacccgtagtctgtgatggagtgattgaaaagcattaatacaaattaaaaacaaatactaactgtgttgtttgtttactaaaaaaaatatattgcagatcatatataaatatatatatatatataaataaataataccatacctgaggaagtgaggagatcggctgtggagtgtcgacggtccgacgaagttgctgggtgaacgtccggggtggaagtggagaagggagtcgaggggccggctgtggagatcactcgtctacgttgggctggctggaagtggagaagggagtcgaggggctggaagtggctgggtgggtgatggcctgaggctgggcggcggcgactgttgacgagcagagaagaagggggggggggcgacacggcgagcagagaagaagggggagggggacgctggcggctgtgaag

SEQ ID NO: 234683 - DNA, 976 bp, Cannabis indica
gcttattggcattaaaaatcaaattcttgtcatttttatatacactatattactataacttcgataataatattggttaaattatattttcatctgatccaacttgggaacttagataatagttcttcataaatgtaaataatctcaatactcagctaggaaacttttaccttaaaatttaagtttccttgaacttaatcatctctaaatttttcttagtaatgtttctaatgtagtattcttgtattttagtagaaaattattcaatgtgatttttgctaagattgaattcatcaacttttaacatgtaagtgcatgcactaagtgtattttgtcaattaatactttgaaaaaatatattttattagcaaacagcacctccaacaaagaactataaatgtggtgtatatcttttttttaactctaataatgatataaaatatgtgttaaatttaacctaagcttaaaaaattatatcaaatttgacataaaaaaatagcatgggtcaaattttaacttacaatatatactattttttttaattactatctttactacttattaatgttattcattaattaaaaaagttttttatatttataaaatataaaaataatataaataaaattaattttcaatgagggtaaaatagttttataatatattccaggttaaatttaactttgaagatggtctaatgtaatatttttattattccaacattattaatgtataaagattttacagtacctctccttgatgttgtagtgatagtaagtaatccacaagaggctgtgcatattccaatttgccacttagttttgaagtaatgaatttggaaacaaaagcaagtccatttccaattgaggaaggaagtgttaagttaggaacagagaagttaacagctccaaaatcaacttcaagtgcattttcatcattggccctgtttaataaattattggtcaaaatatttaac

SEQ ID NO: 234684 - DNA, 2012 bp, Cannabis indica
tactcttgatagactcacctatgtgaatgtagaaatggggctgcttcttatgaaatttgggcaaatttgtagagcattcattacactgggatagacgtgcatgaccattaaagcacgagcttttggactacacccaagaaaggttgtgagcggtacatcgttagagatagagtttaagactgcgagtcactctagtatattctaagttgcattcacaatgcaaaggttcaaattgaaacatacctttgtctatgctcaatcttattgcttaggatactgctcgagaaaatatttttaaaaatttcaagggggagattgttggaactttgtgaaattttataaaaataaaaagtgaagtgtgtgagtgaatggagtctcacgcgggatagaaacacttcattagaagtgtatataatgtccaggtttggaacttgggttggggcccaaagaggtacccagttttctgcgcatgggtgagaactcacacacgcgcgctgccattgccgtcgccgttcgaccgcgctaagctggcgagcgggtgtggtgttactttatttttttggagaaaaattattgattaaagtattatgaattaattaattaattaaaacagtttttaaacgtatttaattaattggtaaacagagacttcctatttttttgcatcattcccacaatcccacactatcccacgttctaacgttcccttcattaacgtctttcttcctgttactacctttagtgcattgcctatataatgtatcagaactaaagggagaaacacacctttttttctcactaaaaaatatacacgatatatacatacaattatattacacatatattctgagcagtagtatggtttttgagtgtggcatattgacgattctctaacatgcaatagagttccgttacagtgtgtttgattgggctattttatcctaaagacgacgagactgatagtctgcttgcacagttctggacagtgtcgcaaagagagaaaactaagccccaactccgactcaaactaaattttaattcgataaattcgttccttttattttctgcagcaactattttcaacagttgagaaattaacatataataaaataaaatataagggtatttttaattaatagatacaaaatagaatattcctcaacttatccccaaatgaggcctagtagaggcccagtagttagaagcccattatcagcccaagatataggcagacaagagattcgaagatgaagtttgcaggtaagcacctcatagaaaagtcaacaaatgtataaaccatcttctttgtcttccatttctgtcttgagttttcactttcagaagcttcttctttcacttcagtatacccatgataatggaggaaggagcccatttttgtatttgaccttaactcatcaacatcatcatcatcctaagaattggttttcaagtattggagtttgaggtgaagatgaagtttatccaaaggattggttttgtattttttttttttaagtgttaatgtttctcattttagtagtaactttctttcaagtgtataatgctttttgttttagtacttgaaaatatgagacatggatttgaattaatattgactttgcctttcatttattttaatttctttttggcttactataatattttgatttactagaagagtcactcgtacattgaccaactcttgtgtattggttttgtttataaatactctgaattttttagaaacatataccacaatttttcctataatattttttgaacttctaccaataatacatctcctttccacttatatgcttttatttttattgcattatgattaatattattagtactaataacatataaaaatatattttttttttatattgatgtattatataattttattataaataaaaattatttaaaaataataaattaaaatttcattgataatttaataaattaaaaatatatttttaacatgaaattttaaaaaattattaaaa

SEQ ID NO: 234685 - DNA, 983 bp, Cannabis indica
tggctctgcttgtagtaatataattgtatgaatgtggaaggagctaactttttcgggttgccagtagtcaattgtagttttttctttgtgaatcgatgagttacactatttgaaatggcatattactacttgtcttgtatttaggaaaagtttacatttttaagtgagtacttattttgttttaccaaacaatacttgcttggagctgctgctgaagtaaaagaagctaatttaatatttaattttaaaaaggtgaaaatttggagcataagggatgattagaatgaataagaaataccgttttaatgtagtaaacttacatgctctctatgttccctcttagttgtatgatatgtagccttgaatgttctccagtttctcactgcttgtatgtttttccccactgtatttttttgcagctcaattcagataagagcccatttcagcgaacttatgctactcaggtgattttatgtcctgttttttttaatttaagattacagcattgcagatcttaattttattactatctgattagtggattttctttttgtatacaactatcaactcacaatagaagctagattaataaatttgcaaaaagttacgattccgtaaaatcttcaaggtatatcaaataggaagatattcatccgcaggtgatgggttcaagggttttctagggcttaagcttgccttttggttttatttacccagttagctatacgtaattagcactcttgtatctgaaagatgaactcgactctgtttaggataagtaattagaagttttcattgtaacttaaagatatctagcatatttttggactaagctgaaagaagtatacggtcatcattctaggtttttgcgggtatatttctttttaaccctttctgctgcagatataatttttatgatattatagtatgaaaaatactcaacttcacctttatgggatcaggttaaacagttttatttagtt

SEQ ID NO: 234686 - DNA, 1301 bp, Cannabis indica
taagttttattttgataaaaaataaatttactattttagaaaatacaaaacttattttgtcatttaataaaataaatgattcaattagaaacttttggaaaacacaatatctaaaataatatttattacttttattattattcactatatatatattcctattatatatgttggaagactactaattgataaaacacgtatctcttatgattaaggtattgaatactatattgattgatgtgatatatttttaactattaataattttttatattatttattaaattaaaatatgtaaaacttaagattatattgtacagtatactactactgtgtttcatgacaccccacgtattatatgacttgatctcttatgtatgatcattttttgaaaagaaagtcttaattataatttgaaggaattcatcgaactaataaattaaaataaaatattattataaggtgatatttaaaactaactgatgatattttataaaaattattatattaaattataaaattagatatttaattatagatgatgaccaaagattacatgcaattaaatttcaattcaattggatgaaatgagtaattatgaaaaatttcattacaaatttacaatgcagtatggggccactatagctactttgtcatgaagatgacatcatcaaaaatgtgacactttaggatattactttagtttatggccaatggcatattgatgttcctttcactttataaaatatattataattatgtcgcattaaaatgaccatcatattaattgatatcccataatttatataaattatggcacatatttttattaagtaatgtatatatttttaattaaattaaaaaaaggtgggaacaatttagaaaatatatatatttagacaaaatgaaaataatagaatataaagtcccatttgttggataaaaagataaaacaaaaataaagtcccctttcaaaatcacatcatcacaacgaccaatttgtttgattattatttgtttggttattattggtggagggacttgtattgaccattcatcttggttgcttatatgcatacgtgtaccttcttaaaccacttacgtgactcccaaaaatcggtttgattaagacttaatgacatttatttgagtattgttatggggtattgtgcttagtatttttagatgtgtcacgttataattggttggtaatactttctaatagttattatattaaattatgagtattgctattaagcacatgtggtgcctagtacttctcgacatgtcgcgttgtgatt

SEQ ID NO: 234687 - DNA, 932 bp, Cannabis indica
ttttacccataaaaagaagtccaacaaccaccttggccatgttgtgtgaacttactaaactcgtataatatgaagttttttccaattccaccaatttcacaaatctctttgttgaaactttatagtttcagttgatgcactctttaaactctatcaaaatagctcatcaaaatatcaaattccttttaatttggtatgggagtagatcgatcaacgccatattagaaattagggttgtgatggtgtgagattggtcattgcaaaagctagagaagagggaagctttttgggtatatcttatttgaacttgacaaagttgagattttctccaaattttagaacaaaaggtgtttaccgagatttttacgtggttggagcgttaattagtcttagtccatgagtcagtattattcagtaattcctttaacttgaaaaagctttcgagaatacagaaaatatatgttctcaaatttaccttagcaaagtttgaaatagagttcaactcttaatccataggattcaagtagtatttatagtagcttgagaattacattaactttccactttccttctattgggagtttacagtaaataatacacttaggttgtctcataaagtctagcccatgaagaagatgatctattgactaggcagatcagattaggattgatttggtcaacactgtgtgcactaattgtggacaattaatctatgacttaattgcataatattcactataggaagttttcccatcaatcctaatatgatactatgttacgatctagaagctggaatttccttatttggacacaaaaataaaaaaggaaactggaagggtcttttgagaatacgatgtcttgtccctccgatctcgtggtaccagacatgcttctgttggattttgtgccctaaataaaaccctttacaatct

SEQ ID NO: 234688 - DNA, 626 bp, Cannabis indica
ctttttttttttcaatttacataactaaaatatagtttttgcctcaaatatagtgtaacttatcacattaagataaaattttgtggtttacagtgtttaacacatttttaataaacacattcaggaattatgatattttctatttttattagttataaatttttttaattttaaatatttacatagacatagaaattagatatttatttatatttattaaatcatattaattaatagttttgtttcgatttgtttgatgagtttattttttataaatttacatagagaaaagaaaaaattatttgaattaattagatttaacatattatttataatttataatttgaaattataataaatatcaactaaaaatatttaacaatttgtacttaattttaaatattctccgtattataaatactttaaaatttcaagtttagaattttattttatcatttaaaatttttaaaatatttaattcattaataataattcaaaaaaaagtataaattataattatatataatttaaaaaataaaatatctcacaaaaatgaaaatttaaaacaccatacgaagagggactatgttagtgttacctagtatatttatatagaacacttttca

SEQ ID NO: 234689 - DNA, 2693 bp, Cannabis indica
ttacttttttgctattcaacagataatatgtgttcatgattggatggttaaggctttcgatatattccataatatgtagtttgagttcaaaactaagaaatggatttagtattagttagttgtaagggcatttttgatagttggtttaatagcaatgaataggcattagttaagtggtgaaagtgtgaagaggctttaatgaacattcaaatgaaggggcattagcttgctttaatgtgctttacaaaattgtggctaagcttatttgctcaagactaagatgtgtgttaaaagagatagttgctaaaaatcaagggagcttcattcaaagcgaattcatagctcacaacataatgagcgagcgaatgccaaacatcaaaataattaacacacacgtgtaacatccattttgatcactaatttcgacaccgtaaattttcttaatttcttaaaaaaaaattgtaagatagaattctacaactgcaataaacactgtcataacaaaaatattgaaattataattgatttatgtattatagaaatgcattaaaaaaaagtggaagttgggttgaattgtgttccgattgattaggactagaattggttcttgtccaatatgggatgaactaatttatttggtttgtgatgttccttaatgtatagttcgagttcaaaagtaagaaatggattttagctgttgcattgcaggcttcatggtataatataaacaactcttatcaatcgatgacaagctaagccagactttaatgaacattcaaatacatttgaagagtgaaagtggtgaaagtgtgagtgaggaggctttagtgacatgtccatgggtgacctcctgccaatcccaaatttatagatagccctcatttatggccgaggaaaaccgtggttacaagctgaacattagcaaattacacaacaatcataaaaaagaaaaacaacctcaaacatcaaaatattactgaagacataaaataggattattctcggtatttatatatagtacatagagcctgtcaaaacaaagtcagcaatgaataaccatattatgtgtagataaagagaaattgtatgtgtatattgtatgcattttttcttctttatctccaatatgtttagccatagcagctacaaagcataagactagatttgttatgcatagcacattttataatctgaatataccatataccatattttggattatgtagataatttctgtgtaatagctcagataaaatgttataataaataaaatatatttatttataacacaacatggatcatatacaatcataaagatttcaagtgtttgtaaggaggcgagttgtctaagcccaaaacgggttcagcatgtcaaaccaatgtcagcaatggctacaaattggaccttgggtatgtgacttatcttgttccagtactcctcattcctactctcctccgggtcgtactttttctttaccaaagcacattcttctatgattaaagaggtcagggaggttggaagcccttcttctgacaatgtctccaactcagggcaagaatagattttaagtctttgcaaggaggtgagttgtgtaagcccatttttgtccaggcctctaagttttttaaaagaccagatgtcaagagaggtaatagtagtaggccctccaaaataattgggaaacgatcaagtatgatctcatggaagtgtttagggcttttcatagagaaggaagaattgaaggcagtatcaatgacacttttatatgcttgatccctaaaagattaaacagctgcaaagtcaaagactacaaaccaatcagtctcatcacaagcgtgtataaaatcatcgccaagactcttgccactagacttcgaggtgttttgggagagactatttctgaaacccaatcggctttcgtggaagggagacaaatcctagattcggtcctaatggcaaacgaagcagttgaggactatacgagtcgtggtaaaaaagggttcgtgctcaagatcgattttgaaaaagcatatgatcgtgttgactggggtttcttagatttggttatgcggaaaaaaggttttggggagcggtggacaaaatggattcgaggatgtgtttcgacaacttcattctccatattcattaatggtagggtaagaggcaagttcaatggttctaggggtctacgacaaggagatcccctatcaccgtttcttttcacattgatagctgatgttcttggaagaatggtggacaaggctattgatacagaatctttgtcggggttccagataggtaaagacgatattcaacttagtcatctacagtttgcggatgacactctgttctttgtaaaagatgaggcttctcttcaaaagttagtcaagattgttgaagcattttgtggtatttcgggactaaaagtgaacttgaataaaagtcaactgctaggagtttgtatggatgaggacgcagttgcccaaagtgcgattcaaattgggtgtgagatgggtaggtggcctatgacttatttgggaatgccacttggtggctctccaaggaagagatctttttgggaacctgttttggataaatgtgctacaagaatggatgggtggaaatgctctttcctctctagaggagggaggctgactctcattcagtcggtcctctcttcacttccaattta

SEQ ID NO: 234690 - DNA, 2502 bp, Cannabis indica
catatctcccatatatatatatatatatatatatatacacaattttcgttagaatctaatattatgtccattcttcttatttcgcaactaaattacccttaaattcttccagcaagtgagtttctcagaaaaccaaagtggtctttgaactttaaacttgcatataatgaccatgtgaagctgtaagcctaggtgtattaacagattcttcactttttcttaaagggtgattcactcgtaccctgttttaaatttacttgaatatctcttctagaatgattgatagaacgagaggtagaaggtttgtttaggctaatataaaaatcataatattgagatgtgtcatctattttgctgaggacaatcacagctgaatgattcattcggttaaaatcttaggcctcttctatttgatgttcaataaagtgttgccaactgacagagctaggccaatggccaatggccacccctagctttctaaaaactgaaaaaatcttataaaatggactctggagacattagcctcatctttcaccttctttcttcaattcctggattgatgatacttctgatgttagtgtttaatttgctacgttattttcaaaatccttatacttatgttgtactacaaaagagaaggtcatcagtgtaatccttcctagtgaaggaaaagtggagttcagtgtaccgcttaaattacattctgacatggccttaaatttaagcgtttgtttatgtacaatactgggctgattttcatgacttattttctctcttcttatttccaatcgacaggttgaaaatggggaagtcttgcaacgtttgcattgtacaacaaatatggaagacctttctgaggcagatattgttattgaagctattgtggaatctgaagatgtgaagaagaagttatttcaggacctagataaaattacaaaacgttctgctattttggcttctaatacaagttccatctctattactcgtctagcatcagcaacgacaaggccatgccaggttattcttggagttgaattgtttttcattttcaaagctatttataagatatctcaacagaaacatttacaactattaatgccagtacccaatatatctaatctgatcatatgaagatgtaatttcacaggtaattgggatgcattttatgaatcctcctcctataatgaagctagttgagattgtaagaggtgcagacacatcagatgaaacgtttaatgtaacaaaagccttggcagagaggtgacttaagtacttcttactactgctatatctactaagatcataaccttttgagtaatggattgcttgtaatgcacattatagtgtaaccttaatctatcacccatttaagcttcctgctgccaaatttgcaggtttggcaagaaagtgatatgctctcaggattactcaggcttcattgtgaacaggattctaatgccaatgatcaatgaagcgttttctacactgtatacaggtgtagcaactaaggaggacatcgatacaggaatgaagctaggaacaaatcatccaatgggtcctttggagcttgcagatttcattggattggacgtctgcttatcaatcatgagagttcttcatgctggtctgggagacagtaaatatgccccatgtcctcttctggtccagtatgttgatgctggtcgccttggaaggaaacgcggtattggggtttacaactatgctaaagccactgaactggcaaaaccatcaccatcatctaaactttgaaaatcagtcataccctatattttgctttacattttcatcagaattcagaaatacggggggatgtatgtatgttctgtttatctgtcttgaataagattggacttgttttgatcaagaattagaaataacgtttaggccagtgactccagctacataatactttcaccccctttgtggctaatatatatctggtaaatttctccagttgtggcacatggtaaatttcagtgtaaataatatgtagtcactttagtatgctgatcttgtcccctccctcttacagttagtggactttgacagtttattatttatagcttctttaattttaatagtgtatttggaagcaactgtgtaactagatagggtaattactagggtggtaattacacagtgtagtaattacactatattttagaatgtaaggtgtgtttggatatgaggtggtaattatatatgaattcttaatagcttgtttggcaaaatagttagtaattacatgggaaaataatattttttagtagctaatgttttaatatggaaagtttttagcaattacataattacattcaattcctatggggggccatgagaattggagagtgtaattggaacccctcaattacttctaattacaccgttacaatgtaattacatggttagacaaacatgccaaattgtgtaattaccttcaattacactcaaattgtggctttccaaacgcaccctaagtat

SEQ ID NO: 234691 - DNA, 1794 bp, Cannabis indica
tattggaaggtcagttatataggcccatggtcctcatactagttaagacaaactgcttgtaagactcagttaattgattttaattaatcaattataattttaaaattagactatgtctagtttatgaatttttcaataagttatagcttgattatgaagaaatatgattttagggtttatttattaattaagagactttttggagtctaattaataaatattataaatgataattttatttgataattaattttaattattaaataaatagttttggcctttataggattgaaattgcaaaaagtggtatttgtgaaaaatagataaatggttgagaaaaaatggcaaaaatctaactagtgaaggacccccatagggccggccactaactcctatttttgctattattttatcattttttttattccaaataattcaatcctaacctaagtgaattagtataaaaagaaaagaatgatctcaaaatctaactaatgactcttgacctagttttcttcttgtcaaaaaactagagagtttgagacttcttcttcttattttccttctaatttttgaatcctatagtcttctttacaaaataaattcagcctttagagattgagtgcatgcccacccatagcaagttagtcctcaattagagtgtataagactgtgaagaatctaaacaactgaaggagttttgggctcagattttgattatactctgtgacagaaaggatacaagggttaaaaatctgagcggaaggagtcatacaattctgctgcaaccaatgtaaggtttctcatactttatatgtgtttattttatcgttttagaaattcatatttaggatgttaaaaacatacttgtaaataaatctaggatttggtaaaatgtattccgacaactggcctcaaagtcatggtaattaatttactatcaagaaatatgaatttaaaacgatatatgtgtaatttggatgtgattcatgtcgatctatgtgtttattgatgatttttcgatgtttacaaaatttttatgtaaaataattagaatttcattctgaaattatttttcttaaatagtatggagaaaattaagcaattcacatttgtacagaacttaattttgattcaatttgaattagaaaaaaatcagggtgggagtcacccacgtacgcacgcagatgcccttgtttctcgggttcacgcggcttcggacaagccttatgtccgagttttctcggtcaggtgtgcaagttttgtctaaagactccccatccacgtgcgggaatgctacttgcagcctcccctgtgcggcagacttcggtcagccactatggatgcgcgtgcggattgtatgcaatcgcaccaaatgcaattttttcttttttttttcattttttcatggaatcaatttcaagttttttgtgtaattttgtttttagatttttattttttaaatctcaaatctaattatcggaataaaattaattaattttattttaattaattttagttaattttagatattagtagattttgaacctcaaaatgaataaaatctaatttttggcttaatttgttaccttatttttaaaatttgattattttatcttatttttaaatttaagatcagatattttatcttttatattatttaattaattttataaaatgaccttatttgaaatttaaaataagatataatttgatatagaaaattttaaaaatctaaccatatattttgtcaactttcaaattattgttgtgttatttaaattaaattataaa

SEQ ID NO: 234692 - DNA, 1298 bp, Cannabis indica
tcgcaagcgtctcttcggactcccaagattgattagatcctaatctgaaggaaggagagccttgagtttgccccagtagggaatcctaaatgcctgggcaaattcggaaccagcttctctcgctgcggccgacaaagtttcaatggcctggctcgaggaagtagaggcatgagctgtctcaggaggaggtgcgttggtgttgggagtgattggaggaggaacctgtccttgggtctcggtatcagagacctcgaggtcaataggctcggacaacgacttctttttgtgggtagtggttttcctttgccttttaggaggctccacctcgacgtttgtagggacccctgggttggttccctttttcttccctttccgatccctgatatcctcaaaaccccccatgactgcaaaaaaaaaagtgttacaattattaaaaggcagataaaaaaggaggggagtgtatttctccacctaagggatttaccgaagccattagaaggcgagctatcactagagagggggtagaaggaccgtaatatccactaaaatccctacagcctgtaatcttgaatatatcaaaggactcattggttctaaatcctagctcgcgtctatatgactcgccgtatctgtcgtggtgccatattgctcggctataccataatatgactaatgaaagttgatctggatgtggaatctagggtaccaactgtcgaacctatgaacaacttggtctacgagaagggaatcccaaatataaaaattaaggcgcgtgtctcggaaggtgactaatgtgttacgttcaatcctaagtactgagggagaccaaccgcattgattaccttgggacgctcctttgccggcttccctaggagcagtgttttgaagatactgtgctcgagccatgtgatcccaagccttatcctcctttggaatgggaacctgatgctaagcagaatacttggaaaaattataatcacaagtatactccttgtcagtaagagggcccaccgatctcagattggcctcgttcaagaggaagtcgcatgacctaaggccatgggtaagagtcaacatgtgcttgtgccgactgaccatctcaagagtagggacgagtctttttgagagggctgtaaaaaaacaaacaacacattggtcagaaaactaaaaaacaaaaagcattaattcaactggtcatgatgaaaacaatcacttacaaattttgtgaaagatggttgtgccgattgcggaaaggccagttgtccaaaagaagttatctttgaaagacactttgtttg

SEQ ID NO: 234693 - DNA, 838 bp, Cannabis indica
atcaatacaacaaaaggggagtatgtcattattaatatctaaggggtcgaacctctataactcctgatgttctttttatttacttattatttctaactatactggtgattaattagcatttattagactccgagtcagttggcaaattctctagtcagcattttagtgctttcattgagagcttcaaaatcccatgaagatctcatcctttcctgcctaataatcaccatggttctaacaaggacaaatgcatccaccaaaccccaagatctgatggttgtggaccccaatgctcaagttccatccattgttgaaaactcgatcaatcctgtccggccacctcgagcaaacacatcaacagggccccaacccgaagacccaacaaataccgggcaggtttcaattaatgccgaacaacttgcccaaagtattgtgggggttcctttacaggagctacccccaggtatatgatagaaaaactgggcccagagttggccaacctagtgtcaaagagccccatgtggacttgggggacgattctgagctagccagactgagaaaggccatagggctagtccaggatcatatgaacatcctccatcatgaataagaagaaacatgtaatgttgtaggcgatgctttcgcccagtagagacatgttttaccaggatctagatttactaactgttgggttttatgccctaaataaaacccaatacaatgtgattagttatcaatttaagagatttgaagtggttcatgttgacatgtatttttcatgtttatggtttaataaatatttaatatatattcataaaatcagttaagtccagaacat

SEQ ID NO: 234694 - DNA, 1748 bp, Cannabis indica
attctctcttccacaaaatggtacgtactattatatgttttactaattaaaacgacaaggtcaaaaatgagctttaacaattaaaacccttatctttaactttccaaaacgaaagtgcatttcgtacccacaacaaattatttaaaccaaaatgatcagtagtacgagaattacataaaactctcaccccgagctaatcctagctcaaaaacttagaaccttcgagatttaattcaccaaatctctctcacctgaaccctcgaaccttttcttgatcaatcttgatcaattttttaaatccaaacccaaaaaataaatcatacatgcacataatcaagaaatcacaaagcagaaattagagataaaaaacaaacacaaggatttatagaagttcaccctaaatattatatcaaaaatattagaaagttgccaaaaatagtcaagcgcctcaactctttagagaactttttatagatgcagtgatacttctttattttcttcaagagccgcaactttcaagggaaggtcacgactttccattttttctcaaattcgctctctgtaacgattacagagttgcgattatctatcaagagcctcatcaacccttgtttttgaaatttaaaaaattgacttcttagctttatgagtcgcactaactcccacaaaatccatccgttctttcacacaatttcattattttttatcgaaaagaacactcgaaaaataccatttttaaccaaattgcaaaaatttcttcaacatctaaaattcaactaaaaacaaaaacaagcgtaaacttggacagtaaaacataaaaactactaaaaatacaagctaaaagacataaaaataacactaacaattacctccttcaatagggcatcactaacacagcaccaaataatctgagtacttaagtggccatacaattcttttgagctaatcatattaaaaaaaaattagaatcatcaccaaacagtggcaacagtgcttttttatatatctcaaaatattacttctttatctttcacttcaattagtcttgacatgagaccacttctgataaacaacttagatagcatacttattattgttgctctaaattaatgttttttttttccttttgtaatcacttattatcttcttacatcaattgttaaataggaaaaatggataactataaaataagataatagagccttaaaataagtaaaaaagaaaagtcaccaccaataaagtaatacaaaagtttcttaatttagtcaatgggagttcaaataaagtcaaaaccatttgaaactatgtatgtccacacatgggaatccaatgcaaaaacccaattgggaaattgtgaagtttattccattgatatttcataataagagataattaggagattcataagtgaaataatgtgtgagtgtgcataggttgagagtgattcgaatcttaaaacttacaaatgctcatatatttttatttttatatttatttaataaaagaaagaattttttttttaaaaaaaaaccaaaaattattaaaatcgaaatagtggatgttgtgtcccactctcccaacaatagagggtgataaataaaacttgcatgatttaaagaagctagtaatgtatataatgttagtgttgtgaccatgaacacattataatattatattattattatgtagaaagcttatggttttaattaatgatttaatgaaaaaaaaaattaattaaacatttaaca

SEQ ID NO: 234695 - DNA, 640 bp, Cannabis indica
tagagtgtaatgttgctcttcacggactactgaaatcaaggcttggctgaattggaatgcagtaacaatcagcctacccaacctgttgagatgaataggcagagcaaagctctctaaatttcaaaaaatggtcaatgctgctgcaattgcagggctggtatatagcatttggaggctgagaaatgctataatttggcaggattgttcctcaaattccagccgaattgttaaagacactaacttgagtgtaaagatgagaattgcaatgtttttgccaaaaaagattaatgatgtagataaagattagttcaatgctttatattgcgaaattgtatagaaagatttgttttgtgtatgattgtttagccccggatggggtgttattaggttgtaaatacagttttgtgcaatacaatgtcctgatttatcaaaaaaaaaaatttgtaaatagttaaaaattaactgattgaaatttttttgagaagctacagttaaaagctaaatttgtacaactcaatcttaagattaaaaatattttaattaaaagactaatacatttatttgtactaaaatatattcacttttttattatatatttcagaaaataaaaaaattatataaaataagtaatatttaactc

SEQ ID NO: 234696 - DNA, 741 bp, Cannabis indica
atgccatattaacgagatttcattgcaaataactttattggatgacaaaaatagttcgtacaagatctattatgtatataaagccttttgatctttatggtgtgataaataagacaagaattctctacaataatactgtgtagaataattgaaaaagatgcatgtaacacaacttgttagtgagtttaaaataatcgcaccaacgctatatatgctacctaattattaacatataataatatgttttaaaagaaaaaaaaacaaaaataatattttttggaaggcatttcacaaaataaagtaaaagaaaacttacataaatatataattaatagtttttatataaataatggcaaatttaaagtacatactttgaaaatgttatttttgtatatctcttatttttgtttcgatattcagtagaatttttagttattttttagaaagttctcatttatagtgctaaaaataagattcatatattttgttacacgtgtgattgttttttcttatgcgcgtggtaaataactgtcttaaatttatttttgatactttaaattgtttggaattttataaaatttataagtgaatttaaataagtatcacacgtacaattatgaaaaatatagaataaaatattttcttgaatgaaacgcatataagtggtgtactagaaataatattcatataactatatatatatatatgcatgtttataaaaatattcttcaatttattaaa

SEQ ID NO: 234697 - DNA, 1511 bp, Cannabis indica
gacaatcattcggaagaaggtacacattcgcacaagcacccattcattcacaataactttcagatcaacttgtttaattttttttatatatatatgtatataagaaaatcgaaaggggagatcgaaaggaattttttgttatatatatattatgtattaggaaagttatacataaaaagaaaactagagatttaagaggaagaagatgagtcgttgtgaaaaagatgaataatcggaaaaaatgtggtcagatatatgatcgatcatcattggtcaaattgtcttctaagcactttaatttgagttctttggtttcggttatggtgagtttgagcctgaatttcctgggctggttttttcgagtttgagtgctttaggcagaaactttttcttggttttgaactaagaaatgcacaagtttttctgggtattatttttctaggtgtttttcgggttagaacaggaaaggtaaataagaaaaacactatataacagaagaagataagtaaaaaatcataaaaccataaaaactctataatcgtgagtttctttgcctttcctcagcattccatttgctccaatcctcaaataatacagcacgacatatgacactccccaaccagtgttgtacattacttgaaaaataatactcaaaaaagagatgttaatgattttttacattcagttcgcacactagggatcaatgaacaatacttttgttaaaagaagaaaggaagactagaaaagaatagagaaaccctaactctagaaacactagcagtcatttaagtttataagagagaagaaagaagttttgaaatttgaatattcggagaggagaataggtgcagctgagacttgtttcttaccttgcatataattatcttttatcttagggttttgttttatatttgggcaatgaatgaagaataagttaatgggcctcattcttggaagaaaggtttgacaattaggccttttgaagggattgattgcccattcggcttttgtatcagccaactttaaggaggtagttagtgtgttataacgttcgaactcaaaatcttaggaataaaggttgaaggttcggatggaattggttgtcgtaaagagtttggttttcatacaaacaaggaatggggaataaagtaggagaaaacgcccttaattagagtttgtttatttttcttaatttaattattaatatacaaaattttatatgatttaatttaatcattttaaattatatcattattaaatttccatatttgtaacaatatacttttaagtttattaatctttaatttaaaatgataaaattaaataatacgaaaaccataatcaacaatatcaatccaataattggacatacaaaaatgataagtagttataaatcaatagtacagacaagtccataaagcttaactcttattgatacaaaataaattatttattttaatacttgttgaccgagattttcggcaactaataaaatattataaaattattga

SEQ ID NO: 234698 - DNA, 1806 bp, Cannabis indica
gtgagccaagtttgtcagttctttgtgactggtagtattcctgatggctgaatgacacgatattgtttgatttcgaagagaagcagcctacttcgactgggggatcttcggcccatatccttgtgcaatgtcttgtataaagtagtatctaaggtgcttgtgaatcgtttgaaggaagtgctgcctcagatcatatcctcaaatcaatctgcgttcatcccgggatgccttattactgataatattatgatagcgtttgaggttatgcactatctcaaaagaaagcgtaaaggcaaagaaggctatatggcgctcaaattggatcttagtaaagcttatgatcgtgtggagtggggctttcttcgagctatgatgagcaaaatgggctttgacttgcggttcattgatcttgttattgctacggttagctctgtgaggtataaaataattcatggtggtcatgagctgggtccgattgttcctgagaggggtattagacaaggtgatcctctatcaccttacttatttcttatttgtgctgagggcttctcatctttgatacggaagttcgagcgggatggtcggcttaaagggtgcaaggttgctactggtgccccggttatatctcatatgctttttgcagatgacagttatgtttattgtcgtgcgaatgatagagaggcttcgcatattttacatctgcttcagctgtttgagctcgcttctggacaacaagttaatttcggtaagtcctctatcttcttcagtactaatgtgcctaatgctactcgagaacgattgtgtgggatccttcgaatgagacttactgatgaacatagtacttatcttggcctcccttgtgcaatggtgggagggtcatttcttgtctatcactgggcgtgaggttctaataaaaactgtagcgcaagctttgccaagttttgctatgtctgtgtttttattgcctctgaaaacttgttcacatctggaaagattatggctaagtattggtggagttcgagttgtaagaagggtgtgagctggtttagttggaggaaactatgcaaatataagaaatctggtgggatgggttttcagagtttgcatgagtataatctctcgttgttgggtaagcaaggttggcggttacatctgtaccaggattcccttgtgggtcggatatataaggctcgatattttcctaaatgttcattcttggaggccgagttaggtggtaatctgagctttatttggcacagtgtctttgcgtcacaacagttgctcagagatggtgaccgtaggagaataggatctagttcatctattgaagtgttaaacacaccttggcttttgtctgaggctaacccgtgtgtggtatctaatcatctggcactggtcaattgtaaagtgtctcaactcatgaagccagatagtaggcaatgggatttggagcttattgagaacttgtttaagttccgtgatgtagagctcatcaaacaggtgcctttgagtgttaatcttgggagtgatggtttagaacaaggatccaactggttttttcactgtcaaaagcgcctatactcacttacagtcggtcaatggtagttggaacttatccatgaaggaggatgtttggaagatgttgtgaaagattaaagcaccttctaaggttttacattttgtttggaaagctcttttgggttgtttgcctacacgttctcagctgcatagtaaacatgtccctgcggatttacattgtgtgttttgcaattatagggaagcatcaattttccatgttttggttca

SEQ ID NO: 234699 - DNA, 786 bp, Cannabis indica
tatgttaagcaacacaatcaagttactgttgaatgcaccaaaacattcattgtcccattcattaaccaaagatctaggccgtgtgtaaaattcaaatcaatatcaactttctaaagtacttgtatgagattctcattggatatcttgataggtaaccacacctgtaaaattcatactccaaaaagtacttgactacttgtcccctcaagaaaagtgggagaaaatgataccactgtctccccgaaaagtaaatctggtagctaaccaacaatggcaacataacaatacaatcctatatcaactctaacttcaggactatcaaattaacaatcaaattctggtggaatccgtatatcttaataattgtttgaaaatcataatggacagatagtgcaaactacagaaatagtaaaacaaggtcgatgggttcttacaagacaatggatacttccgatatgacgagcagtatcaatatacaaatggctccccaatatattgacctgaactttgatgtataagcttaataatgtcattgtccataatgagagcaccattcttgtgaagcctggagatcaaaagaagaatagtccgaaactcaatcgttaagttatttaaacctcgaaaattttaaagtaaaaacaaaaaggaataaagatccatactcaaatatttaagtttatcccataactcaagtttctctgaagatgtcaaattatttggctgactcttcccttgcattagcctatcagtaaggtgagaaagccgcaactcttcttctattcgact

SEQ ID NO: 234700 - DNA, 1722 bp, Cannabis indica
tttcaatttaatttttatttatgtttattatatataaattttaattaaaaaattaataattaaaaaaatataaatgaaaaaaaattagttattacacaaaatactaaaactgaaaaaaagcaatacgagctcctatgataacgattattatgcaataactgctgtcataggggtccctatggcgataattatttcaaaataactgtcgccataagagacctataatagtagttacagtccgctatagggtggagcagcaggggcccacgccctatgccccccacccagacccaaaagatcctttaacaaaaatgtcccaaatttagtttttaaatatactatattttgtatttttaccattttttattgaaaaatataactattttctaaaaaaaatacttaatttattttttaagattctagattagatattttattataaaaaaaaacccaattatattttcaaaatattatattttagatttttaccactatatatacaaaaaaaaaaacataaaaattttcatataaaaaaagtaaataccattttagaccttgtgttttgcaaaagttacctattggactatttattttgttaaatgacaaaatgaatcctatattttctaaaatagtaaaaattagaccatgagcccaattttcaacaattttattttttaatataaccaacttttatgataatttctaacacgaagataaattgtaaccagttttgtcataacatctctagatcagattattattaagttttattttgacaaaatatcagttcagggtcctatttgtacaattttagaaaatacaggatccatttagtcatttaacaaaacagagggtcctttagtaacttttacaaaatacatggtctaaaatagtatttatcttatataaaaaaaacacaattaaatttttttagcccaaggcctcaaatattggcttgagacaggcctcacaacgattaaattacataataaccatcgacataagggccctatgactgtagttgctaactccttttagggactcctgaaacacgaattttgaatttttccaaaaaaatcacctctaaaagtctttttttttttagtggtaatgatacacaatatatgtgataattagtctaatatttttataaataaattaagtacaaatttaaaatatatgtgtaaaaactacaaaattaatgtttcagtgtatgtttgaaatatacagaataatttgtagtataaatatgtaagtttaattttcggttgcaaatatataccaataaaaaagggcatgtggacaattgtttgatacttaagttacagaaatgtaacttaagtattattactatcaaaaattaaacttaagtatttatctgcaactattaggggtgttcatccaatccaatccgcactatttactcatagtgcatcagatccgcactaagtgcggattttattttttggatccaatccaatctccacaataactcatgtctcatccaatccaatccgcataagtgcggattgaatccgttattttggattggttacttttcaatattaaattattaaatatttatgattttttttttcacataatttgcaacaaaataaaacaaattataattatgtctctaacaacacattaaataaataaaataacaaatttaaggaaaaaaaaatggtatgtataaagaaatgtctacttttattttaa

SEQ ID NO: 234701 - DNA, 796 bp, Cannabis indica
tatcaagattttaaatttagaataatttcaagtggtgacaatgattaattgtgaacacatttatgattctatagtttaacacattttactatgttgtataaccctttgaaagttttgggtattgagttttggttccatggcttttaaatgattttgatgatcacacatttgcttattctatttagatgtgatatattggtacattatattaccaaactgttcatagattgaattgctcgcttttaaagtgtatttgttatatatatatatatatatttgtttcaagattttgaaattaaaattcagtgggtgctactttattatatattttttttttattatttttttgttttttttcaaaagaaggttacatccttaaatacatatagatattgcttttgaaataagatttttaaatacatataaatacaatgtcacctaggaacgaggcaaatttgtccatattttgttttttaagatttcaatatatatacatatataatgaattccaattctcaagttcacattaatatacccacgttataatacatttacttacaaatgtaattagattatataatttacattggtagatagctattactggcttagctatatatatggtttgagtttttagtttctttcttgatacatatgtatgacaatattctttaaaacaattggttttaatttttgttatggcattgtattgtgtgtatcgcgcaattctttgaaagcttttatgtaaagcccgcttagctaatttggaaattgtcagttaattatgattaattat

SEQ ID NO: 234702 - DNA, 1379 bp, Cannabis indica
ataaagctcgatatggagaaggcatacaacaagatggactgggattttataatggaggtcctcaatttctatggtttcaagaaccctctgctgggatggatcaagagttgtatacaaatcaagaaaatgaatttgatgatcaatgggattaaacaaggcactatccaccccacgagtgggctcaggcaaggggatccactatcccccactctttttatcctagcagcagatatgttatctcggctcctgtaggattacacatctgaaggaaggattaaggggatcaaagttactcgctcagcccctgcgattactcatcttatgtttgcggatgatgtagtcctattcggtcaagccacgattaaagaagcccaggcctttgtggagtgtcttcaaaagtactgtgcttggtcaggacaagcgattaacctgcaaaaatcaacagttttcttctcaaagggggtccctaaaaattgaatgaatgatatcactactctcctgggaatgtgcaagatgaagaatgatgcctcttatctcggactacccctgttcagatccaagaaacggtctaaagatatgcaatatctagtgcaaagagttctcacaagaatagaagggtggaaggctcgtctgctttcgaaagctgggcgtacatgtctaattcaatcggaaggaacttcaattcctatttatgtggcggcatcggaggtgatcccttgtggtatagctaataaaatggagcaaagtctaagaaaattttgttggggtgataatgaaaggagttcaatttgcaaatcaaaatacaatttgcaaatcaaaatacaagggtggccttggcatccgaagaatcaaagatatcaatcaggccctccttctgaagtggggctggaaactcgtaaaggaaccccaaaatctttggagttctatcgtgactgagaagtatataaaagggtctaatctctttgatgttgagatgaaaggaagagtcgaccctatggaaagcaattctaaggtcaagaaccttactgaaagaaggtatgtgtcgagaaattggagatggcagggccacttcaatctggtttgatgcttgggtgcccaatggtgatcacatgcctcagcccctgttggatgctactcaaggtgcaaatttggtcaattatttcataaacgagaatatgacttggaatgaagaaagggtaaggaagtggtttagcgagagcgatgcaagaaacaaccttaatatcgggcttccccatcaatccaaaccagactcctggaggtggataggtgatccccgtggctgcttctcggtcaaatcagcttttaagctggtaacgaattccacaactcagcgatatacctcttgggattggagaatt

SEQ ID NO: 234703 - DNA, 1159 bp, Cannabis indica
tacacgatctctcatgggggaaaggagtttgggccctattgttgcacaaagggggttgcgtcagggtgatcctttatcaccatatttgtttattctctgtgccgagggtttttctagtttgttgcatagttaatgagaagagtggattaaatacaggttgtaaagttgctagaagagcttctgttattttacatatgttgtttgctgacgatagttacatctactataaagcaacagaggaggaagctcatattgttaaagagttactgcatacgtatgagattgcttctggtcaaaagatcaacttttcaaagtcgtcagtgttctactgtcacaatactagtacctctcaaagagatatcatttgtgagctgttagatatttatgaggctaatgagaatgggtcgtatttgggccttccatattcagtgggaaagaataaaaatgctatccttggttttcttaaagaaaaaataaaaaagaaaattaaaggatgggagggaaggatattgtctcgtgcggggaaggaggtgttgctgaaatcttctacgcaatcaattcctagctatgcaatgagtgttttcctattacctttggatacttacagggagttggataagttctggtggcaaacagactctgttcgtagaacgggtgttagttggatgagttgggatcgattgagtcatcacaaacatgttcggggtttgggtttttgaagtctgtgggacatgaatatggccttgttcgggaaacaatgctggaggttgttggttaatgatacgtccttggtgagtaaattttttaaagctaaatactatgccaacggaactcttctttcaactgaattggatgacaatccgagcttcgtatggaggagtatttttgaagcaaaaggtttgatacaggctggggcaacccctacgataggtacgagtgaacatacttttattttatgtgacccttggcttccaaacaacatgaatgactatgttatttttcacatcctgcacttgttaatcagactgtaagcagcctttatcaaaatgaattcacgagagtgggatgaagagataattaaggatctctttgatgatagagatcaagagttgattttttctttacaattgagttctactgccatatccgactattggag

SEQ ID NO: 234704 - DNA, 838 bp, Cannabis indica
cctaatctattatgaggagagatgacattagacatatcaaaagtagtcacatcaaaagaatcacgcaaaacagtttcataaggagattgagaggtacctgctatgtgtgaatcatttgactctgcagtgtgagaaaatgcagaaaaaaaaattcatgtgtaggaggaatacctccactattaacaaagggaaaaatgtgttcataaaagtagacatctcgagaaatgaatgtcacatttgtgttcagatcaagcaacttgtatgctttcatacctggagggtatccaagaaagatacaaggaacagacttaggtgaaaccttagacctggattgactcaaagtagatgcataggctagacatccaaaagattttagatgttcataggcaggagctttagaatgaaggatgtcaaatggtgacgtgttttgaagattgggtgtaggtgttctgttaattagatatgctgtagtagcaacacaatcttcccaatacaccaaggaatgtaagactaaaatagcaaagccctagtaacattgagtaaatattggtggtttctctcaacaacaaaattttgttgaggtctttacacacatgaatgataatgcataatcccaagttcattgaacaaatctttgaattgcaactcttttgcattatctgacctaactcccataataatttaaccaaactgatgttgaacaagttttataaactgaggtatgacagtttaagcatcagatttttgcttgatgagtttgatccaggtgtacctggaacattcatcaacaatggtaatggatacctataccatttagttctcatggtgttataagggc

SEQ ID NO: 234705 - DNA, 1102 bp, Cannabis indica
tcaatgcctctaattttcctacctccacttctatctttgtaggcaaacatagcattaaagtctccaaggataatccaaggagcttttaggtgcccaatgctagtaagcttattccaaagatctttcctctcatttagagagttgctaccataaaccgcagtgagaaaaaactcctccttgtaacccaccattttgagtttacaatgaataaattgcctatcttccatcaaaatatccactttaacaagtttatcaatccaaatcaacaaaattctaaaagaaatctcttgactggaatgaatcttccaattcggattattagtcataagtttgctaactctatcatgatggatcttagtctcaaaaagagccccaaaacccaccttatttatcttacaatgatcaaacacctcacgctgcttctccacattattcagccccctaacattccaacctaaaagattgagactatccattagacaagtttctaatatcagtagccaacatcccctctgcatcctctaatgcttcatagtcattgctggtagttgcttcttgttgcggcctaatgacatacttagtaccttttcttttaggagtcacccactgctcattactaggttgtatatccatatttttcaaagcccctacaccctcagaaatgtctcccctatcccctttactatcaccagtagtatagtaatattattggcagatatagcagtattattagcatcagtaacattcttttcagattccttgacactatccattggttttcccattgttactaacttcctgttcagcagcattgctcttattcccttgctgttttttcttccatataatcggcttccctttattaaagttggaaacagagtgtccaaccatatcgcaagccgtacatttggtagacagccactcatattcaacaggttgttccatttgttgcttcttctcatttacataagcaatttccttaatctcaacatccactaacacccgagcatacttgatcatagatctctcaagagtaaccttgtcggccatgatcggttttcctatcgtactaacaagagcactcaagttcttccttccccca

SEQ ID NO: 234706 - DNA, 1362 bp, Cannabis indica
cggggttatggaatttgaccattttacccctagttttggaaaatgcctaagttataacttggagggcatttaagtcatttcttttagtgatggtttggtggctgcctagggtgatgacatgtggcttcttattgtttcagcaaatgaattaatttcctaagctttattctattagggaaaaataaggaaattagagattaaccaaaaaaattgaagaaaagctctctcttcatttctctctctcttcgaaccagctaggaatcagggagttcttgctgaagtttgtgatttcaaccaagaattcaaggaagatcaagctaaggtaaaccccaaaacccttgattttgtgtatttttaagttttaagttagtttgaagtaatgaatttgggttttggtggctgttaggattgggaatacctagggtttggtttttatgttcattttaggttgattaaaggttttagtagctggttttaccactttgtgttgaatttatgcaagtttgagctttgaggtcaaagctttagtctctaatggcatgttgaatttcattgagtttttctgtgaattactggttggaaaatattgtgtataccctaattaggtaatctggagggtatggctgcatttggtggagttttgagcaaggaatgaagagtttgggtgaactggtatgaaccggctagccggttttaccagtaccctagccggttttggcaggatccctgaatgctccattttctctattctcatccattttagtgccgtagttgggtgtttctctatttcctgagttagagtaatacctggagagtatagcagaacatagagttgtaggttcgggtttcctgggattagggttttaaccatgtgatttacccaatttcattatgtgattagggcatccatctagcacgagactttccgttcaggtcggccagtacacttgaatctagaaagaaggcaagaactgtatataatgtgtgatatcaataactgagtgtatgtatatgttatgtaaatatgcatgcttaaatgttagttgcactaccagcacttgtactgttatggtacaaagtgcattggtattgtaataccctaggttatgaaatggattagcaaaaccctaattagataattatgaataattgagaaattatattattatataatttaatatatgagaatttatatgatttatactatgataagaccccgttggtgagccaggggcattttagtaattctgacccgagatgggtaaaataatgaaattaatttactaacgtgtatattatgcctgtgttgtctttttcaagtgtgttctgacaggttggcgcggtatagtcacaaccaggtat

SEQ ID NO: 234707 - DNA, 1257 bp, Cannabis indica
actattttttattaattaaagctatgtgtgtattaactttaaattatagggagttttatttcaattatttcagttatttaaattaaaaacaataattacaaaaagatctttacttattaataaattgcataaaattaattaataattattaataaattaattttattaattttttaaaaaaaaaaataaaatattaagttacaatttaattataaattatttttcttttaatttttatattaatcacaaccattcaataaaaataaatataactataataattaaaaatataactatttttttttttttgaataatgattaaatttcattaaactaaatcatccaaaaccaaggatgcaataacaaaaggtaaggagtccctactaaaagtacggtcagcctcagaaagagaagatcgcgccaaggcatgcgcaaccttattagcagaccgcttagcaaaaataaaagaaacaacatcaaaatcagcaaccaaagtcatacaatcataaagaatatggccataaggagaagccatatttttgaacttttgcaaatcattaatgacccttaaacaatccgactcaacaacaacatgtgaccatccatttactttactccaagagagagcttccttgataccaatggcctcaacaatatgaggttgcaaagagccttctctagataaacttctggcccccaagaccaaccacgcagcagaccttgcaatcaagcccagtccataccgcccttgggtaggaaaaagtgcaccatccacattaattttgacaaaaagaaaatcgggtgttgtccattgctccacgggtagcgcagtcagccagtttaagcttacatctgtgacattaagtttttgagcagtaaaccagtcaacataatttaactttgccattgctactacctcactcgcatcagggtgcttgaagttccaaaccaaatcgttacgatgagtccaaactaacccacagaccataccagcatcaagagcctcggtcgtgttccacgataccaaacccgcttcaaaccaactcgagaacaacattgcatcaggcgccacaacagtaattggaaccttgctccagcaactttgagcaaaagagcaccgcaccagcacatgcaaagtcgtctcaggagcaacaaggcagaacggacatgttgcagcaattggaaacatgttttgtggaaagatgaaaaccgagttgggagactgtttgtagaagctctccacagaaaattaagaac

SEQ ID NO: 234708 - DNA, 808 bp, Cannabis indica
aaaaatctcgaagatgagatgggcattccagaacctgccccctcctccaaaagatcttctgcaacttgacccccaaagactttttgattgacatcaccagcgctaataatgcagtcatcaccataggaccaaacattgttccaaaaatcgacattagaatccttgccaataatccaaacactgtgatccttaatgaaatctctagtcatccaaatgccttttgccaccggggaagcattcctcgggagtttgttgctccaaaaactcgaatgcatacaatatatctccaataacaaattaacccagatcttatcctgcttcgaagccaacatccaacctagtttagtaagaagacagaaattgatatccgagaagcaacacaagcctaatctgccataaattttaggcatccatatattatcctaactcaaaagagagagatatctcccaccttaagttgaccctgtccacctgaacttcttgaccaaggcatctagagaccaattgatctttttggggacattaaacacatacatagtatataagggaatagaggagattacattcttaatgagtgtggtgcaagcggcttaagaaagtaatttggccctccatctctccattctgttcctcacactctcaaggacatattgaaatcctttcccctattccctttagcaaataacgggtttccaagaaaagattcctcaccattgatcaactcaaagccgaggaagttagaaatctcagtaatcctgttgggaatatagtttctcgaagccataattttggatttattttggttgat

SEQ ID NO: 234709 - DNA, 926 bp, Cannabis indica
ttgaagtaaaagaaattgaggtgagtgtaaagcttactatctctttcacatgtgattagtcatctgcacgctaagtttaagcacattgacactttcagataggtgcaagcatgaactataaataaatatatatataaatatatatatattttcattggcacacttggttcctaactattcccaacctccctcttcactatctcaacctagtggctcacgccctatatgattatgtagaacatcgcatgaactctgtaaagttttataatgtcacataaaggctttgaatgaaaaatgtcttcaagttcttcccattgcaatgcagctgtggggttttgtgtatccatcaaagtacgatgaggtagttgccatgagccatatggaagcacctggtatctgtcgatggtgaatgctctcagacaaggttaagaaactggctgccgaaaccttattattggtggttaatgctcggtgatgctgacccaactaacgagtgaaatcacaggtcttttttgtacagatcaactgtttgttgataatgttgtgatgtctttcttttttttgcatataaaggtcgttccctgtatatatttttcaataaacacatgctgtttagagagcagccagttttgtggaatgtatgatactgtttttgtagttttgaacatgtttgtaattgtaacctctttagtccccatctgttatcagtttgatggctaaatatcaaaatcaatgctgattcaatacttgattcgatgttgtgttaccttctgataagattaaactacattttcttgcttcttgttttacaagcacaaaggatttaatgtctaatgctaatagcaacagataatcttgtggtttaacaaatgaattatcttaattggaaatcaatcataaaactgaattcttttatatttaatttt

SEQ ID NO: 234710 - DNA, 989 bp, Cannabis indica
tttgtagttagattaccaaggacagtagggttttatgattccatctggttaagtttcaatcaatataaaaagttagctcactttttaccagttcggactacgtatacagtggatcagtacactgatctatatgtcaaggagataattcaacttgatggtgctctaaagctggttgtctcagattgagatccaaaatttacatccaagtattgggagagtctacaatgagaaatgggtaataagttaaagttcagtacaacatttcatcctcaaagagatggtcaatttaagaggatttttcaaataattaagggtatattacatgtgtgtatgatggactttgaaggttcttagaacaagtaccttcttctgattaaggtttcatacagcaatagtagtactattggaactgtatgaaatgctttataggaggaaatgtcgttcacccattcattgggatgatgccggtgaacggagatatcttggacctgatgccgtccaaagaatgagtgaggccattcaaaaaattcgagctcgtatgcttgcctcatagagtagacaaaaaagctacgctgattcgaagcgtagggatattaagttccaggtaggggactttgtcttcatttgaatatcgccaatgaagggaatctggagatttcgaaaaaagggaaagttaagtcccagatttattttcccatttgagattctagaaaggataggtcaagtagcctatcagatagccttaccccctactttgtctagacttcaaaacgtatttcacatatcaatgcttcgaaagtatgtgtaagatatgactcatattctaagatatgaggatattgaacttcaaacagactggtcatacgaggagcaaccagttcagatcctggataggaaggagaaagtgttgcggaactagactattttgctagttaaagtgttctggaggaacaacaagattgaagaggtgacctgagatttagactatt

SEQ ID NO: 234711 - DNA, 1529 bp, Cannabis indica
ttatgtaagttatgctattaattgttttggtgtatttattatattatatgtcgtttactgcattctgccaacagtggtattttgtcgatttatgatatataatatgatatgctgttaagttagaggtgagattcaatttatgcaagattaattaatttgtgcttttaatatatacatcttctggttgtaatcaatggtgtagaattacaactgtgttttgaattaatatcgatattagaataagatttgcaaaactacatttctaccttaccaaactctttatctgatcacaccatttctctcatcattttatttttaattcattccaatttatatcattttctacttactaaactaatcttttgtggtaatttacctccctgtggatacgacatatagcccgtttactaccacgaccgcagtgtaactaattgggcgacatcaccttgcataccgccaatagaacttagaatggtgaccttgccctacccatttgctatatgggggatcgacctaattggggcattacccacggggcgaggaggagctaagtatgcggtagtagcagtcgacttgttcactgaatggacggaggccgaactcctcgtttccataacctgcaagaaagtcattgactttgttgtcaagaacattatctacaggttcggaatccccatgaagatagtatctgaattctgcgagaggaacaaaattatcaaaagcttctcgccagtatccagacctcaggcaaacggacaagtggaagccgtcaataaaaccctaaaggatactattaagaagaagctagacgctgccaaaagtagatgggttgacgagctacctcaggtactctgggcccacagaactaccgagaaaatagccacgagagacattcctttctcgctagcatttggctcggaagcaatgctgcctgttgaagtgaacatctcgactcacagaagagagttttataatcaataagaaaactaggaacttttaaaattgtccttggatctacttgaggagaaacgaactgagtcgcagatcaccaatgcagcataccaacaccgagttacaagatacttctacaagaaagtcaagaaaagactattcaatgttggagactttgtgctcagacgagtctttgcaaatacgagagacgcatctataggagtgttaaacctgaattgggagggtccatatgtcatcgaagcagtagttggagtcggagtttataaattggctcgacttgatggttcactaataaaaaactactggaacgtagaacatttgtgaccttactatcaataaaaaaaatgatgtaactcgcattactgatgcaaactttaaacttcagttatgaataaagagagtcctttgtactaagtaattacaaagttttgttctttaaaaattacttaaggggcatttatgtatgattaaccgaaattcatctggaaatacattgtataatgcaaacccgtcattttaattttttttttgaaattcaaaggttctcagctaaacct

SEQ ID NO: 234712 - DNA, 1294 bp, Cannabis indica
ttttttttcatttttaagaccttattgatgtttgtttgaatgtcttttttatattgtatgccttagttttttttgtatattataggattgtacttttctttaatttatactctattttatactttctttcatctgatttagtttattgatcattatttggtggttaatatacttttgtttatcattaatatgcatgatagtttatatcatgtgatttttgtaaattttttagtttttgatactacatactttagattttttttaattttttatttttaaaaaatgtgtttgtatattatacgattgttatatatgtgtatttttcatatgattaggatatattttcattttttaagtttgttgtttggataatattttgttagagaatatttttgtatttgtatttattttaggattttattgctttgtttgttgaatgtgattttgtttctgtatacttaatggttatttatttatttctttttttaggattttattgcagtttgtttaaatgtgattttaatgttgtataatttagggcttttttttttcattctttttacaattttattgatgtttgtttgaatgtgtttttgatattgtataccataagttttatattattgtattttttttttgtatattataggtttgtatactgtatactatactttttttgtatctaattttgtttattgatcatatatttggagattaatcttttatatatatataatttagaaatttatttgatcagacgttatttatcattaatatgcatcctttgttttttagtttatgttcgtgagtttgggggttagttatgtatttgatttgtgcattatgtatacataatatacggtaaagtgtattgtatataatattttagtttacatacagattgtataagttaacgtttattgtatatattgatgtatagttatatgtagttgttgtaatgtattattgttaaaatatatacataatagttattatttgatttgtggtttaccagtttaagtttttgtattttggtttaaagtatataatcgtttcgcatttcgtgtgtatatagtatacaataaggtgtgttgtctataaggatttatgtttatatgtgtgttgtataaattagtgtatattgtgcatatttttgtatactaaatgtgtgtatattgtataaattaatgtatattatgttctctgatttgggatgtatacttagattaggtgtaggaatgtatgtttgttaaattgtatacgtaatagtttagaatatatgtatattgcaagt

SEQ ID NO: 234713 - DNA, 613 bp, Cannabis indica
attggttttaataagtttctttcatcttgaacccgagggtcaagatcctcgtccttcttttctctttcatctgccaaaaccgccattaactagtgaccgacttttctatgctgcaactctatgcgatagcaatcatgagccaataacatttgatcacctcacaccactcctacaccttctggtgtttggaacttcagggataggtgcttgatcgaactaactacccctagtccgatcaatgctgggggtcccaacaatatattgtaagccgatggcaggtcgacaactagaaagtcttgcataactgtggcggatagggggcctcgcctaaggttaatgcgagctcgattattcctcgactggcaatactgtcgccggcgaagccacaaagatttaccaagcaaggcttcaatttagcttttttaagccccatcttcttcaacgtttccttataaaggatgtttaccgagctctcattatctattaacaccctctttatccttttattggcgagttgaatagtgatcaccatgggtcgacatgaggatatctcacgttcttctcatcctcctccaaaaatattattggaagttcctcagtttttaccttcttg

SEQ ID NO: 234714 - DNA, 867 bp, Cannabis indica
aaaaaaggtatagttttttagggttttaattattggtttaaaaatcaaattttttgattttctaagcatagaaaatcaaatttcccttatataaatctatttgactttgactatttttcagttcacactacactagtcccacatatgattttaattaaaagaaataaaatagataatgaaaatggcccatgcaggtctcgaacctgcgaccttcgcgttattagcacgacgctctaaccagctgagctaataggcctcttgtttacgtttacttatataaatatttactactcttacaatgtattgtactaaatttaaatcatcatgacaagaaactaaatcaaatcatctaatattttattgtgtaattaagttttatgtttaataattaatttaaatgtactaataaaaaaataacataaataatcttatgtatcttcaacaaggtgggtgcacttgaagagtttaagaacaacaaagatagacaataaaccaaagcatgaaaatccaatagagaaagacaactattcattatttttgtataacattcaaaatcattgattgtaacccaaagaaagttccacaaatttcagctacaacaaatcagtatcaatgaaaacaaaaaggtattaagaaagaacttaataaagatcacaaccgaactagtagtccaaagcagaaggtattcttaaaaagccattaccctttgcatctatttttattttgtgttttttggtttgaactcttacaaaaatataaaatgatatgagaaaaggactgtgattcccaagtgaaataaagttcaataaccaaccagctttgttagtactaagtacgccgctttttggggagccggcagccattatg

SEQ ID NO: 234715 - DNA, 636 bp, Cannabis indica
tgtttgttcttcttcttttggtgatctagtacttgtcgtccttggcgttgtgtcaggactatgaagtggtgcctattcttgtatagacctataccatgaaaataatagcttagaactgtcatgagctaggtaatgtcgcgacagttcctcaattattggatttaaattgtcaattttagcctaaggtgttagtgttctaaaaaactgatgcacgatttttactgcaagcgtacaatattattatgcaaagttttttttatctgtgtttttgaataggtgacaagtggcataaaaggagagagagtcttataatctcactaattaaaatccttcaataaaattcagtcacggagaagcttcactaattcgggaacaagtccagaccaagagataagctaaggtctaccttgccttactttagcttctaggatacggaagacaaattaccactctggaacccaaagtggcccaaactcaaagtttgcccaaacaatactcggacaggtactcgaaaggcctatcgtagatgttgaccgcccaaaagagctgcagacgtctaccttagatacaaacccatatcgcccaatgatggttatgctttttctaacacatgatcagatcttgtcccctgtgcca

SEQ ID NO: 234716 - DNA, 587 bp, Cannabis indica
caaaaacaaccaggtcccgacaaccagcagcatagggggctgcccaaggatctttggctcaacaataacccccattgtacaaacaatggccggttagccacaggagcacccatggctggccaaagtacaacacttcctccccaaggggagcgaggtgcccaaaggtcaatctttaatcgataaggaccgggagcgggtggaaacacccaaaatggtgattcaagaagtgaaactgatcactttacacattcagatccaccaaactccaacaattggtgtgatctacccctgtcaacgcacaaccaacactagttaaccgcggagtcacaggcggctagaccctaccttttgtaggtctggccggccataaaagagcaatggggtggcctgatcctgcccaatctggtcggccaagcacaatagcgggatgtcagcctggccggccaaggccagttttgtacctcaaaatggtcgactagggtctatagttcaacacaggtctggccgacctttaccataccctcttatagggtatagctagcaagcccttgtctctccagaatctactacctccccaaggagggtca

SEQ ID NO: 234717 - DNA, 2756 bp, Cannabis indica
tgagttctggccaataaatccctagtgtatttctgctgtgtcaaataaattgctgaagtggtgcgatgaacttcaaatcccaagaagtaagtgactgacccgagagctttgagagagaaactgtgatgtaattgagaaataagattgtgaacaacattggtatcagcaccagtaatgagaatatcatcaacatatattaagataaggagcagatggccattgtgattggaaaagaagagactattatctgatttgctgctcttgaatccccactgtactaaagtatttttcagggtgtcaaaccaggctcttggagcctgtttgagaccataaatagccttgtgaagcttgcacacatgattgggaaaatttttgtccacaaacccttgtggttgagccatataaacatcttcttggagttgaccattgagaaaagcattgttaatgtcaacttgttgaatgtcccaaccattagagatagctaaagtgaacataattcgaattgtgcaaggtttgatgacaggactatatgtctcaaagaagtcaataccagctgtttgttggaaacctttggcaacaagccttgcttttagtctttcaacactaccatctgcattgaacttaattctgtatacccatttgttgtgaattacaatcatgtcagctgttcttggaacaagagtccaagttttctttttctttagagcagtcatttctgatcccattgcagcattccacttaggattggcaagagcttccttgagggaagtgagttcatgttcagtgtgtgtattagcaagaaaacttctgggtttgtaaatgccaagtttagatcgagttaccatatgatgttggtttctggtgtgagttggaacatggacagtaggtatatgttgtgtttcagaaggaggaatactggtggctgaggtggactggtttggtaattgctgagttgtgattggtggtgtttgattgctggtaggagagacagtaggtgataggggtgttgtgtcaggttgtggtgtagggacaggacttggaattgggaaagaaagttggttactggtttgggcaggggtatttctaggtgttggaggaaataactcattgtagggaaattcttgttcattaaaggtcacactcctagccacatatattcttcctgaaggatgtaagcatctatatcctctaaaattggggctgtatcctatgaatatacatttagaggatcaaaaggcaactttatgagatgcatagggtgtaagtagggggaaacatgaacaaccaaagaccttaagcaaattataatcgggtgagtgatgaaataatttttcataaggtgtttgaaagttcaagattggtgttgggagcctatttatgagataggctgcagaaacaaatgcttcccaccaaaaagataagggcattgtggcttgggacagcaatgttaatcctatatcaacaacatgtcgatgctttctctctactcgaccttgttgttgatgagtgtgaggacaagaattcctttgaacaatgccaaggtttttaaaaagtttgtacaaaggttcaaattctttgccaagatcacattggacagcctttattgtagtttgaaattgcctttcaacaaaggaattaaattgacagaatagggtactagcttcagattttgatttcattggaaaaagccaagtgaatttagtaaaatcatcaagaaaacttatgtaatatttgaaaccatcagctgaagtatagaaagaggggccccaaacatcagtaagaattaattcgaaaggttgaacaattttattagtagtgcttttaaaactgaattggtgcaatttaccaatttgacaggcattacaaaaatcaagtgtcttgcactttacatgaagaacaagtttttgtaaaactttatttagtataggttgagatggatgtccaagtctagagtgccaaatattggcaagttgagacttgtcaaagaccggttggaagtggtggtatgattgagtgcttttggctgggaggatctaaggcttgaacttcaagcttgtacaatccattactgagatggccctgcagaagaggtttcttggtggccttgtcctttatgacacaagaaaattcatcaaattcaagagtgacatgattatgtttggtgaattgggaaatgctaagtagatttttggtgacactaggcacatgaagaatatcttgcaatacaagaggatgattagaaaattttgtacacactgaactagaaccaatttgatgaatagggatagaagtgccattacctacaaccacttgagcttttccttcgtaatctgtagaagtagtaaggtgattggcatcatttgtcatgtgatgtgtagcacctgaatcaagataccatgctgtggagttgtcattgttgttgttggattcagatataagtgcctgggggttatcattgggagatggattagaagaggtgttgctgtgttagcacctgtataggtgatgtcaaaacgatggtaacacttgacagcaatgtgtccagttctaccacagagttgacacacaggtctagtgccacggccacctctgttgctggtgttgaaccggcctcctcgattggcacctctgaatccacgagtgggaaaagaacctctggtgcttgcaacatgtgcttgaacattatgtaaagaatcagtggtgtgttgctggattcgcatttcttgactttggagcatgaattgcacttcctgaag

SEQ ID NO: 234718 - DNA, 1429 bp, Cannabis indica
aaattacgtcatcatcaaaatataaatctttgatttattatcaaagatttgatagaattgggtccactggtaattaatttatactttttttaaaataaaaatattaaatttgttaaatgatgtttaaagctgcaaatgtatgacttttgtttgctcacatgttatatttaatgattataaaataattttttttaattattatgtcattattaatattgaactccatatttttaatttattgtttttaaatgaaaacaaaaaaattggaagagttatttaattattataaataacttaatataaggaagttttaatttttaatataaaattaaaaaaatattagattttaaatttgattcataattaaataaaattttaatttattttaagacttttttcagttttaaccaaaaaaagtaacaatattacaaaagtacttccagctggccaaataaacaaatatacagtccaaataaaaaatttacacaaataccacttacacacacattgaacccatgatctatgcttcctggacaactatcgcgcaactattgcgcaactacacagcaacccaacacaaccgaaacaaaaattcaaccagaaagagaaccacatttaatttcggcgacttcacctgagaagatgatcagaatcgatcaaaacaggggctatttcgaattcataaaatcacataaaatcacataaaatgtataattgttgtctttgccttatggatgtatttttgtaaataaagtgtcaatttatattttttatgttataattttttattttcatataaaattaaaaagaaaatattaaaaccgtactaagtgcggaactattctctagtttattatatattaatttatttatttttttattttgtaactattttattagtagattggaagtcacaattctcaattttaatctttgatttttaatattgaaattttatgatctaattctgctaaatatgtctgcatgcccctaagagtaaacctttatcaataaaaaaaatcttccactaattacttctttttttaacttatatcggtcaccatacaaaaaaacactcattcagtagaaaacattaataatctaaaaagattacaactttacttcatcatacttctctaggtatttacttaaggaaaagcagccaacagaatcatcggcgtgccacgtctcacctcgtacaaagtaacggctgagatgatcaagttaactggacacgtgaacattccctcgtgtttcagtgttccaatagaaatgccttccttgaggagagcacgtgacctctccacatatatatatataatatataaatttatacatcttcttcttctctaaactccaaactgcataactacccaagcctctcagcctcccaccatctggctcttactctctcaacactcatttctga

SEQ ID NO: 234719 - DNA, 785 bp, Cannabis indica
tatgtgagtcaatgagctgcaagctttgtaaacaattcattatctacccttttcccatttccaagcattgtcattctgttgcgaattttgtatttctcgtgatgaacattctaagttgatcgtttatctcacaaatcttatcaatcggtagttattattcgtagctcgcccttatctttaaaagggtgagtttaaatatttctaccacgtgtatttttttaaggcgagattattgaatgtattaattgctttataacacgagttggtttctttacacgtgtcaataccatattgtggctcgaaatatgggtataacagagacataaaataacagtaatttattttattttcttgttagttatgtaaaaaattaaaaaaatttaagtaattcaatattaaaaagtaaccaatctaaaataatcgattcaatatgcactgttacggattgaattagatttgagttattatggagattgtagtgaatccaaaaatatgaagattaaaattaattattataatgggagctaatacaataggcattgtgatttttacctatcaatagggataataattttgtagcttttgatttaatcaaatgactcaaattaacccttgaaatttatatatttattattaattaattatattttctacttaaaatagtaatagtagctagacaaattcaaaatattcaagttatttaatcctacaataatcaatacaaccaataatataataatgggctttttcataaatgtacaccaaaaacaatataattacaaaaa

SEQ ID NO: 234720 - DNA, 768 bp, Cannabis indica
attattttggtattttattgacttatttaatctatctattcagtgactacataattgttgggatattattgttctttttagattaataagttgtcctggttttgttactaatattttcttatcgatataggagttattctattattttttaataagtattttgtgatataaattcagggatcatttataagcgttatcttcctaaaagggtcaaattgtgacattttactacctaagttgtggatactacatatctgccacggcttaggactcgggtcatgacataaactgagttaaaaaccgaagagaaatatcatttttctagcaatgtttgaaaaataaattaaacaatgtaaaaaaaaaaaagaaaataaaacatagaataaaatgtttttatcatgtcatgtctatttgtgctttgttttatataattatatatataatgataggtgaatttaggggtgttgagagagggtcaaagcccaccatgagatttaaaaatatattaagttaaatagcgacataagtacctaaaatttaagctttgtaagtggcataaacttaatatttatttttaacagcataagtacctaatatttgtaaaactgtaattttttactaatttcgtcagtacagtttttgtgttaatatatcactaataataaatattagttttatgccgcttacaaacttaaaacgttagatacttatgtcactaattacccaatatattaatatacaattgttgctttcatatatatatatata

SEQ ID NO: 234721 - DNA, 802 bp, Cannabis indica
aatgaaaattacttggaatatagcttggtctgtatcatcaagtccccacaaataggctttaacaaaaacaatcaatgtgtcatctaggtgtcgtcgcattaataaataccatttttaattcaatttttataatagtattttcatatttagttttaaaataactttcaatggttgggcaaaacatattctttttcttttattaaacttaaaaaccaaataaaagttatcatacacacattgcttttcattttgttttatcatcataggaggaaaacaagaggggagctatttgttgcacacctatatatgaacccatgacaaaaataaaaatgatttctaattttgtgcttaaaacaaaaccaaaaaacaaaaaacataacaaagacaacatatatcttactattaatatgttatgttcttcttatctcaatgaagttaattaattgtgctcctatttaatcaagattgtaattaattaacaccacattctcaatactttcacaaaaggaaaaaaaaaagcccctcatacattgctacacatattttctaaaatgtctacatgtaatatgttgaagtttccaattatgactatgatcatctcaatagtcaccatcttgatcttatcatttccatcctccattgcaataaccaaaacaaacccacatccctttaagaaaatctacgcctttggtgattcttttacagacacaggcaacacaaagtcagtttctgggccaagtgggtttaatcatggctctgaccctccatacggaatgaccttctttcaccatccaacaaatcg

SEQ ID NO: 234722 - DNA, 2275 bp, Cannabis indica
acttatgttgtttctctaaaaacacaagcttcacaaaatagtaagacatgagaatttaaattttcaattagaccttgtttgtgcagttctttgaggccttgttcactaatatgcacaagtctgtgatgccacaactgtatatctaattcttgaccttttaccaaactagcttctccagctaaaataatttctctccttggaaaacatacaaaccattgatcttctcacctttactatcaaagaacttttggtaattctcaagcttccattcatggtcttgtatctgtaacctatctcaaatgagcacaaagatttgagtcaaatgaccaatatatagaagcatatatatgtaaattagaacaattattcttaaaaaataaaagagagaaagaaaaggaaaaacaactaatttacatctatacaacagttcaaaatgtgctacagcataccaagatttgtagtatattttattttcatatattgttaaaaaaatgtatgttcattgtaaataacattataatttatttatttttggttcattgtatagatacttggtgtttttagctgggaaggatgcaatcccatgccccctgaattttggattctcccttccaatctgtttccaataaacccaggttaattaatacaaagtgtttttttagcattgacaaaatttattacttattaagctttttcttaaaattttgaagtgccataaacaaaataaaatagagtgagtgtataataaaatgcataaattttatcttaaaactaaattattagcaatagaagagtatctagcatatgcatcttataagtaccaagttcacacacataattaatatataaaatgaaaatcatgcagaaatgaatcaatataatttgctctcttttctttcaattctcggaaattaatcttttatatatgcatgcagctaaaatgtggtgttactgtcgaacagtttatttgcccatgtcatatttatatggaaaaaaatttgttggttcaatcacacctcttattctacaactgagggaagaacttttcactcaaccttatgatgaaataaattggaagaaagtacgccatttttgtgctaaagtgagtcgaagtagcaactatcttcagattttaattaaaaattaatgtagtattaattaaatgatatttttatagtttaagatacttacaatgagtattatatgtatgtttcaatgtaggaagacctatattatcctcatccatgggtgcaagagttgttttgggacagtttatacatgtgtaccgagcctcttcttactcgatggcccttaaataaattaattagacagaaagctctacaagtaacaatggaacatattcattacgaagatgagaatagtcgatatattacaattggatgtattgaaaaagtaatataagaatatattattttgttttccttacaagtcaatttcaaaaatacattttatgtatatgtaattcaattgttgaatttaatatgtatcaaaagtaatatagattctatttaatttaatttttaacattttaatttaaacaagaaggggtaattatgctttcgtgttgggttgaaaatccaaatggagttaatttaaaaaacaccttgctagaatcccagactacttatggattgctgaagatggaatgaaaatgcaggtataattgttttctttattatatacttactactatttttcattatcataatttcactaaattcactatatggatgtaagtggccatggtttaaatagttatagctaactagggtaatatatatacattgtaaagaaagttaaattttcccctaatttttagaaaaattattaacaatttacagtaaaaggtgttaattaaaaatatgcagataatagtttgtagaaattcataacaacttgtaactaatttttatttattctgtaaatattatttacaaaattgcaatatgtgatcataatataaacataaaaaaaatttagttaaaaaaaataaaataaaaactaacattgttacaaatttgtaaaattttgttaacaaaaaaaaagttaactatatttacaattcctttatttaaatagtataaaataatttaaattatgcactaaacaaatgaatggttaagtttttgtatactaatatgtatagacaagagtcatatattgatttctacagagttttggtagtcaagcatgggagtactagttttgttcattcaagctttggttgctactaatctcactgatgaaattggag

SEQ ID NO: 234723 - DNA, 1132 bp, Cannabis indica
ttaaaaattaaacaagtaattaaaatgagaagtgatcagaaaataattatggaagacacaagcttcgtacatgcaattatattttcctaataaaattgattctttagactcaactataattctacaccattaattaaatttgaaaaatgtgtacaattaagctcactagaaaaatatgttctctaattaaattaatactacttctaaaaatactatcatattatataatttaaatcgataaaaaaccaccggcagaatgcagcaaaaatcatataatataataaacactctaataattaatagtctaacttacataagaaaagcatgactgaacttatataaaatgtactattaaattcaaagtacaatttagaagaagagaaattcaatataatatatatggaaatgaagaacaaagagatctatatattagaaaaataaaaattatatgaacttacacttgagtcttgccaaagaaattagcctgaaaaggcattgtgtttacaccaaaattaataaagtaaaataaaaaagaagaaaagaaaaagataaaattctggtataacaacactaggaaaaatctgatacccatattgtgccaaaactcttatatttatagtgcttccaatcccccattgtctgtgattgatggttttattaggaggctttggaaagggaaagtcgacaaggttggatctttgtcttatggggtttttcttgtttgatttgacacaattgagattagagattaaattcttaatggaggatatgtgttcttcaacaatcgtccggttctaatgaaggcctgggatcctgaagtaaatttcaaaaaagaagatataagttcagtgctgatttggattcagttacctgatttagaattgaagtattgaggagagaaatctcttttcaaaattgttgggcagctagggaagccacttcaggttgatgcaatgactaaagaaaggaataagttgagctatccgagggtccttattgaagttgctattgagcaagagttcccagagagaataccttttgaagatgagcatggttttgatgtatatgcttccattaattatgaatggaaaccaattcattatcaccactgcaagggacttgggcatgctac

SEQ ID NO: 234724 - DNA, 794 bp, Cannabis indica
atcttgtaattgatatttgtcaccgtgtcggttactttttgtactttttgtgagcttccttcctttacaggtccaagctgtaataagcattgaggatggctggataaggcatctcttctagggatggaaatgagacaggtaataattaaggagtgatttcccgtccccttccgttcattattttaatacgtctctccaactctatccttacaaactttttagaataaagtgtcatttatattttttatgtaataatttcttagaataattagtaatttttcttctgaactttcgacaatattgattttgcttttaaacccaaatctccttcttccccgacccattctcttctctattcccatttttttttcatttgaaaaacctccattaacaaccctaatcgcgagaccaagaacaagaagaagaggaaaaggagggagaagccattaacgaccccgagaacaaggtttgtttttatttttagaattttctttttattttcatcttcttatttttttttctacatttgtttctctctaaaaaatacaagaaaaaaaaacaacatctcccaaactggcgttcacaccatccaactccgacgttgatgcgtgtcgtatgctgtatcaaatttactatatttttttattctaatactttcaattatttcagtataaaagtaagtacgggtcgaacccacgaaaactatgtttattcaattattcaaaacttaatgacaagagttaggaaagagagttttgagattgaaattaatatagcagaaataaaaataaaac

SEQ ID NO: 234725 - DNA, 3001 bp, Cannabis indica
aaatttaatgacttggaccaatcaagaattgctacatggtaatttacttaacatttaatacctagataactataaaagttatagtattataactcaggtattattactgccaaaaaataaagtcaagtatttatttacaactaaaaattaaacttaattatttatactacaaattattcttatttatttgggatgcatcgatatatttttagttattttttttaattattatattcaactgcaggccaactgcagctgatgtgtcgattcatccaatgctttggaaatcagacacaaggatatcgtttatatatcaaacaaacataaaagctaggaaagatttgaactctacattttcacaagcattgaacaacattaacattggaataataaattctaactgggaaaatattttggatgatctaataaaaaaggatatgcaaacacgaatacaacaacgttgcaactataatgtttcgagtattttagacttgttgcgacttcaacgtaacttgttcaaccacaatgaacgaaaaaaaaaactctaccaggtacgtacgtacgtaatgatcatataataaaaatttagtactaaaattaagcaaaggtgcatgcaatcaacattatttttatcggttaagtgtaacaatgcatcattttcttttattttttttagtatctatatagttctaatcttaatttttatttttaaagtaaacataattgttgccaatttataagacaatcttcattacaggtattaaacacgttacacttttttttttaaaaaaaactttagaataattttcagtaaatagagttcaaataatctattataattaattatttaaatgtcaaaaatacgaaagaagtacatagttcatcctagaattttctttaagtttatttaattttttttaaaattgtatttgttaaatttatgtattttttgatcaggattggaaatggggagaatgtgaagatttagaatcatactttgcaaacacatttccgagactctttatagaaatgtacaaaatcattttccaataccataaacaagatgaagactttaagaaatactttgatgaaagccacaatttgtaagatcatgaagatcgaaaccctaaacgtgctgcaaaaagtatgggtgtctccgaaggtaacagaaggcgtacttggtgtaataagaagtcttaagttggattaaaataaaaacaatgtcgtagtagtgttttgtttgtttgtttgtttgtatttttttaagtaatatgattatcttgttattcatgcaatagcatgattttttattaaaaaacaatgtttgtaaaagttgtcttcaagtttaagaaaaggtttctattttgtttttagaatatttacaccatatttaaatttttctctaaagtttatatctatactttgacaaataaatttttatatttatactttgtagctctattattttattattacataatttatagtaagttaaacactaatggtcatttattataaattacattttaaatgaaattaaaaaaaattacattaaaataataataatgaattaaacaaattatgaaactggggttgaatcacgcgaagcacagtttagttgtctaattttgggtatgagcaaaagtaaaaagtttgccgaggagaattgttaatttaatttaagtcatgaaatcaacatgtctattactaaataaatactaataattaaataaagttagtatatcaaattaatgaaattggaagacgaaaagctacactatctacaacactttatagtgttgactgaacaatgaaattgtactcgaaccacatatttaacaaaagattaaaggtcttataagaaacaccaaaaaagacaaaaaaaaaaaaattaataataagccactgaaaaagaaaaggacagataattgaaacctagatatgtccctttaaaccttcattaatcatcataatttctttttgcaactgcaattttccccttctcacctttaaaaacataaacataactatccatattattgaaaagggcatatctattctattaattaggcaccagtctagcaacttttacacttatcattttgtaattggttaacaatattttttaaaaccttattacatttaattatattggacccatacttagtaatattaacacactactcttatgttctagcatttctctattgaaaaggacctcttaaaagctttggacatagaacccaatcctcaccaagtaaaaagaaaagataaattatggcataattctgaagcatataccatttcttctaaggtttattctatgtaccgatgagacaaatatttagctatttaaggcttggttatgatgcctgtgaaccagaattaatggcagtaagaaaaagagttgagttcaagtcatgtataagctaaccagttatagggcttctcttcttggcaagtgttggtgatttcaccaatatatgaatatcattagggtcatatataatcacatatatatacttgccaaaggagagttgccctgtgactgttgtagcttaattagcatattacgtactgaagctctcgttcgatatactttcatatggcgtactactcaaaatattatggtgagcaatttgatcatcattttcactaaaacctcactcgttttgtttatctgaatgatctcgtattcaatttaatcatatggcctactgtttttttcttcaacttaatattgatcttctgattatctagctgaacattttggtaatcaatagagcagagtataatattgataaatatctaatgttaatactatattgtttcttgcatgaaaaaatacagtatttttttttttttttatatatatatatatctatatttttattatgttatagtgtggacgagtatcataaacactagatacttcgtactaaatagtaaaaataagtccataaaaaacctgggagggctgtttggtaggtagtcttttaat

SEQ ID NO: 234726 - DNA, 742 bp, Cannabis indica
aggcttctgaactcagcttcagtggatgatctgctaatggtgacttgtttttgtgatttccaagtgaccaagtttccccctagataaacgcaataacctgttgtcgatcgccgatcgtctggatcagatgcccaatcggcatcacagaacacttcaagggaaaaatcctttacaggtttgagtaagagaccataatccaaagtgccagccacatatcgtaagattcttttcactgctgtccaatgagataggagaggctgatgcatatattgacacaccttgttaacacagaaagctagatcgggtcgagtcacagtggcatactgcagtgccccaacaatggatcggtataaagtcacatcttgaaccggttcacttccataattggagagtttaaggccactgttcattggtgtgttttgtgtattgacattttgcatttcagccttggtaagaagctcttgaaggtacttggtttgtgataaaagaataccttcagatgtccgagttacttgaatgcccaagaagtaatcgacaagaccaagatctttaagagcaaatgtgctattgagttcagcaatgagttgatttacaagtgtgtcatcacttcccatgactagtatgtcgtccacataaacaaggatataggtgcagcttgttggagaactcttcacaaacagggactggtcagacttggaaaactgaaatccatgttgaattagcacatttgaaagcttctcaa

SEQ ID NO: 234727 - DNA, 1976 bp, Cannabis indica
gcaactatcattgacaccccatattgattgaagactttgccatagttgctttcaaaccagaggaatcataaagaggattaaaagcttcgtgaatatacctcactggcttttcattacctttgaaaaagatgattaagtcatcaacaaaataaaggttgataaggttgaggtgtttacaaagtgggtgaaaaccaaagccatccttgcaagcatagtggctcaagatcaagattctggtcaaataatctatgataagaacaaagagaagagaggaaataggatcaccttgaagcaaccttttttctcccttgaaagagccttgcagttgcccatttatcatcaagttgtaggaggtaccttgtaaacaaaccaagatccatttaataaattttgtaagaaaaaaaggcccttcaataagtcagctaccaacaaccatccaactgtgtaataagccttgcttaggtctatcttcatgatgcatctagccaagacattcttccttatatatcatttgagaaggttggaaattaagaatgttgtgagccaattgtctattctttataaaagcatattgattgttgtgaattaattctggaaaaatctttgaaagtctagagcatagcatcttagaaatgcatttatagagtgtattgctacaagaaataagtcaataatcattagcatctctagggcagtcatttttgggaattagcaagataactgttttatttatctcattcagcattatttcttcttgaaaaaataccaatatagcttgagaaatgtcctccccaatctcattccaaagacccttaaaaaatcctgaaccaaaataatctaaactaggacatttagaggtatgaatattaaacatagccttcttgacatctgcataattgaatggtctgattaagcaaacttattgctgagtatcaagtttaggaccatgaacaaggaaaagcatgatctaatctgctagatgcagagcttcttttccccataaaattgctaaaatggctaaggaagtgttcgacaaccaactggtaatcatctacaacttcatcattcttgtaaaatgtgaggatacaattctcagttcttctctttttcaaaaaagtttgaaaatagctcgtattctcatcttcaaaattcaaccagttatcttagaattttgatgcatatagctaacataattcttttttgcaataagataggcctggtaaagatttacttcaacaagctgaagaataagattcttcgggtcaacagccaaaaaccccttagcataattaagagcttatcgttgcttccttaaaaatattgatgatatcacccttattttctttctggaacactttcaacacatgtttaattctcaataacttttggagaatacctttgagcccttttggcatgggtctgtttagttcagttgttgataacatattccttatacccttacttattcatccaataattgtaatatctgaaaggcttgactcctaaatcatcaatctcatattgtttaataagacaataactatgatccgagtttatatcccatttgaagctagctgcagttttagggaacttattgtttaacacccaaatgtgacttctactggcggcagttatagtatatattggatggtcgattccataaggaggtgattatggacaaaagcattagtagaaaaataaatacaaaaggttaataaaaagtaacatataagtttgagggttttgttttggtaatcaatattaaaagaaagcaaataaaggtgtaatcaatagtaaaagagagaaaggcttcaagaatcatcccatatacttgtttggctagtttgtacctttgattcacaaagtcgacacaaatgatgtaacataaaatattattatattttgagtatacaggttcttacaaataaaagaaatgatttaatcttatgtagaacctagaaatgacattatacatc

SEQ ID NO: 234728 - DNA, 629 bp, Cannabis indica
aaaaaaaaaaaaaaactaagactatctccgtgttaaaatagcggtaatattttaatactttttaaaaataagcttttcaagtgtgctaaatcatgtcatgctaaaagttgtggaaattttttacaaaatatagtattgtgtcaaatttgtattcaataaatacacattgtttaattatagttttgtcattaatcattaatgataaaattttaatacacattttttatttataatattattattaattaatttttaaatatttaatttattaataatttactttttattataatttgcattgtaaaatgttatactgtaacaaatgcatttgttggttttttcgactgaatttagcataatatatagacattgcatcaaagatggtctaaccagtccattcctaaagagaattgctaaaaggcataattgtttgcctaacatttttaaaaaatatcactaactaatcataagacgccacttataaaatacattagatactattggtgcctaataagaatgttgattcctaaattaaaaccctaaataaggacctgcaaagtaaggaatgcatggttcaattaaattgtataattaactgcttattattgtggtggggaattttatatgta

SEQ ID NO: 234729 - DNA, 997 bp, Cannabis indica
caagcagtactttcaggtatgttattagcaacagtagttgacttgtgagtagcaggaaataataattcattaaaaacaacattcctagctatgaaaattctcctagcagcattttcacaaatatagcctttatgtttaggtgaataaccaagaaacaaacattcttccgatctgaattccattttatgatgatgataaggtcttaaatgtggatagcaagcacaaccaaaaggcttaagaatgtgataatcaggaagttcattgaatagagactcaaaaggactaagattatcaagaacaggagaaggcattctattaatggaatgagttgcacattgaaaggcaaaccaccaataggaaagatcaagaccagcttgagcaagaagggttagaccagtttcagtgatatgcctatgctttctttcaaccctaccattttgttcatgagtatgaggacatggttgttgaaatcgaatgccttaatctgctaaaaatctctcaaaaggtctgaattctccaccagcatcagcttggacagctttgatggggagattaaattgtttttcaacaaggctcttaaatttaataaaggtttcaaaggcttgagacttgagtgagagaggaaagatccaagaaaatctgctataatcatatatgaaaacaatatagtatctatagttttctttagatggtatgtcagagggaccccacaaatcagtgtgcacaagagcaaggggttgagttgctcgagactgagataatggaaaaggcaatctatgattttttcctaattgacatgctttgcagaacttaagatctttaaaggaacaagcaatattggcttttgtgaggattttccttagagtattaggtgcaggatgtccaagtttggtgtgccaaacattgatatcagtaagagtgtgtgaaagcaaagctgtagaattggacatattaggatagagagaaaatgagtctttattattatggtgattacaag

SEQ ID NO: 234730 - DNA, 1734 bp, Cannabis indica
ttttctttatcatgttcttttacagtgtacagagcacgaaattctactaagtcaacacttatctcaaatacatcagagaacctctcaatacttaaaagcaatctccaagaaataggcatcagttggctaggagcaatctgataccaatgcgagatcgacaaaacaaaaggtggaaaaggaaacctgaagcctcaaaaaaaggtatacaaatacataccacaccaatcagaaacatcccagcctattcgttcctccctcctaggtagcctcatttttatattatgaggaatgccataagccaatctgatttgagctaggagtggaactgtcaatttagagctgagattgatgcgtaaaatactctgtgatttacctaggagactcggtccatcatcatcattcactaattgggctaaggcataacctattactgggacttcctccgcgtccaccgctaacccaattgcatcatggtcgtctacatcctgaccatagtactcttctgcgacggtgacaggaatgagagacgaggcatccggaacctctcgatcaaaatcactatccgtgtccgtaaggaccacaacctgtcagcgaccactatcaatatcagaatgtgctgatctaacaaccatactagggacaaagaatgacgggtaccccctttccactactcaatgtaagtaacaatattattagaaaatatccatctacatggagataaaccccctttggaattccgtaatttcgagatgaatacatagcttggggtctacactctttcctatctcaacaatcttaaaatggatgaggaacacaataaacacattctttgctactcaacaattcaaggatggacacaaatactcaaaaatacattttcctattatttaacattttaccaaatgcccaatctaaaattcctagtccaagcccacaaaacacataatttttttttaccttttattttctttttcctatcatgttttataaataaaaaagttatttttctaaacacaaaaataaacttcatcaaaatatatatatacccaccaatacacactatatttcaccactagttctcaagcattacatcaattataaaatagtccctatacactattcagattttatacatcattatagaaaaaaatcaaaaacatcaagaacaatgctcctctacttcaccaaaaccctaaaaatgctattctaagtcattcaaatatttatcaaacccactttaccaatatttctacaacaaaaataaatttcatacaaattctaaacatttttcaaaatcttctctttcatttatttcagattatttattcctccatatccatttccccacaagtatcaataactccatagaatatttacaaacccatccaaaaataaatgcgctagaataaaaccacaactaaattgaaaactaaacatgaatcaagaaggctaacctggaataggtgaagagatcttcaaagctcttcaaaatgtgttcctgtgagtagagaaggtatggagaaaatgagagctcgaaggttcgaatcaaatagggtacctgtctatagtagaatagccagagaaaacgctttggtacgtgaagatgggtttgaaaattatagtcaaattgtgtgtgactatagttaaattttagggaaacttttgctattttttttataaaaatactgtcagacggaattttttacttttctactgtgtgtttttataagtttc

SEQ ID NO: 234731 - DNA, 1773 bp, Cannabis indica
gttgaagtaaagtggcaaaattgtaactagagattggtccgtaagtggccagccactcttgtgattttttgcccaatattttattcttttttaatccatataattcaaacataagccctagttgaaacactataaaaggaacatgatgctctcatctcatccaactattcattcaaccaaatcaaacctagatttcattctctgacaactagtagatgagagacaccttctatagtgattccaaccttccttcattgttcttcataatcaccctatattgatagagtgctatgaccacacatagcaagttaagtacttaatcatagtgcggaagacggtggtaaccaacccaaagtacacattagatggaactaagtacaaggtaaaagacatacaaagggatatatttgacaattacaaaatcaaaattagttatgagaaggcatagaggtggaaggagaaggcacttacatatgttaggggtacgccaacacaatcttatacgaagttacctttttacttgtacatgttgcaacataagaattcgggtactattacagacattgtcatataggacgacatgttcaagtactaattctggtcactggatgcttataggaggggatttaagttttgtcatcctgtgattagtatcgacgacacattcttgaagacaaagtatggggcacaatgttagttgttgtagcgtacgatgtaaatagccaattgtttcttattgcctttgtaattgttgacagtgagagtcatgacttttggaagtatttattgcagaagttaagggaagcaattggggaggttgaaaacttagtgtttgtataagataggcatcaaagcattaaacaggttgttgaggtcatttttcctaaagcatgccactatgcatgctataaacatattactatgaatgtcgcccacaagttcaagactgatgtatgtcacatgcaaatatggatggccgcttactataacgccctaatgcttatgtgcgctacagtgattttccaattaatgtgccacctttgctaatcaaaggcttatccttgaaaattgtgtcaaattaatacttttgatttaattattactttataaactttcatatatttatttacataagtcgggatctcgtatttaaagttttacaaacattatcaaaatacatttataatctagtcgcacaacgactacaaaatacaatcctaggtgtcccaagaccaaacactccaggtcacgtcgcctcgacatgtacaatcaccatccaagctcgaagctcacttctgttcagccttcacctttcctttacctacacatggaagtagcaactgtgattcaacagactcagtaagaaaagcatataacaaataatataatatcgacttgtatctaggcactcatacacctatctacaaggcttaataagtaagaatgttctttactagggtacgaccactacaccacatacactacatactgctattgtacgggtgttggtagggtttgtttcgtaccccgagtaccactaagtgatgtaccacacaagctctatacctgtccgtactagtgctagtaacatcgtaatgtacccttaatatattgtacattataccaatgcactcagtaccactacagtactactgttagtagtgtacgaatcacaacaagtatgcatataaatcacacatacacacattctcatatataatatgttctatgctattcttacctcgtttctgaacttgtaacgtccccgcttca

SEQ ID NO: 234732 - DNA, 806 bp, Cannabis indica
atcctgaagagaccacccaacattgtgccagaaaagagccaatgggctcccggaggcctcccaactcgcgatctacacggaccacttattctaggaggactcaacctgaaggtggcccaagcacacgatccacttgttctaggagaacccaacctaaaggaggacccaacctgaaggtcgccccagtacacggtccacatgattgagaagaacttagcatgagaatggccagaatctagagataggggatgaagaacccgatctttgaggccctcaacctactgtacatgataatgatggcgcttatgatactacaagatacgtgccaattactgagttggagaactaccatctcaggcgccgcctggagaaggcaaactgacgaaatgctgagttggaactggacagcagcggccagggcagcacatgagaacaatgcataaaattaatcggaccttggaatgagaagaccatgaggcacacctcggggctcacgaaccaggaggcaggagacgctcaggagaattctcaaaacgctcaggaagaacaacctggcgaaactgagggtccccctgagagccaacaaccaaatgatcaactagagccttctcactgaaatgagaacagaaggcaaccagaaactagggaacatgacatccctcgtggacacgtgggtcaccaacaagccatcgccaaaaaccttctcaatccattagggaaggggcacgtacaaaccccagtagggggcacccaatgaaccacacccaagggagaaggacgggacgtgaagaggcgagcgttacctc

SEQ ID NO: 234733 - DNA, 583 bp, Cannabis indica
gtccctcgggaggcgatgaaaaatcccgaccgtggaaggcttgatcccgacaatagtagctatcttctccagctgatgagtgctggtcaaggtcaagtgtaactcgtccgcgtcccagccagtggaccggcatgtgtatttctcatggaccaccgggctcttcatcacttcctccaaggtggctagtttcttgggcaccttgtctgataattttgctctagttgaagtagggacagacatggtctgggtttgatgaagctctaaaatccctcggtcaaagccgaagaaatcgtgatcgtgaaagtcgcggagaacctcactcatctgaaaaagaaatccaacagttatctctcaaaccaaaccctaaaacaaaagaggggaatgggggtcccctaaccgctggaaggaggccccctccggatgtctgccaaagataagaattctagagattctcctaggaaaacatcaggtacaaatatccaaaaggcaataaaagaaaaaagaaaaggaaaaaaggaagaaaaaggcaagagtatgaaagtcacttcacactctcgacagtccctaagtaaagaaatcgttt

SEQ ID NO: 234734 - DNA, 516 bp, Cannabis indica
gtgactttttcagtgactttttttcggcaacggtgaattttttggcgactttttcggtgtggataaattttccagcaacttttctgacgacttttccggcaacactaactttcttggtgacttttccagcaccgacgacttttccgacgccggtgactctccagatgatttttccggcgaaccttgttattaaaagttttatcaaatttatttattatttttttcctatattttaaacttcaattattttttaatcccatattttttttacattatttatttatgccataaaaaagtaaaatctactatattttcccatatttatgaaaaaacaccttaaaatttaagaaagataattttacattaacatgttatttttctaatttatttcaaataaaaaatttgatttttatgcatacattgggctaaaattttgaacgtaaacccaaggaatctttccttttggccttggttatctttcaatgaataccattccttgttttgataattgtctgt

SEQ ID NO: 234735 - DNA, 1402 bp, Cannabis indica
tgttttatcaggttcatcttccaccatcagaccctgcttctcttcctacatcttcatcatcttcaccatcattgtcctccacctctgcttccgctcactcattacctactgcttcagtacccataacagggtctgtcaccaccacaactacccctgctgtcaccaacaaccataatatggtcactagatctaaaggtggtatctataaacccaaagtatacatggcatctaaagaacctttaagcctgcaagaagctcttcaagatccaaattggttctctgccatgcaaactgaaaatgcagccttgaaaaagaatggaacttatattcttgttcctcttcctgctggcagaaaggccataggttgtaagtgggtttatagagaaaaggagaatccagatggaagtctaaataaattcaaagctaggcttgttgctaaggggtttcttcaaacctatggatttaattttcatgagactttcagtccggtagtgaaacatacaacagttcgagtgattctcactctagctttgtcaaataattgggggttacaccagctagacatcaacaacgcattcttgaatggggatctaaaagaggaaatttatatggttcagccacccggctttgaagatcctgaaaatcctcatctggtttgtaagctgcagaaggctatgtatggacttaaacaagcccctcgggcttggtatgataaactgagtactacactcactacttttggttttcacaatgccaaatctgatcagtctctctttcttaaggtcacttctcaccacacgacctatattctagtttatgtcgatgacataataataacaggcagttctcctacagtcattcgggctcttattcaaagtcttcaagctgagtttgctcttaaggatcttggtcctttaaactactttcttggtattgaagttcactacactaaggatggtatgattctttctcagaagaaatacatagccgatgttttgtgccgagccaagatgcaatatgccaatcctttaactacaccaatgactggtggtgaaaaactttctgcaacagggagtgatcctattcctgagccacatttgtatcgaagcttggttggtgctcttcaatatgtgtgcattacaagacctgaaattgccttttctgtcaacaaagtttcccaattcatgcaaaaccccttacaatctcactggaaaactgttaaaaggctgttgcgatatcttaaagggactttggattatggtctttacttgcagaaaccttccaaccttgatataactggttactgtgatgtagattgggccaatgaccctgatgatcgaagaagcacatctggatattgtgtatttcttggtcccaatctgatcacatggtcctctaagaa

SEQ ID NO: 234736 - DNA, 955 bp, Cannabis indica
agggtaaactggctaaccgattttacacacttgtaaaaccggttacccagatttgctgctgggttcccagaaaaatttttgttgtcgattcgtgttagtttcagagctttggttggttaattccctgttagtttaggtatttccatgttatgttacagtagataggtttttgtttaaaacctaagtccccgattgtgatttagcgtgtcacttacatttgttgtgattgatgtgatttaggagcctctaatttgtcgagcagttgttccactcaggttggctggcacacctgaatttagaattaaggtaatattactataatgtcatgcatgtgttattacttgtttataatagatgttgtttatgcctattagaatacattgatagcggtaatagtatacttagagttgtactaatttctgataaatgtatgttggctgaaatactgatcggttgtcacatcaatatggctagagtatgactgacatattgagtacaggctaccattatggtcgatagtattgtcgtatgaacgttctaaactaataccgtgtcggacacggcgatagggttatggttgggtgtatgggtgcctgattataacacgggatactgttatgttttatgttatgcttttcttactgagtctgttgactcacagtgctatttccatttgtatataagggcaaagctaatgctgagcaatcgtgagggggagcagatgaagatcgtacatgtcggggcggttaggccgggagcgtacgatcttcgggacatcaaggcttttcctgtatagtcactaggcgacaaactttatatgaatgttaaaatttgtaaatgtattttctaaacgggatcccaggattttataaatatattactttatgtttctaatttaataaccaatttaactaaatcacgtattttcattaatctcattgattagcaatgagct

SEQ ID NO: 234737 - DNA, 1818 bp, Cannabis indica
caaacatctacatttaatgtccgattttggtgtaaaagatgttcataattcataccattagttccattggcctcgaaaacattggtggtgccaattctcattcttatttacatagacatataattgaacaaaatcagataattccaacatgaaattgaaccaaatcaaattcaatgatcatataccaaaatgttaatcttagattagactcataaaagaaccatgcataatgcagacaacaagaaaacaacaaaattagatctttcaatgtctaaaaataaagtttggttttgctatgaaagattttcataattgaacaaaattagacaaatccaacttaaaccaaaccaaattcaaatcatgttgaattgtcataccaaagtgttaatcttagggtcataaaataatcatgcataatgtgtagataacaagtgatcgagtatagagatacacacttggttgttggttatattttgatccttaccgaaatttgcttaacataatcttttcgaaaccggaccatgtggccactatggcggtcgacaaagaggaatctccgtatgccatacttacgaaggttgtgggaaaggcagagcaaagagacggcggccaaacaagcctgtgtggccacgatttgaagctcgaaattcttaatctgatacttctcacagctcggacagtcggagaattcaagcacaaggaccggaaccaaaaccccaattaccaaaaacacagtccaagacagagcaaggcttagataacaagcctgattaaaacccagtaaagccagaaacttctctaacccttcaagggcttcacttaaatcctcgttttctccttctctttcctcttgatttgaagttagaagagggatttggattgtttggctctctgttttcacatgaggctcggccattagttaagctcaatcctcaaggtcaaggattatatagttgttttggagcagaaatggctacaacccagttgagatcttgaagctatttttcgaaagtgggagctgagaaacgacaaaggtggcaaatcagatcaacccacgaagccattttcaggagcttttggtctgaaccaaactgatattctccagagtagaatcaatgcgatccaagactgattatattattatattgattataatataaagaaaaagtgttaagctgttgttgtgagaaccaaaacacagtaaaaagtttgaatttttaacgtcgaccgttggattcattaggttcacggatatattatatgatgcgttacatgtgagcttcatcttataaaaatatatttgtttttgtttaatattattctatcttttttatcaacataaacaatcttaaacttaacttcagcacttaaaatctattttgtttaataatatttccttctattaaaaactaatcaacttagtacaaacaaaaccataattgtcaagtagcatcactaaagtaagtttatttttcttctacttatgtataaagaaatgtctaaataaagcattctatggaaacttgtttgaattgaagtcttacttatcttcttcctcttttacaaatgtattggtttaagagcacatttggaaaggaatattttagatgaacatgaatgtaatttaaaataattacttgatttaacatgtttatttgatcggataatagcagtttaattttgtgtatatgcctatttatgttatatcatattattgtccaattaatacaacatactctaagttgatatgttataattcccaagttatagtgaatctttcttaagttgtacatgtacttaatgcatgtgatattatag

SEQ ID NO: 234738 - DNA, 610 bp, Cannabis indica
ctaacttctaacaaaatttgacaactcagtaactaactctaactaacatacacaacaccttaacagtctttaatataaagtggctaagggtgtgccatcaatctcttaaatgccctttgcggatgacaattattgtaaagccagtgatagaacaactaataatgtaattaatttgcttggtatttttgaatatgcttctggccaacaagtgaattttgacaaatcctcaattttttttctatgctaatactagcagtgcttctcagcgtgatatttgtgatcttatgggaattgaagaagctagtgaaaatttgcattatttagggcagcctaacactatgggatgcaataagacatccatgcttagttttctcaaacaaaggatcgtaaagggattcaaaattgggatggtcagttattgtctagagcaggtaaagaaattctcattaatattgttgtgcaatcactttctacatatgcaatgagtgtttttgctgcctttaaacctttgtaaggatgtgaaaagaatgatgagtagatttggtggggttcttagttttgtaagtgtaaagacatatcacatatcttggatgtcgcgggtgttggatat

SEQ ID NO: 234739 - DNA, 1415 bp, Cannabis indica
tataagtgaaagtggttaaagagtgaatcatgcaagaaacaaggggtttggcactactttaaattttcagttttggaaaatacaacataaaacaatttatgtagttttcaaaatataagactgtttgataaatgttttttttttttggaagaaggaagaattcattcaaattcacaatccaaaatacaaaccaaggcagttgtacaaaagaagacatcccctaaacagccagtactacaagttacatattatattttaagtacttttatccctatttttaaagttacaaagattcagcattctagttctagccttaatggcttagcttaatagataaactaaccatcttgactgaataaaaactaattcaaagatatattgattgtggttacaccacacatagtaaatcaaggcagatatcatagcattattaactgtagatattaaatcatgttgattcttgttacaccgacaatttcattcctccatagtggcaggccacacaaacttgttgaccactttttgatcttagtaacaacttttttagtgaactcacagccaacgaagaggtgttgatgagtttcgggttcagcatcacacacgggacaattgctcgaggggagcacaataaatttggacaagttgtctcaggtcaagagtcggttgttcagggcttgccaagcaataaaacggtgcttgggaacacacattctatgccaaatattatttgcatactccactttatcagcagcaattaggaaagtataaaaaaaattggctttaaacctacccttctgaacagcagcataaacatcctctttgtcaattttttctctaaatttcatgagttttcagaagtaccagctggcatccaattttaacggagcctgtcaaaaatcttttcccttcaaatagaccgaattgatccatttaacccacaaaatatcttgtttacttgaggcagcccaaataaactgttttagattttttttatacgaattatttttttaaaaaaatttgaaccaaacaaaccccgatcttaacaaggactacagacgtcggcccaagtcctggacccaggaccctgaccaaatcctgaacctagaccctaaccaagacctggtctacgacccataccaagtctcaaaccctgacccaaacccaaacacgacacgaacccaaacccaaccctggcctagacccgatcccaaccccaacttcgaaccgaggcctcaaccccaatcccaaccccagagtgagagaaaatgtaaaaagaatatgcttgacaaaataataaaaattatacttacggcataaaaaccaacattttgtgacttgttttatattactcaattttttaaaaaatttagccaaacactccaacttatgaagtcaaataccccaaaaattcaaca

SEQ ID NO: 234740 - DNA, 589 bp, Cannabis indica
ttattgaccacttttgaaacaagctatgcatctcatcagagatatattgaaactatctaaaatgtaaagcgtaccttttgattgaagaaaggttctaatttagcttcttcaaattcattcctacaatttctcttcattaatccttcacattccattgccaaaggctttctgctgctgaaccttttgaggttttgaagaaacagaaggtgaatgttctgtagtttagggaaggaaatggtgtcattggaactaccttcttcttctccaccttcttttatcactacaatctcttccatattcttacactcatctactgtcagatttgtaagttgaatgaaacttcttgccacagcagaagaaaaaagatactttaacttatgacatccatcaacagttaaatcttttaaattctgcatgtaagatacttcttgaaatttatctggccaaatcatctctacattaagtcgcaccaatgttaattcctccaaaataggaaatgataccacctgcaaaatataaggattatttacactaaaagtcgttcttattgttataaatattattaattatgtggatgtccaaatctttt

SEQ ID NO: 234741 - DNA, 643 bp, Cannabis indica
ctcacatttgagtgtattttaggcaaaagttatactgccttgtctagccaccaaattatatatactcatgtcactttattggcctaacaatattactattatagagaaactacttagcagaagattcttatttgcccatcatgtaataagaaagaaaaagagaccatatactctctgccaaatactctcttgaagagaccaaagcaaatgatattaaaagtcaaaagaggcaacgaatcatacatacagcgaacaacattctattatatggaattatttttatttaataaatactcttttttagcattgatcaacaagaaaatagagttgcaccacttcattcattctttgctttgtatattaggagaatgagtcttaaatacagatgacaattgacatacacacgaacacatacctctcttatgtaggtcaaattagtgtgcttcaagaggttgtgcatctgcttgacagtgagttttatagtgaaaaacttgtagagaaggcgaaaggctgtggtcgagaagggatttagttgccggagctaccactgatcggtggtcagacaaagagagaagaaaggagagaggcagcgactgagcggtatggccttcgatttcagtgtgattggagagagagagagaga

SEQ ID NO: 234742 - DNA, 1173 bp, Cannabis indica
gcttcttctctaccaaaacaacacaccaaactaactcaacatcgtgtctcttaaaccacatctaagctcattttaagcttgtattaagcataaagaacaaattacaaacaccaattagttaattacagtttaaatcccacacccaatctgtataaaaatgacatttttattggcattgaattagcagagccccataccagaataaacaatatatatccataataaagcgttaatttcccaatccaatggttcagatggttcttaaatcgtagcctttattttgaaatgagaatgaaatcacagaatttcctactctaattttcaaaggaaataatcgaaatcgcaaacaaaatagtggaaaaattagaaaaatatgtccttttcccataaattaaatcgtttaaagtaaaaatcgttgctttagtattgatatcaatggttcttaactaagttttagctttctcgtcaaaatcgtcgtagcctgtatctattttgatatgagaaatgaaattacagtgtataaattcccaaagaaacaatctaaatcgcaacacaaagagaggaagacagagagagagttaccagtggccgcagctagggtttgagtccgagaggaagtagaagaagatagggttagggttttggttttggtttttaaagttccataagaccctaactttcctatattactaataatcccttaatttgtttctattttcctttttatccgtttttctaaaacatctaacatttgggtcctctgttttttaattgaacgtattaaccaagattatattatattgcaaaaatgctataataatttatttgaatttaaccgtattttttaataacctgaaactaacttacaaagtcgaccttatgagaatactaatatcaactcctctactatatcctttaactcaattttagacgagtttagcgcatcttttaaaaaagttaaaaagttattttctaaaaaatgttttgctataaatgtattggtaagcaattagaaaaggaaatttgatttttgatacacacattagccatgcggtttgcctgaagcagccacccttgaaagagtgtgtaatagctcactgatcgagcgctcttgcgccgaagatgaacggggctaagcgatttgctgaagctatgggtgttgctataatttat

SEQ ID NO: 234743 - DNA, 1132 bp, Cannabis indica
acctgcaccatgaagcacccgtgagtcacaatgattcagcaagaaaagttattagatcaaaagcattgtaaacgcagatattcacatctcaatataataagtatatatatatttgtgactctcacatatccattaagcacaaccatatagtattagcatttatacattcccacatactatgcattatgataaaatcacaacaccttacagtcaacaactttatcgttgcactaaatgaatatctaatcaatacataaccacacattttcagggcttcataaagcattctaatcttacatccctataaacacatattcttacatcccgtgagtcactgaagctcggcaaggaaagtgactaatttcataagtaatataacattcatccagtcacactataataaaaatatattcaattacagctcatcacataatatcacgcttaatccatttcacaacatcgtaaccacacaatcctggtacttcataaagtacccttaccactcgttaaccacgagctacatatgtcactatcgttgcccgatacagcaaacgataagtaagaaacctatgtgtagtttcaggagtaatactcatacggtaatgactgttttcaatcctcaccactcgttatctacgagctacgtatgtcactatcgttgcccgataaagcaaacaataagtaaaaaacctatcagcggtttcaggagtaattacttataacggtaatgatcgtatcttaattcattcacaacaacggtgataaccgtgttcttccctcaatcataaacaattcacaaacaaaaataatcatatctcatcattacctcaattaccatctagtcacaaaaaatacatattattaatcttaatcaagatcgagtcacaacaaacacatatcggaatctcaactataatcgagaccataacaatcatatcgttaaccataaacagtgcttaatacttttcttatctcaggtctaaagtcaggtatgtgggccgacgtgagtaaaatgatgctcgacgatctcgggtcctttatcatgacaaaggtaaatcaataagggtatattccaaaatactgtttaaaatttgcataaaataacctagggttttctaccaaatcttatggt

SEQ ID NO: 234744 - DNA, 836 bp, Cannabis indica
gtaattataaaaatatatatacaacaatcaaaattaaaggccatcaactacattgatatttaagaaagaaatagaaaatttaattacaattacatttagtatttttataccaagttgtattgtatgttatatattttaagaaaaagaataactcgacaatattagtattcatattgtggttattatatacattttataatattaaaataataaaagtgaaaatactggaaaaatatctaaaatacgtatttttaaaatattttttttcaactactttgaatataagtatacatttatatatatatatatattattttttcattaaaagatgatatatatatatatgcgtattctctgaaatataatactaatcataaatattaacaaatataattatacacttataaaagtagcatagaatagtaacttatatgatataaacttgatatttttgaaaaatgtattaaattgtggaaacataacattactattagtgattatcaactattttataaaaactagctagcaaggaatatatccatattaatataataagttagttatttataaccatctctattactaatatatatagttaattattttattatataacttgaagtgatcatttctattattattaatatatatgaatagaacaaatagacattatatttgaatagattaattttaaaaaaaaattaagattagttcagatttttgttgatattttaacttttatacattaaaaaaataatatattttatttattatttattcgatataaaaattaatcaacttaaaaaataacaattgttgaaaaccgcgcgaagcgc

SEQ ID NO: 234745 - DNA, 956 bp, Cannabis indica
tcatatttgcccttgtgagtgtaaaagcatgatatatggccctagaggcaaaatggtcttttgaccttatttgatttacatgtgataaaagtggatttttcaggaaaaagaaatgaattttcttgttgtatcaccccctaacccgaacccctctctctcaaactctctcttaaaatctcaatttggtttttggtaaattgcttgacttggagcttggaattgggagatttttgagcttggaatttaaggaacttctagctatttttgaggtagcttttacagatttttatttatgtccttcttgctgaattttgctgatgaaaagcatgttttaagttgttttgttcttaatgttcatggttttgatgttgattttggtgaattgagtgagaaattgcatgattcatgtttgttgagcttggtgtatgattatagggtatttttctagcttgaaactatgtgtttttaaggtattttgctgctggaaattgatttaattgggttggagttcatgttggctgagcttgaaggttgttagtttaaaagcttggtttatacttgttatcttgactgaaattatgagattaatattgggttttgatgcttgagcatgtatgttaaatgccctttatgattatttcaagacctatttgaagagttgaagctttaatggtgatttgtatgagtttggattggttttgaaagctaaaatttgtggaattcgtggctggtttctgggtttgaaacccaggtgctgcggcatgctctgagcatgccgcgacccgcctccttttggggaacctgggattttgtcccaggtgccgcggcatggcttgggcatgccgcggcccgcccttgagtttttgggaagttttgaattcaaactttgaaaatgcatatcttttgattccgaactccgatttgggagttcttatatcattggaaagctcattccg

SEQ ID NO: 234746 - DNA, 1163 bp, Cannabis indica
gtggaggctatagcccccacatcattcaaagtgagtacgttcctgacatagactaactttaaatatagttttcgaatttgtacaaataatattttttataaaatattttgaatgaaacatatgttttttcaatcatgtaattttaggatttaattttttttttttactatacaaccattttaaagattattaaaccaatcattatcaacatgtgtaaccttttttaggcataacaagacttaatcttcattttattaattagttctttttacaagtattcatgtagtgtgtgtacgtataatgattccaaattagaatgtcatttttattactaaaaatatgatcataaaccaaagttactttggcagttgtataaaccattttcatgaatttgattttttttaatttctactaattattattaagataaaattaaatgacaaaatagactctatatttttcaaaatagtaaaaataagacactgagtttaatttttaacgattttatttttaatgcaaccaattttcagataatttttaacacgaatatatacagaaaatataactagatttgtcataacatctctagatccgattattattaagttttcctttgacaaaaaattaattcagggtcttatttatataattttagaaaatacatgatctattttatcttttaacaaaacacagagagtataattagtaactattgtaaaacaatggtctacaatagtatttatcctattatatatatatatatactaagtattagtagcatgcagtggatgtttgcttaattaaaattatattttagttgttattatcttaattattaatttaaataataataataaaactaaatttaatacaatttaattatatattttcaatatataaaagttaatctaattttaaatttatttattaaaaaaaaatatatctaaatgttaagtcatttttgaagtcagacagatagaaaaaggaatattcgtgtctcaaagtaagtatgtcaaaaatcttatacacattaattttattattaaattaattaattattaatatatgttaatatttttatgggattttttctataataaattaaaaatggaacaagtttacatttatgaccccaaaaagtgaaataaacaaaaatagaaact

SEQ ID NO: 234747 - DNA, 1106 bp, Cannabis indica
gacagattttatcatatttttcttatgagtaataataatatgtgcataataacttttgtacattttttgagtatttatcattattaatcttatcttatagatgggtctgagatttattatattaaaatacatatcacgtgggtgatatttgtgaacatatcaatatcttaatttgtagagcagtgctattattgtctattttttattatacttttttagttaaggtttgtgttcaaaaacatgttttaaaatatgttttttaaattttttttatcgcagtatttgctatgcttacaatattattcttgtaattgttttaaaatattcgaatagtttattataccgaaaatacgtttgaagctttttaaacgcgcatgataaattgaaatatcagaaattctattttcggcattataaactattcagaattttaaaaattttacggaaataatactgtaactataacgaataatgtttatgaaaataatttttttaaaaaaatattctaacatataattttagacgtaaagataaaattataataaaaggttgtaattaacactctttaatttgtatctacatattaaaatcagctgcagtatttgtaggaattttcttggtgaaattccaagtttaacctacaccaactcaagctcacagttaaaacgacaaggacagaattgtccttttaaaacaatgaatataatcaattcacacgacaaccaagatttggtcgttttcacttgcacgacaaaagaacttgtcgttcttaccaacacgacagatcgtttgattccaaaaacgatctgtcgttctcctttgaataaaactcgaggaatcagagctaaccctagctcatttcctctcttcgaaccttcgagagtctcagaactctctctctgccttctctctggttctcagaccctagaaccagagatctccctcgatctcttgatcgatcttacccagaaaccttcccaaaaacaccacacaacacacacatacagttatcaaacatagatcattaggttagggttagaaaaatgaacaccagagattatagaggttcgccctaaatcaggggtacgtcctctttgagctcgcct

SEQ ID NO: 234748 - DNA, 2271 bp, Cannabis indica
cctgacacaaaagcgctttgggtttctgagatagcaaagtttaaaacattcttcattctatttgcaactaccttggaggcgattttgtagataacattgcataaagagattggtctgagatcacccatctgagaaggatttttcttcttcgggataagaacaatatgagtgtcatttattgtgtccggaaactgtcccgaatcaaagaaatcccgaacaaacttgaccacatctgccccaacaactccccagtacttttggtaaaacgcaggggtcataccatctggccccggagacttatctggatgcatttgaaaaagggcactcctaacttcttcctcagaaattgtcctcaagagtttgtcattctgctcacggctaacagaaggctgaataccatccaagaccgttcccatgttgatgctagaagtggagaacagctcatggaaatagctagttattacattggccaaacctgactcccaattgacccaccctccattgctatcttgaagccgagtaagactattgtttctctttctagaattagcaattgagtgaaaatacttgctattcttgtcacccgagtttaaccaaattgctttgatctttcttccaaaaaatttctttttgagctaacacctctgccaacttttccttcccttctttgtgttgttgaatagataaaggatctctaccccatttagaatttcgaatttggctcttacaatcacttattctctttcgaaatttcccagttatgtcccggccccaccttcccaagacttccccacaatggtgaattttctcttgaatatggactaaacccgagcccctccaacaactctcaacaagctgctcacataaaggttctcgaatccaagcattctcaaaacgaaaagaacgaaaagagactaagggagtgttacctttaaggattagcaacaaagggcagtggtcacttgttgagaactctagattaagaagagacgaatgtggaaacagcgacaaccaagagttggtaaccagagctttgtcgagtcgttcttcaatccactcattgctatttcttcctttctcccaagtgtacgggtagcccacaagaggaaggtccatcaagttgcagtcacccaaagcctttgtaaagccctcaatgagccgatcgtggtattttcttcctcctttcttctcagcgtgagaccccaaattgttcatatcgcccaatagacaccaaggaagatggctatcgtttttaagtgaacggaaaagatcccaagtccgaaaacgaaactctcttctcggctctccataaattccagtaacacgccaaggaggcaatcccaccatttgcaccgtagcatcaatatgatgaaaggagaacccttgaataacaacttcacacgtatctttccaaagtagagcaagaccaccactgtgaccacgggcttccaccacaaaacaattttcgaaccccagatgggcccgaatattttccaaactagtctgattacttaaagtttcacaaagaaatagcaaaatgggcttcttttgagacacaaggtcccttaagaattgtttggcccgcaggttcccaagcccacggcaattccagcttaagcaactcattgctcttggtgggcctgaaaaccagagcccaccaatccattttttgaacgcctcataccatcttgctccatctcatctgctgtaaccaaaggatcactcacacgtgggcctacaaaatttcccaaattggaatctggccttcttctcttggagtcaaccattgtagtaatggtagaatcaaaaaagtttccattactattgacatttaatgtcaaatcttcctcattcattccttgtgtccccttgctatgattacgcccatcatttggcaaagattccttaaacatatcatgatcttgatatttgccaatcaattcccctgaattctccacattcctagggactaaattgacaccctgttctgtgttgtttccctgagattcacgcaccgccgcaccggaccgaagccactgtgctccaaatgtcgactgcttcctctgcgtcatggccttctgctccaaactataaggcttttcctgtagatgtaacggcttcaagacagcctggggcagaacttctccgagtgccctatgatcccgcaaatgaaacaaaaggttgggattttttcatacttgaaattagcccagtaccaagaaagattatcaatgcttatcttcattctccgtttaataggcttgtcaacat

SEQ ID NO: 234749 - DNA, 1686 bp, Cannabis indica
aacttgacagtcggattcatgtcagacaaagtgatacaaggtgtggggaattacattggttcgtttattcaatccgatcctaataatttctcaggtgtttggcgagactatctacgtatccgtgtgtcaattagagtggacaagccactgaaaaagaagaaaaagcttgagataagaggcggtccgacatgccatgtgcactttaaatatgaggacttgccaactttttgcttcatttgtggtgttcttggacattctgagagattttgtgagaagctgttcgaagttcccagagaacagattgttcaagagtataaccttgatctgaaagcggcaccaagaagaaggaattatgctgatgggtcacgatggctaaaatctgggttagcaatcaagagtaatacagagaagccgccagaagcaaccagctccaatggtggtggccggagtcatcaaatccctccattcagggacaatcaaagggggagaattaccatgaatcaagtatcttcattaattcaccaagatttacgctccaggaatgaatcaccaagcattaagatagttgaccagagtaatgaagcacaaatcactatggaaaaatccctaattttaaggaaagataatcctactgggatgatggcgccaactcaaccggatttgaatttagggctggtctttattgacaacaaaaggagaagaatgggccatacaaatgaagttgggcttaatgaaatacaagaaattgaaatgggccgtgggggaacaaataatgatcaagatggcaataatatggatatttctcaaccagaaactaatgttgatacagtccaaaatgatacttcaaaaaacttgctcgaggcggttcccaggcccgccaagaattatgaatgttttgagctggaattgccgggggcttgggaaccaaccgactattcaattccttaaagaaattgtttttcaaaagagacccgattttatctttttgtgtgaaacaaaatgtcataaatctaaagttgtgggcctggcccaaactttaaattttgaaggtgtgtttgtggtagatgctattggagcttcgggtggtattgccttactttggaaaaatcaagatactggtactttgttgggttattcaaacaaccacattgacttacaaatatcaatctctccttccactccgagttggcgtctcactggcttttacggcgagccaaaccgcaataggagaagtgattcttggactcttcttcaaagtttacgagatcgttcctctcttccgtggtgtgttataggggatattaacaatattgtttgtcaagaggataaaagaggtgggcggccttaccctcagtggcttttaacgggattccagcagacgttattgcattgtgggttagaggatttggagctacaaggccatcagtatacatgggaaaaagggagagctacgaatgcatggattgaggtacgtcttgacagagctttagtttctaatactttggaatcaactttttgagtcggctgtgttatccaactaaggctttgctacctcagaccactccccattgtttcttgaacctgtagcgattagtaatgttactcatagccataaattttgatttgaaaattcttggtctaaaggagcccctttgtttggaaattgtccgagatgcttggtcccag

SEQ ID NO: 234750 - DNA, 1736 bp, Cannabis indica
cgattttgaattaaatatagacagctcaatcgtgtcaacccaatagttcaactaaaccgaccattccgaagctcaaatggatcaatcgacaacaaatcgaaatcgaatgctcaatcgtatacatgaatatatagagaaacggtattgcgggcattttaatatagtgaagaaaagaaaatacgagggctaaaatgactattgaaaaatagtaatggtgatgattgattaatgtagtgaagaaaagagtcatgatatgagagctatacattgtatttttcatgaatgttatcattttttctctaccaagcaactcaacatgctgttgttctctatcaaaaacaacacccaattcatagagttcaagccacacagatactttttaagccattaagcttgctctcataatatttaaaatttgaagttcaagtgttttgttgttctttcttttctaccaaaaagagcatagtaaaatttacgaaaaagaataattacacattgtatatatagaaagagaaagcataaattttaaaaaataaagactaacaagtaacaatcttaacagcataaaataaaatagaatagaaccatcttcttttctaccaaaaagagcatagtgcaatttacgaaaaagaataattacacaatgtatatatagaaagagaaaatgtaaattttaaaaaataaagactaacaagtaacaatcttaacaacattaaataaaatagaatagaaccctctttaataccttttggcacctctttgtggtttggacaagagccctcaatttcacaaaaagagagttcatataaggttttcaaattaagctccaggttttttggatgattgataacctcataatatcaaagagttcaaaaataaaagatacctaccagttgaggaatcaaaggtctagggagcgttcccaatctatgcaactttgttacctccaaaacaacactaaaaaaatatatacatatataaaaaaactcataaaaattatatacatataaatactaattaaaattgacacagagactatggttatgaagaacaccttccaaaaacttatcgaactcctcagccaccttctcaattctaccatccaatccactataaatctccattttcacaagtcccatttcactatagaattactcacatcgattacagtagaaaaacagacgcgaactcacgcatataaatacgtatctttatatattatatatagtgaaaagaattgatttagaatatataaaaataaaatagggaaggagaacaagctaagaaccttactgtggagtgtctatcgtatttggagaatctttcattctcacaattgttattgcaagaaaagctataatcatttcaaaattcgatttattcggaacatcctttatgaatacaaatcgctattgtgagaatcagatttctaaaattcgtcaattttccttcgattagcaaatactgaactgaatttcaataattaagaatcacatctaagaaccacaattaagactttatttataaaaaaatattaaggaattactatgaatattattaaaataaattaaacacatagtaagctacacaaataataaagattaacatatacataagactaaggagcagaaattacttcttgcaagacgcgtttagacgtatctttgggcaaagatctcaagccagtagttgcctgtatttcaataaaaaatgtaataagtattcaaatgtggaaa

SEQ ID NO: 234751 - DNA, 1008 bp, Cannabis indica
gaattaggaaatagggctataatatataataaagtaagagccgtataacaattatttatcaaataataagtaacatatattttgataaaactttgtattatattaattattacgactataaattttaatacaatgcaaattgaattatttaaatacataacaaataattcaaattaacttgtattataatatttagaaaagttttgggttgagttccatgacctaatctcagacctctgacctgacctcggatcttgaactcgatccgagacccaaaccccaacccgaacatggatctagccctaaacccaaactcgggcgtgaacccaggtttaggtccagagttggggtcagggttcgagactgggtcgtggttgaggttggcatcgagtttatggtaaagatagcataataataaacaacctattaatacaaattaatactaaacatagtcttataataaataatactaatacaatgcaatataatctaacacaatattatataatataatacaacacactgtaccaattaagcccgaaatgagataataatattttcttatttttaatctttctatttttattttctcaatcctttaattttgacttattctgaaagattagagattgctttatttttaattatcttgagtgtctagcaatcaaagtctcatggtgacattatcttttttgactttttttaaagcagaagagttaattatgtttctattgtttgcattaatttgtatctatatcctattcatatagttttataagaatgtcaatttcgtacttttaaaataatggtagtaataccaataatcatgtttggaaaattgaaccctctcttaggaaagaaaattctttattactccttaccacatgtttgtttgctatttctaagtccaaatggtctattactttcttttgaataattaagagtcaatttaaaggtaaaccaccataaaggatataaccgtaattaagcctcttataatattaatat

SEQ ID NO: 234752 - DNA, 1085 bp, Cannabis indica
gtagtttagccgcctaaaattttgatttttgtggttaagtgttacaaaccataaaattcatgtggtttagccgtcaatatccctatctcgtaataatattcataataaatgtgcttataataatcatcattgtagtatccaacacaaccacataatatcaatttaaagatagctaattattctttacaataaatattaaattaaatataagtaaaatcaaataattaattatatctacatagtataaacacaactagtaatactactactagtattctttagcatttactctatttttttggtacatttgaaaaatgtgtaataattttgattggtaggagagggtgtccttttgtaactatataggcttgtacatttgtcacactgagaaacacaaactcaatcaactgtcggccaagagtgaagaaggcttgttttgctttgctttgccttttgctagttttggattttgtgtgtgcaacaaaaaaagtcacatttcttcttctttcactactcaactttgtttttgagccgtttgaattttgaatatcaaaatctttcttttttgaacgtttgtgtgttaattaatgagtcaaattggttggtatatgtggtccatattcatctacaacatttttgcatagtcacacacactaaccatggtcactaaaaagtactgaaaagaaaacatgttgaagtgtcttttgtaataattacgagatttaactcttagtttagtgattctaatctatgaaacacttattttttaaaaaaaaaaaactagtattttatattttagatttaatttaagtacttaaatttaaatttataataaataaaaatttcactttcagaactataacacttattaaattttgacccctgaattattttttattttttaaattccttctaaattatagaaataactacaaatttattattttttactaaacagttttactgatataatgacacgtttactattacagtattcagaattagaataattaatgaagaaatgtaaactgaataaatgaaaaataatcagaatcaatattataatatgttgttactaatttttt

SEQ ID NO: 234753 - DNA, 1677 bp, Cannabis indica
cgaaaacctcggtcaacagttgtcatctaaaaaatggtggccacaagaaacacggttgtgcgaccaactggttaaataggttggaacacaattgaaaaccctattatatatgtttttaatcctcttcctccggtggatgcccgggcagctaccgtgcgagaggaaaaagcataggtggtggttggtgatcccctccaaaacaataaccaaccagaggatccgtacgaagaaaatcccgacaaagacattaaccaagataggtactatgaggacgagcaaaaagatgactatgaaaaggaggaagaagattacactccttcaaaagactcaaaagttactcatttaaagcagctggtcctagaccaagatgccaagaaggaggagcaagaggaagctaccgccaaatacaagaaatcctcatgctattgcaaaccctaattggaactagggaatttaacccgaaggtccctcctacaaactagcaccccagtcttggggtttagatcaacactaactcgccagtggccacgaaaaagtttgatcaccctagagctggaccatccaaatcaacaaatgacaaaggaaaatccatagtagatgcccccaagaaaagccaacattccaaggcatgcgagaataaatcttgacctcccaaaagggaggaatgatgaaaccccaaggctagattgcgaaaccaatccgtaatggagggacctgcaaggcaataagacccgtgctcaagcaccgggacttattccccagggaaggaatgcttgtcctagtgcctttgttaaccaaaaggaagatatcgaagacttggacgctgaagaaagtgatttagcgaatgaccttagggacaacgtgaatgcatgaaggtagaaagcacgttgcgaaagaatcaggcctcaaagagaggatttacaaattaatatcaatgaccaaatccagtgatgagagatgccaaatgataatacacgaaggctggaggactactagtaaccttaaagaaagtaatagatcaactgatcaagaaacaaagtggagccggattagattcagaagatgaagatccagagacatgcgttagaagaatcttggacgtagtcctaccagagtgcttttggatgccgtagatcaacttgtacaaaggcaagacggaccccagagttcacttgccccgatacaatcgactcatgagggtcgcacacgtgaatggagacaagaaatgtttatgttttcctcttactttggttaaattcgtagataaatggtggaagaggctaccacccaaaatgttcagagttggcaaatctacaattaatgttcatgaagcacttcgttgttgtaagaactttgatatggaggtcagttctttagccaacatcaagcaacaataggctgagaccctcaaaacttatatttaactcttcacggaagcaacatcaaagacgaaagtcagtgatgaacagaagctagtggccctacaggtaaaaatcagagccaaatccctactttggaatgaaatgtagatgaaaagactagaatcaccttttgacttcttggcaagggctgaaggctttcattgtcgtgacggtaatggagctacgcatacttcaagttgcctcatatccagctccagctattgtgcctctcgaaaccctgtatgctgcacctaca

SEQ ID NO: 234754 - DNA, 1245 bp, Cannabis indica
tagacacctgttcactggagtaatacaggtaagaaaagagtacgatggaccgaaaagacccaatgaacttataaaatcatagagtgaattcgagttgtatgctcgtttcattgagtacagagaaaagctacactgattaaagtgtagaaatatcgagttccaaataagagattttgtttttccctgagtatcctatgaaagagatacgtgagggaagttaaacccctacatcattaggctttttgatattggcgtaagtaggccaagtagcctatcagctagccttgacttttgcattgtccgaagtgtataatgtgtttcatatctccatgctgagaaaatatacatcagactcgatccatatcctgagttgtgatgatgttaagcttagaaaaatctattatgtggcaaaaatatcctctctacgttttgaactggaaaaagaaagtagtatggaatgagacgattccactagttaagaaagtattgtagagaaactgcgaggtggaagaaacaacgtgagagatagtcgtaaatacgacagtaatatcccgaaatattcaggtaaattttgaggacaaaatttttataaggagggcatggttgtaatatctcaggaacctaattacgaataattaaggtttattatatattatgaattaattaggtagtaataagcaggatcatgatcctgctaacttacttagcataaattataaattttactataagtggataaataagcgtaaattattaattgcggagatttatttaaaatatgtggatataatgtaagttacttgcgaaataaaaatattttcagattcggcaaccttagaggcccaattggagaccaaaatatcacaacaattttagttagtaatattgatagaataattgagataagttgattttagaaatatcgaggtattttaaaatactcgaagttgaccaaataccctaaggttaaagatttcttagtggttaagaaattttaattattattattgatattatattattattaataacgttatctattaatatatatattaagttttttaaacataacagtaaagaacgaacgaacgaaacccccacccccattattcaattttcttcaattttaaacttaaaatctagtgatttaagctccggtagtagcgagatagtaaatcattgaagagggaaagcttaaagtgaggattggtttaattttaagttaaatacaattgattctatata

SEQ ID NO: 234755 - DNA, 1321 bp, Cannabis indica
tgttgtgttttattattattattatcattattattattattattatcatttattgaaaaataagaaaaacttcattaagcaaaaaataaaattttggtatgttgactcacctctcaaaagttaagaagaccattacaaaaataatctagccccccacttagctaccgaatcgttaaggttctcgaaacccaaatgagtattattattagacatcagtagtgcctaacacctctagatatgtcgtcttgcgcttgactaacgatattctctaaaaattattacattaaactagatgagaccaattaaagctgattagttaattagtcattagctccaactgtcctagtcagcagagtttgtcattagttggattctgttattgatgttgttcaatgtatataaacactctattgtttcattgaatgaataagatttctttgttatcctcaatctttttctttctttcctcttcttcttctgcctttcggattttgttcttcatgttcatcaatgactagaaggtttaacatgatattagaatattttccgtcccttgtggctaacatggcgattgtgggaaacaatgttgctggtgcaaaggccaatggatcacaagctctcggcaggtaacgtgtgaatcaagatccaatgttcttcaatcatagcatctcgatccatttgaacgatcataacttcttgatgtggaaacaacagatcttagctgcaatctaaaggaaattgattaatgggaagtgcaagatcagcttctggtttcgtggttattgtcatccatgacagagagcttgctgacaagaatggttagctgtaacacatcgcaccaaatttggaataccttggaaaaacacttcaccttgaaggtttcatctaaaatccttgaatttcgcaccaagttgcaaaataaccttttgtctcttagttttgtttcatcaaattcagattacactttgtttatccatcttactgcaaatattgtcacttttgtacttgtgtatgtggatggcattatcatcacaggtagtgaccataatgttattgttgaactcatctcaactctcaatacttaattctctctcaaagatgtaggtcctctgtactatttcctgtgtattgaagttcagcacactgaacagggtcttcacttgtgtcaagcaaaatatgctcgagacatactttgaactctctccactttttcactttccattctcaaacacccattttctcttctttccaactagttattaatatgatgagggcacttcttcttcactattccactgagtttcaaaatctattaccacca

SEQ ID NO: 234756 - DNA, 1175 bp, Cannabis indica
ctattttcaacccgcccaattaacagattgggcggtttgtaattttttcgggttaattcggtttataatttttatcggttttttcggtttggtttgggcgagttattcggtttgggcagtttacgaatttttttgtacagtcctatgttgaggatgggattctgtgggggtttttgtggagctagtaatggagagtgtgaccatggttcggtatattattcagcatggtggagaaatatgggtcctattattttttactaggggtattcggtaaggggatcttatatctcttcattatcttcactaagggtcttactaataagtataattatatcaaaatgtgaggttaattaaaacttttcaatttgaataaacacaaaattttcattaaaggtaattactaatctttatggggatcccttgttatcaaaatatttacaaccagtttaacagtgtttttacagcgtaagtttatatttcaaaatacaatcaaaatggagcaccctgttcactggaccataacacgcggctgatatgtacatttctgctacgatcttcaaactcatggctatccaacattggcctttcctttacctgcaccatacagcacccgtgagtcacagagacttagcaagaaaagtgaataaacagtaatcaatttatcatttatctattcattctcacattatcaaacttaaacagctacataatatcataattacacaatcctggtacttcataaagtacccttaccactcgtcaaccacgagctgaatatgtcactatcgttgcctggtaaagcaagcaataaataagaaacatattcatcgtttcaggagtaattactcttaacggtaataaccgcttccaaccctcggtcataaccgaagctcaacaaacatttaatcagaatcttgataataatcaagtctataatcattcaactgttaacatttaaccacatacagtgtttactgttggaaatattttaccaagaattagatttactaacaagtatgttgaattaacatcctaaacatcaattctctaaaacaatgaaataaacacataagggtttaagaagaccttacattgattgcagcagaataatatgactcatatcgttcaagatctctagcccttgattcatttatgtagcagagcattatcaagat

SEQ ID NO: 234757 - DNA, 1125 bp, Cannabis indica
catggatagccaaccctagatcaagtaactagccatggccgacttgccctaattcaggcaattggctatggtcagccaactctatgttgggtccgttctggccgattgttcacccctaattggccgatgtggcccgtgtgtttacagtgggttaatcacaccgactgctcgggtttgatggatctaactgtctgaagttattgttcggtggtagaacaaagtcaattcaattctcactcctagagttgatgttgttttgggtgatccacttgttcccaggctgggcctgtcaaagataggccttagaacgacttgctcttaaatatttcagagaggaatatcattttgttgggcggccagaggctggccgagtggtgttgttattaagctagcaatatctggctggccccctataccacaaggtgccagcgactggctattccaaccataagattcgttcggtagaatttttgtgactttaggcagggggaagtctgtccttgctctcgaggaacttggttggactgttagcccgttgtctacttggctgtagactctgcccaatttatcgatgagccttcattacagaggatctctaatcaaatcttgtcctctctcggtagttctctcattgaacctccttattaggttactagcttccctgttacggttgtccaagtccgcctgatgggcctagaggattggctcctgttcatccatctacctcaagaattcacgtctctgggcaaaagcatcgcaaccaacaacgtgtgattcctcagtttggtcgactcggcctacgatctctctaagcctggcaaattcaatgtcttcccctatgtctacatgaggctcaccaatagttggtttaccgattcttggccctatttcccttgcatagtacctgggaacagagtcagttgtggtgcgtggggctgttccacattaagaaaaccttctattagagatgccagtggtggatctactctgggtggtaatggccgttcattaggatcagccgggttagcaaagtcgacaggactagttgtgttggtcgcgagtttgttgggcttgtcaagttaactgggttggctacatctggtggtttgggggaaattcagtggt

SEQ ID NO: 234758 - DNA, 826 bp, Cannabis indica
ttttctctcgattataatgaagtctccctctctgcctatgaagatgaacaatgagactttaggtataaatctttagctcagaatgagttttatttatttaaagaaaatcaaaataaatttaaaaattaaaaaaatatatataaggggacacaaaatattaggattgtacgtaattttttttaaactactcaatctgaataatttgtccaaaccaaattaaaaactcaataataaatgcaaatcgaaaaactagacaaaaaatataaatgcccaatctgaggtggcttgaaaataaagccaatttatccaataaacatgaacttgctttttgcggatgatagcttcttgtattgcaaggctacagaaagggaagtttctaatgttcaaaggatgcttgaagtctttgctaatgcatcggggcaaagagttaactttgaaaagtcccctgtgtttttcagcaccaatacaaccacccaaatgagacagattatttgcaacagactgcgcattcgagaggctgaagagagaagcaaatatctgggtcttccaagttccataggcaggaataagatggcggcttttagctatgtggtggacaaggttcagaagaggattcaaacttgggataacaaatttctttctcgagcaggtaaggaagttctaatcaaagctgtggttcagacgctacctgcttatactatgaatttgttccttcttcctatgggcatttatcatcaattagaaagtgctgtgagtagattttggtggaagtcaagcaattctaaaggatacattggttgagctgggtgaagctcacgaatcataa

SEQ ID NO: 234759 - DNA, 1588 bp, Cannabis indica
  modified_base (4)..(4): a, c, t, g, unknown or other
tttntttttttatatatatacttatatatatttttattatatacataattatttataatttaatttatatacatattttaagaaaatataaaattctaactatatttatctgatggtagttgatttgaatttgaattttaaattatatttatcttatcatcacaataaattaaaattgaaatttgaatttgaaaataagaacattagttgtcggtttaggcatgtgaacccgactaaattgaccaacccattggacatgtattcttgtttttttcttaatcgaataggttgcttttagattttttgtaacccgctctttacattaggctaaataaaatgtggttaattagaatttttgttccctgaactttgacatgtaccaaatcatgctcttgagcttttcaggccattaaaaatccccgtcaaattattgagatggttggattcttggacttctatccaattttactaacgaacatcagacatggatgaaagttcaggatgcacaatttgatacatgtcaaaatttagtaaatacgatttgatatatattaaagtttgtggagcacaattcagtatatgaacaatcactacattagtaaaactgaacggaattggacaaaagtccttgaattcaataatctcaatagttcaaaggaaatttttcacgatctgaaatgttcaggggcataatttagtacaaatatcaaaattcaggaaacaaaattcctaattagccatcgaccaaaccgacttacatattacaacataaataaattaaaaaaataagttaataaaaaggtcaaaactggaaaacatgaaaaagtagaggtccttaaacgaaataataaagattaaaggtacattattgcaaatcacattgtacggacaaacatgaaactaattaggtctggttaaattggcgcctttttatcccccattcttcaaaactcaaaaaccctaaaaaatggtaaactctatgagaaattcataacataatttatggctaaaatgatttgtgttgatttcaaaccctaatttgttccaagaaaaatgatattcttgtctggttttgcaaatcgtcttcctctcagaggctttcaaggagcttcactttcctccttactcagctctgtactcaaggtttggttttttctttctttaatttaattatatatatattttttgtttacatactgtaaatagctgaaagatttgaattttatttaaaaattaaggaaaaattcatggcccatgaagtattaaatctgtaatattcagtttttagttgttaacttgaaaatcgcatacttgtactttctgctactgaaggagctggttcttttgagaaatagctttacatgggttcataggaaaggtctaaacttatgtgtgtaaaatcactggtagttttatggaagaatattagatattttggttgaaagagttcacttacatcgcaaattactttgttttatcatactccctttatattgattcttcattaatacaagtttgtttcttttcaaaaaataaaaactggaaaattactgctgggttttatctctctgaattttttattagttca

SEQ ID NO: 234760 - DNA, 805 bp, Cannabis indica
aaaaaagaagaatgccaattttccattggtgttaggcaccatagcgtcgctattcgtacgagtcaataattttcaagggcaattttgtctttctagaaaaaattaagagagatacactttttgatctcttgggatttcaaaaaaggccaagaaaaccttttagaacttagaacaatatgaaaaaaggagattggagatcaagctttggagcaatcgtgacaactccaaatctaatttcttctcttcttttttaaatttttggttttatgattgtttttcatagatttgattatcaatatgttaatggatattgttagctaaactccaatttaggaatattaatagagattgtttgaaactttctatggattaatgttattctgatttcttttttctattgatatatgaatatttattcatatttgtgcgtattatgtgtatttaactggtcatcttatgcatgatttataattttaatacaaaatctaaaaattgagtatttagaatgctctaattgaataattataagttcgacagaaaataaaagtattttatagttcggccaaggcctccaaatgtctagagatggccttgttcaaaattaattgacaatgagagcggtagctcatgcaattatatatgatgttatattttcacgcattagcaatgtggaactctaacatccctttaagatggtggttaatttttactcaccaacatttgacggcttgatcataagtaacccttttagttcataacagatcataagcaactcttttcggtttgtctttttaaacctatggtg

SEQ ID NO: 234761 - DNA, 963 bp, Cannabis indica
aaaattattctaatatttgataatgcagataaaacaaattgcatgaaaattacaattttctcttacttacatttatgcttcattttgtaaccgacgcaataagtgaaaagaaaatatttcagcaatttatgtatcattttagaaccgacgatatatgtttttgtgacggtttggaaatgccacaaataattttacgtcatttccaaactgtcgcaaaaagataaaaaaagaagagtgtatattttgtgtcagtttttaaatgaagataattgtttttttgcatcatttgaaaaacgacgctaataaaaaactatttgcgaattgcgactacggcatatacattggttttctaaacggacgtaaattcttaaatgacacttggaaactgacgtgaattgtactttttgtagtaatggtagtaaaggatttcacaatcgtaatccttaaccaactctaaccaacgcctctgtctcatattcaaatctttttgagtaaagaaatatttgaggcttttatggtcaatataaatttcacatttctttccgtagagataatatcgccaaatcttcaagacaaacaccaccgcaacaagttctaaattatgagtcgaatattgctgttcatattctttcaactgacgagaggcatatgcgataacccgatcgacctgcatcaatacacaccccagaccctgtttggatgcatcacaataaactacgaacttttctctaacaaaaggtagagctaacactggagctgtgattaatctttgcttcaactcctgaaagcttgcttcacacttgtccgtccacacaaaccgttgattcttcttagtaagctcaattaagggtgttgaaatttttgagaacccctctacaaaccgacggtaatacgcagcagacccaagaaacttctaacctccgtaactgtttttggtcgtggccaatcccggacggattcaat

SEQ ID NO: 234762 - DNA, 954 bp, Cannabis indica
atttctttcttaagctcatcaacattgggagcacaaacttgagctttacacagtaacatatcattatttgagattgaaaagtctctaggttgaccagccatcacctcatctcgaatcttaactagctcgggagcttctaaatgtgcatttttgattctctcaagaaaatcagactgtaatgtcaaactatgcaactttccaactacaaacctaattcctgcattaaccatctctgaggctagtcgaggagctatcatagcagcaatgcaaacttggccgagaccttttttactcagtgcatcaaccacaacattgactttctcggggtgatacaaaattttgcagtcataatccttaacaagttccaaccaccttctctgcctcatgtttaaatctttctgggtgaaaaagtacttgagacttttatgattagtgtaaatctcacatttttcaccataaagatagtgtcgccaaatttttagagaaatacagcagcacgctctagatcatgcattgggtagcgctgttcataatctttcagttgacaagaggcataagctataactttgtcagcttgcatcagaacatatcccagaccctgtctggatgcatcacagtaaacaacaaacttttcccaatctgatggtaaagctaacactaaagctgttatcaaactttgcttcaactcctgaaaacttgcttcacatttgtctgaccacacgaatcgctaatttttttagttaacttagctagtggcatagagatcttagagaacccctcgacaaaatgtcgatcataccctactaaactgagaaaacttcaaacttctgtcacatattttggcctcggccaattcttcactgattcaatcttactcgggtcaaccataattccatcttttccgacaatatgccccaaaaaagatacctctaacaaccagaattcacacttttt

SEQ ID NO: 234763 - DNA, 1064 bp, Cannabis indica
ccttccacctgagtaaaacccttagccactaacctagctttgaactgaatgggttcgttctcactgattctctctttcaccttgagaatccatttgcactccacaacctttttgttctccagcttcggtactactatccaagtctttttcatcatgagtgaattcatctcctcatccatggcctagagccattttgacttgtctccacctgttatttccttttcgtagcttctgggctcttcaattttagttggttgtactactgttagtgcaaatgcaaccagaaccacctcaacaaatatttctaaagggtgattctctcttctagttctatcacgcgccaattgataaccttccaaaaacatttatgtctgactcctcccaaaacatctatttggtcttcattatctttcagctcaatatcaccttttgtttgcacactatctttcgattccatagtatctttcaactacgaaccttcttctagatgtttcattttgtactccatttccatccgtgtagtgttcttgtttcttaatctttttgcatcacacggagacacactacttttttggctatcaagtggtgaaattctaattccttgaaaccacatttttggcaattactaccttttgtctacccttcttggaaacacatattctataacccttggtacctatggcataacctaggaaagttaccttaacagattaaggttcccatttatcaataaattagcgtacatatgctgtacacttaaaagtttttaaatgcattaagtttggggttctgctgtaccacatttcataaaggatttttaagcctataactctgtttgggcttctatttataaggtaggttgcagtagctaaagctttcccccaaaatagtttttctaatccaaaattgaacaacagatatctaactttgttcaattgggttgcttcatcctttcagcaatatcatttttctttcggatgttcactacggtcctatgtctagtgatatattcttgacacagcttatcaaattcagatttgaaaaactctaacccattttccgtc

SEQ ID NO: 234764 - DNA, 1176 bp, Cannabis indica
gctctttgtattaggcatggaatgcctatcaagaatacttaagaaagttggggaatggccaggttttaagttccatgacagatgctctagtctgaagttaaaccacctctgttttgctgatgacctcttaatattcagtattgaggattttgtttccattatgttgatgcttaaaggactgaaattgttttctgcaacctctggtctccttcccaatgagcaaaaaactgctatttattgctcaggtatggcaaatggagatgttaacagaatacttgatgcatctaactttaagagaagttcctttcccttcaggtacttgggaatccctatatgttcaaagaagattagcaaggccgaatgccaggaacttcttgagaaaatggtgagcagaattcggtcttggagtacaagaaatatttcttatatgggaagagtaactctaataaatgttgtcttgatctctatccatacttattgggctcaaataatgatattgcctaagaagttacttaaggatatagaagccatatgtagatcctttttatggaaaggaatacaaggaggagcagggcctggtttaatagcatgggaagttgtttgcaattcaaagaactcggggggacttggcttcaggaatattcaacaatggaacatagcagctcttggcaggtacgtttgggacattgcaagtaagaaagactgtttatttgtgaggtggatacattcagtatacttgaaggatcaacaatggtgggagtatgatgctcctaatgattgcaactggtattggaagaaaattgttggagtgaagaaccgtttgaaggagaagctcgactctgctggttttttactgcagaagtatacaattcagtttggatacaatatgtttttcaccaacaatgagaaagttccttgacatagagatgtgtgggatagacttattattccaaaacacaagttcatactctggcttgttatgtggggcaggttgaacaccaaagaaaagcttgccaagtatgatatgaacatagatgagacttgtcttttttatgggaaggagaaggaatcgattaagcatctcttttttttttttgctttgtgattatagtaggaagtgcttgcaagaagtaaaagcatggctgctatggagaacaaaagccgattcaattcaca

SEQ ID NO: 234765 - DNA, 1480 bp, Cannabis indica
tcatcctagtgaagcttttcccagactgttcctggccaattccagcaactcagtcctatccctcacaaatcggtatgctgctggacagacaccttgagacttctgtttagccacctcatgtggcatcagcaattgtctttctaagacaatctccgctggactcatttccgctgtagaagattgttgaatgttatagcaaaattgagccacatcaagcaattcaacccagttcctctgacttgcagtcacataatgtggcaagtactcttccagcaatgatgcattctctccgtctgaccattagtttgaggatggtttgctgttgaaaactttctgtctgaatcatgcatgttgaacaatgttgtccaaaacctccccgtgagtctggaatcccgatcatttatgatgtcttcgggtaacccaaagtacttgaccacatttttcataataagttctgctgccacatccgctggacatgcatgacgcgcatgaatgaatattccatacttcaagaatcgatccactaccaccaagatagaccgaaacccttttacttctggacatcccacaataaaatccatgcttattgactgccatggtttctcagggattggcagaggttgaagcaactctacttcttgcattctttctatcttatcttgtttacatacaagacaagtcttcacttaagcctctatgtcttgctccattttcggccaatagtaagacttcgacagtaaagccagcatcctagccacacctgggtgaccagcccacttagtgtcgtgggtttctttaagcaattcccttcttaaagtgccattgtttggtacaaataatctgccaccattggcatagagaagtccatcttcttcccagtactgcatcagttctccatttcttgcttcctcaagaagcttcttgtaaccaagatcgagcagtgactgctccctcacctggtcaaagaaagttgtactcacctgagtcaacgcaccaacaaaagcatgtacatcttttcggctaagtgcatcagccacttgatttgcttcccaggtctatgcacccatacaaaatcaaattttaccaaatactcatgtaaatgagcctgctttggggttagcttcttctgagatttaaagtaggtgttggccacattatccatcaccactgtaaattttgtccccagaagatagtgcctccacacatctaaacagtgcactaccgcaaccatttccttctcacgggcagaatacctttattcaacatcttttaactttcaactttcaaaagctattgaatgaccatcctgcaccagttttccacccaagggacgatccaatgcatctatctgtactttgaatggcagataaaaattaggcaactttagtatcaatttcgaagacactgctaccttcagcttctcaaatgcctcattgcattcttcagaccagcaccattttctgatcctttttaaggagat

SEQ ID NO: 234766 - DNA, 759 bp, Cannabis indica
cttctttaattacttaaaggaagcaacaaggcgtttgaatggactaatattacgagcaagtcttccaagcccccaaacatcatctagccaaacatcccatcctatccaagcaaatagatggtgaagaactatacatctacttgtcagtcactgagcatgcagccagtgctgctttggtgcatgaggaagaaggggcacaacattttgtttactacatcggcaagtgtctcactggggccgggtcaagatatcccccattgagaagctagcctactgctttgtcctagcctccaaaaagcgaaggtcatacttccaagctcacacagtcaaggtgtttactgactaaccacttcgacaagttctgatgaagccagaatcatcaaggcacctactcaagtgggttgttgaattaggtcagtttgagatcacctactagcctcgaagagcaatcaaaggatatgcattagcatacttcattgttgaatgcactagccttgaagaagatgatcccatgacttgtgaagaccaggtccacacgcttgagactgcagctcaggaggacactagaccttcctaaaaattatatgtagatggctcctccaacaagcatggttatggtgttggactcatcttagttacaccagagggatttcaaaatcacagtgaattgcagtttgagttcaccacaaccaacaataaagcagagtatgaggcattcctaataggactatgattggcactaacaatcaaagctgaatc

SEQ ID NO: 234767 - DNA, 907 bp, Cannabis indica
ataggtcctcgagttcccctagtcagctggttcactgcattaggttgaggaaggaagtttcggatgttttgcccaagataagtacttggtcgtctaccatttggcctatagtgggattttatgatcttggattcgatgtcgcggcctactgagtttgttgaacgtaagttgttgtgcgctactccagcccattatgttgtctagtcgaaacataaggccctttccccttgttgggaattctaataagtggagcattttcacgcagctgccgcccaacttgttgattaaatttccttatcagttcggtcgcctgcgtagatcgattattaattgcctcatgttgagtccttagaattccaatctgcctatccatccaatcttagaataattgtgagattcccatgttagcctgaaacctaatcccaacccacgtaaacccgacccaacccatacatgatcgacccaagcccaaaacccgttaaaatccattcgatgtgcacctataacttaaataataaatatgatattttgtaattaattaacgatatttataaaaattattatattaaattaatatactcatttttgtgcacatagaaccaccccattttacctccccaaattaaaaattgaaactacttttttttaaaaaaaaaatagaaaaattgaaacttttttttaaaaaaaaaaatagaaaaattgaaacttttttaatgagaagaaaataaaaattgaaactttttatcaaatttggggtatactgaaaatcaacgacaccactcctaaccggagatgtcgtcggcggcggcactaccagacgagctatggcgaagaattctcgagctaggcataactataaagactcaatctttaaccttcaaagatctctgtcggctttcaataacct

SEQ ID NO: 234768 - DNA, 1039 bp, Cannabis indica
tatggcatataagatttttgacctttaacacctcggctatccttaagccagcgatcaaggcttcatactcagcctcgttgtttgaagtgtcgaatcaaaatcttaaggcatagtggaacttaaagccttctggcaaaatcagtatcacccatgcacccgagccatgttcattggatgctccatcgacataaaacttccaagtatctacttctcgcaagataagtcgagtttcatctagaattattccttctataaggaaatctgtcaagccttggcccttgatggatgtttgcgagtgataagttatgtcgaattgccccagtttaattgaccattttatcaatcttccagaagcatctggttttgacaaaacttatctcaggggttgatcacctaacaccttaattcggtgtgcctggaagtaaggccttagtttgcaagatgcatgaattagacatagtgctagtttttcaagaggtaggtatcttgattctacccttagcaaccttttactaacatagtaaacaagttgttggtgctttccctcttctcgcaccaatgctgcactaatcgcactttccgagatagccaagtaaaggagtaaagtttctccagttatgggtttttccaaaactagggttgttgacaaatgcttctttatgctattaaaggccttctcacactaatctgtccactcaatttttttgttgcctcgcaatacattgaagaatggtaggcacttattagttgatttggagatgaatttgttaagagctgccattcttcctgttaaggcctggacttccttcaattttgttagtgatggcatttctatcaaagccttaattttctcaggatttgcttcaatgcccctcgccttgactatgaatcctagaatttttcctgaggaaacttcaaaggaacacttcttcgagttaagtttcatattgtactttttcaaaatctcaaaccactctgcaaggtcctttgtgtgatctccattttttatcgacttcaccaacatattgtcgacgtaaac

SEQ ID NO: 234769 - DNA, 835 bp, Cannabis indica
agagctccataagcttatttttcaagttcagaaaataacacacaaggtcagagctttctctctctagaaattggagcttccgacacttagtctttttctataattaccatctcgtgagaaataaaaactagaagtagctctattaatgttgcaatacagggagtaaaatactataaatttgttgtgtgtctcttataattacttaactacttattcattctcgtcaatctagcaagcgaatgtggcttagaagtctagtttaaatttctgagtcaacagttattttgcaaaattttgagaaacttgaaataatttatagtataaaattaatgttcaaaaagtctattttacatgcgtataaaataaaaaaatcacgcgtgcaatagagactatttaaatcatatatttggcgtgttaaattttttagaattcttcaaaaatttactgagtatcttaaataactacaaatacatggccataaaaaaaattggagtaaatttttttcgcaaatatcgaaatagattggaatgcgtattgaaatttttttgttttttttttttttaatttaactattgtaatacatattggagtgagtgtaggcattaatatatacttaaatgtttttttttaaattaaaaaaattgatgaaggttaaaatagcaatgtaacaacgttaggattttcttccatctataaaagtttattattgtttatcgtaagggtatgcagagatattttaggagaactaaacaataaaacctcaatataagaaaagaaaatctcaaacttgagagttgttacttctatcccattaataaaatacctacaaaataaa

SEQ ID NO: 234770 - DNA, 1573 bp, Cannabis indica
ttggtcggtttacaattttttttgaaaaaaaattgggcaggttgcacttaaattttagcaagccgaactttagattgggttagaaaatatataggataaaccgcccaaaccgaccgatgtacagtcctacgaccacctggtgagtactatctttaccttatttttcttagattaatattttatataaaataaatttgttttaagtttaactaattatttttattgttatgttatttttaatgatagttgattggtgggagagttttggagatgaagttccaaaactaaattatttgcaatgaaagttcttggtcttatttgttcagcatcagcttgtgaacgtaattggagcacgttcaatcaagtgcacacaaagaaaagaaatcgcctaagcacatctaagatgaatagtttggtgtacattatgtacagcaaaaaatagagacacaaattttttaagaaacaatcccgaaaagaggaagatgatcatttgatcattgaaaatgtgccttcagatgatgagtagatagccaaccccgacccaaatgatgaagaagataatgataacatagaactgagactgaggatgaatatgaggggggaagttctatagcaccaaggaagaggaaaagaaaccaagcactgccaccaacaaagaaaggttacttttagaactcattgcatattgcaactacatttcatatttacattataaatagacttggcattttataaatttattatttacatattgcttgtggtatagggaaaggggaaaatagttaagtggatgtgagttttgaggaggatgattttgaagaagaagaaaatgggagtgatgatggtcgagctatgcaattttactcttcaaataaaaatgatgccaatgaccgtgatcatgataacttcttcgagatatgagtttcaacatggaacttggaatatgtcttttaatctttagtttgaaactttagacttcaaatttatcatttctctattaattaggatattttagttttgcacctttcatgcctttagttatattttaagacttatagttaataatttcatgaattttatgaattttataatatatatcgtttttatgaatttttttattcttattgtcgagacttatgctcgcggtactatggcaaaacgcctcagaacccgttttcgcctttcaaaacgtttagatgaaatccaaataacattgcataaaaaactacttccgtttcagatacatgcttcaaggttcgagcataatttgaattttctaaaagactattttaaccatgaacaggcaactgcgtttgcaaatggaagcatggaatgtagtactgtgctaaagcacaaataaatatctagagttagacaaataaaatggcatacacacggatcacttatgtgagccttagagcaagtccaaggacacagcgaaatcttatatatgctgtgattttgttccaaggagactgcaattgtgccaccattttcaagttttgtctacaggcacggtagatcactgcatttctttttttatatataatttaattaatatttatatatagtt

SEQ ID NO: 234771 - DNA, 2106 bp, Cannabis indica
tttgcctcttctagatgcttttttgaagtgtccgtgagggtcttgttcacagcttttacctgcccattcgtttgaggatgaccaacgacagagaagcttttgatgatggcgtgtctattgcaaaaatcagtgaacatgtaattgtcaaatgcttcccattgtctgatacaatcttctgtggcagtctaaactgacatatgatgttcttgacaacaaatttgaggtattttttggaagttattgctgccaagggttcaactttttcccacttggtaaagtagtgaacaacgactacggcatactgaactcctccttttccttatgggagtcgaccaatgaggtctattcctcatatggcaaagggccaaggagcctgcatcaatgtgagctcgttgggtggagctcttgagatctttgagaatctttggcacctatcacattttttgacataatccattgaatcttcgatcatggttggccaaaagtacccctatcagagtttctttttggataggttttgcccccagcatgattgtcgtagaagccttcatgcacttatatcaacaaacgcttggcttctatcttagtgacacaccttaggagtggcattgagaagcctcgtctgtacattactccgtctaggattagatacctaacaacttttcttctcatcttttttgcctcatttttgttctcgagcaaggatccaatttggaggtaagctgcaataggtgtcatccaggttggactgtcatccaacatgttgacttcttcaaggatggtaatgatgtgttcttttaagaacagtattggcaccaagtttgctttatcggtattggtgctgcttgttagacgagaaagtacatttgttgtagcattctcttctcttaggatctaccttattatgtagcctatgagctgacttagcaagtcttggatcttgctcaaataggctatcattctttcacctcgagttgtgtattcacctaggacttaatttacgactaactaagagtcgttgtatatgtccaggtggtcatcccgtactttgtgcgccagcttgaggccaaaaattagggcttcatatttagcctcattattagaggctttcaagccaaatttgattgccccgtgtagctattgcccctaggtgtgatgagggagatgcctgcaccagacagttggttagtgtagcttccatcaacatgtaatttccatgttgattcttcatgtttttactattgctcttgctcttgcttcttttctggttgtttcttttctcctgaatctggagagatttcagaagatatgcttgtacattaagccacgaagtctgtaagagcttggccatttattgccactctcggttgatatgtgatctcaaattggctgagctcaatggcccacttgagtagtcggccagaagctttaggttttgtaaaatctaccacaatggctggtcagtttacacttttattgggtgagcttggaagtacggccttaactttcttggtgctaagagtaagatgtgcattagcttctccatgagtggctatcaacttttaacgttgattaatctcttattgatgtagcatactggatgttgtataccgtcttcttctcttgttaggattgcactcacagcatgttctgtgacagttaggtacacacccaactcttcattgtctagaggttttgataggagaggaggttgagccaattgttttttcagctcttggaatgcattttcacactcccatatccactcaaattttttgttacctctgagtatgttaaagaagggcatgcatttgtctgttgatttaaacacaaatctgcttagtgtcgccatacgtcctgttaggctttgcacttctttgattgttgtgggcaacttcatgtccaaaaaggcttggatcttgtccgggtttgcttctattcccttggcattgactatgaagccaaggaatttggtcgagcctactccgaatgaagatttgagggggttaagtttcatgttatactctttgaggatcttgaagccttcgtctagatcctccacatgtcccccaacctttttgcacttgactagcatgtcgtccacat

SEQ ID NO: 234772 - DNA, 1648 bp, Cannabis indica
ggggttttaatcataatcatttcgtttcttcctcattaattgcaaaatttattgccgtgacgaatattatctcctcaatctttcttcagaccaaaatttctactgcatttattgtcttccagtgtctcgtttaggtctaaatttacatctgcatttattatcttcttctcctttcttctatcaagtatctaactatcaaatcaccagatatcttttaaacccaatttccttcattaagatggcggcgaggggcatcgaaggagttgatgatgcttgggagaatggaataatcatgatatctatcaagattagaggccaagctatgatcagaggcaaaccaagaggtactcttcatagtctcttttattccttatataaagatagatttaggttaatttgtttttcaccatctctcttctgtatcttctctttctttgtgattgttctgcgtaatagttctaagatggatgcgcttaatccctttccttctcagtctttaacccttacccctgatgaaaacactgtgtatactcttgctgatgtccctgatgaatccactgataccattagccttctcttaaaattattcactgtcaagcattatagtcgaccttccttgatcaaaactttatccccagtttggacctctcagtgtaggtttcctgtagtcatatctgaacattcggatgggctatttctggtcacttttggttgcgaaggtgataagaggagaattcttgatggacagccatggcattttgcccagagtctcactatctttgctgctcctgatgcttcttttcccattactcctgatcagctgcactatgttcctttctgggttcaggcgtatggtattcctttccgttgtaagtctcttgatttggccaaaatcattgcttcgggtgtgggtgatctaatccaagtggatcataccacagtgaaggagggaactgggccctatcttcgtattaggttgttgattgatgttaacaagcctatcaggcgaggtattcatgttcgtttttttaagatgggtagggaatttgtaaaatggctggatttcaaatatgaaaggctgcctgattattgtctttactgtggtatgcttgatcataccaaaaaatattgccatgcttatcttcagaagtgtgatgagtctatttccccacctccttgtccttatgatctccctcttagaggtaaagaaaagcctactgaaaggcaatccccttttcaatatcctcaccccccagctataactatcactgatatggatcttaccggttttcctcagggaagtcaattccctaatccttttctgaactatccttttagctttacccctctgttgaactctaatgttgcctcggttgctagtctaactggtacttgccaatcttataatgtgatgatccctacacctgtaaatcctaacctttctttggggttttctttgtcgggttcatctttgtctgccccactacatactgactctaccattgttaatgattccccgagtttcaccaatccagaattgaactctgctgctcgctctcttgctgaagctttaccctctttaattctcaactcaaatcagacacctgctgcctctgtggtggaaacctcattacctgattctcaggtt

SEQ ID NO: 234773 - DNA, 1441 bp, Cannabis indica
ttttttttttatttttttattttgggcccccggaaagtgtgggccctaggcacgggcctagcccgcctatgcctagggccggccctgatcacagtcccatatagctgctactttgtcgtctccctctaaatcaaaatcacatgagtctcctcatggaatcacaactaattaattaaagctctctcaccttaatcctcatcatcaatattatttctaattaatcctatatgtagatatatataatataaagatgtatgtatgtatcataattaaatatggttgacgaatatcggtgtggagctctaagctatagtactatatataatttgtgtgttttagaaatttatatgtatagagtgcggaattaataaaatatatatgctttataattaaggattgacatacttctatttattgattttttgagtttttgtcccacataagttttgatctgcaaaaaaaccgattgttgtggctaatcgggcttccaagctctctcaactctctttagatggatttaatgtgtttcacagaatgagtagtgagctcggtgaccgagaccctatatgagacctttcatcaaggtctctgccacaattaatgtaaaatattttgacaattaattcttgaaattaaattgggtaactaaaatatttggtaattaaatctaactataattagaatatttgattatagtaaataattaattatattttataaatcaaatcaaatcaaatatttgatttgttaccatataaaaaatattctaacattctcccacttggtcagtatttaaattaatttaccacttaaaactcaatgttcctcattacataataaatatatgaatcatagtgatatgtcctcattatatatcgagtattattttccatatattacgatatattcataatataacaatatacttaatgtggcaatgtactagtgaacaaactttatattcatacacattttgttaaggtgaattgatcatgtgaaaatatagttaaccaattagattctaacgtacttcactggttacctcacctatttacctcatataatattcacttaaataaatagcatttaaagcatgacatcacatagcacatatatattctagatgcttgcatactgcctaaaatggaaagcggtaaacagatgatcacacaaacagtaaagtatttactctcaatacttactgcaccatgaatcgagcttgtctctgacgacgaatgtacatgttcgaccggtctacaggaagtttaaaaaccttggtgctctgataccaaattgtaacgccctaaataattaggcacactactcgagttattttcgaaaccctaatcccctaagcaggattgctaatcaagatagcgcagaatttaaacttttgtaaaaacggaatggaaataaacttgtaataaattaaactttataa

SEQ ID NO: 234774 - DNA, 904 bp, Cannabis indica
aaaaatgcacttttcttcttcttattattattattatttgtaactgccaaaccaaggaaaattattattattattatattcgaaagtcaaaaataatgtgcattaatatcaaaataaaaattgaaactggggattgctacccaaaaaaactaaaacgggggatttttaattttggttagctacggctacgcccactgaattattattattattattttgaaacaaaaattttcattaaaaagagcaatacaagaaaacagaagaaaatagcaaaggcagaataaaagactcggtaaaaataggatcagcccataattgagaatttttagcaacaacatgcgcaactcaattggcagaacgtttaaaattgtaaagacaaattatgaaaagaccttaacatgatcttcaaatcttcaataactaaaccaaacataaaacgaaacactataggactttggatagtttcagcagataccaaactacttgtctgagagtcacagacgagtaactttgatctttaaactagctaagtacctccttaacgtcgagagtctcagccacattaggctcgacactacttggacaacaatttgctcttgccaccaccaacataccagacgaatctcagacaatgaagccaaccccaaactgaccttccaaaggaaaaattgcagcatccacgttaattttgacgtgtgaaaatagtttcacccacagctccctcccatcgccatcaagcaatggtcttgttaaaggaatattacctctatcttgagccttaaaccattggtcaagagagttatccgcaaacacaataacttcagtcacagtctgagttcgttgattccaaaccttatcatttcttgctttctagatcgccctgcataacattactactctacca

SEQ ID NO: 234775 - DNA, 751 bp, Cannabis indica
tctttgacaacaaagccagattggggctattaggctttccacaccaaaaattgctccaccactatttagccaagcttcctttgtctagcattcttgtcatctgtctataattttacatcgttttcatcatgtgaagcaatcaaagtgtcgtacaaattggttctcatcatcctatcctacactcataaattaaagattgtccacgaacccacccacctataccgtttgtttcttctcaactaagccacataacgaagcttgttgtttaccctttctcaacctagtatagtaataaggcagaaaaaagttggtttaagaatccatcttccatagtttccaaaaaaaaaaagaggaaagttacactctacacttttttttttttagtagtaaaacccgattttagataaaacaatattaaaccttacggtcgttacaaataatgttcgttgggatgattgaagggtcaaccatgccaataatattattggcgtaagcccacttagccacattatggactacaaaattacaaaatcgggaaataaacgaaaaattataactcaaaaataaactaaagagtttattacattggtgaacacaattaataataccccaactggaacatgtcccattcagcaccttaataactaccttcgagtcacaaacatttataatttattatctatccaattatacccatatttactaaataaaaaaaagtgtaaacttcctattttattaagggaaaaaaaca

SEQ ID NO: 234776 - DNA, 1146 bp, Cannabis indica
cattttctaaccctaaactacctgccgcctccctctctctctttctctcaaaatttcttttcatcatttgtcatatactttctaacctaaataacttgctgccaaggagaaattttgagtgagaggagctccaatcagatccacaccactactacgaacaaccgagactctccggccgattacaagaaagccatcgattactcaagaatagggagatgggggaggagaagaggcacgagatgattcagaatttgtttggagatcaatctgaggaagaaggagagatcgattccgagcacgagtctaaccccaacccaattagatctctataattttttcttcagatttttttgctcagcttattggaatcttaagctatctttttcaattacattatttagaaggttggggttaaggtttttggccttagtttgggctacagaggcgaggctcgccgccgtgcagagaaccagaagtcgccgccgtgcagagaaccagaggtcgccgccgtgcagagaactaaggagagagagatctggaggggaagggaagaggaagaggcgaggctcatttttggcttggacggtcagagaaaggttatcaccgtcaaggggaggctcattttttgcttgaaggccatcgccgaccctacaaattgactttaagtttttttattcaatttcacttagttgtaatgttcatatttaatatttatttattttgaatttgttgtaatttttttttctgaattgtatcttttgtaaaatattaaaatatattaattttatttattttttaataaatattatttagttttaataaatattatttagttttttgaatgaaaattaatattattatatatatatatatttattaaaaatatatatcaaaaagtaatttaatttaatctttacaatatttttaccaacacttataaatagtcatttaaagtaattttttctattatttgtaaaccgtcatttaaagtgacttttttcataaaccgtcttttaaagtcttacatttttatgacgcccacatagccagcggttttaggaaccgttgggaaatgatatataagacagttataaaccgttagaaaaaaccacttttgtagtagtggttacttccaaacacaccctt

SEQ ID NO: 234777 - DNA, 830 bp, Cannabis indica
atctttaccattttaaatttgttatagattttcatgtgtctaatatgtgtattaaactttttaaattaataccatgaatgtactactctttttatgaaattaatctgcagatgcaatgggacttagccccctcggtctttaatacgagggtcaaacgcagcacataatgtcggccttcagattcgcagagcagctagaacaagtcaagccacattaggcatgttggtcttttgatcaataaacaattcagttactttctctgcagttttggtcacatagttgtggcggctctccattatatgacggctgaatcgcaacgctgattgccctcctctgccatgtttcttaggaagctcaactgtggctctgtaaagcaccaatttcttcattctccaaatctcaatgtatttatcagtttggttacattttttttgaacaagagaaactttattttaatcaaaaaaccaaccaatacagtcagctgagaaaaacttagcacaacaagcacaacgctgctgcaaaaaatagcaacagccccaactctaacaaataccagctgctaactatattaagtaaatacatgtttttttttacaagcttcataaggacccttgctcttaactctaatttgcacaactttcttgacatcttcgcttagtctgttaaaataaccattactcataaacatttaagccaagatctagtatttatttagagcatcaaatacaataaaatacatacctcccataccatccatgtgagccattatccttcaatgtcttctatgagaatcaccaccaatccttgagcaaaaactagagagagcactt

SEQ ID NO: 234778 - DNA, 709 bp, Cannabis indica
aaccatgcaacataaaatgttatttctgatctttattaataaataaatctgattatattgaaatgagttttatttagggcacaaaacccaacagcaacctcttagggttccaaagtagtaggtggcaaaagcctaaaattctttcatttgttaacccaagatatgtttccaagagagggccaaattggaaatttaaactaattttgttaaattgaaactttcaacacaaaactatgcaattaatcaaattaatgaagtaagtgcaaatatcatggcaagcaaatatagagaggaaataatcaagcttgtaaagtaaagagtttaagggtaagaaataacaaactctcaatttttataaaattcggtagaacaaagtcacctacgtccttggccttcaaagctatggacctagctttgagtttcactatcgagccaatttaatgggcttggctaacccttacagccgggaatttttcacaaggtattttcaaacctcttacaatagttttccaccaccatgaaatatcaacctctttctcagattgttgtagagccaatctcactctaaccaggttgtttacaataccggtgtcaacttcaccttaatcacaatttgaaaatgtgttaaaaattacaagcaaactcactctagaagtatgatgatacaatgaagaacctagagtgattaacaagcacacttagaagaaat

SEQ ID NO: 234779 - DNA, 1040 bp, Cannabis indica
acaacacaataatgataatttataattaactacaaatttttttttattctttagtcacaaattttgttgcgactaaaagtaaaaaatttttgtagtgacccaatatctataaaatatttaaaataataaattaaaagtttttatttataaactcatcaaattaaagtaaaagtagataaaattttaatttttattaaccattatcaacttatatatgaatatgtgttaaaataaaaatatatatatatatattaccgataatacttaaacttcactaagtatgttaacaacacaattaattttaataacctaccaagtctaataaaactaccaattaacgttctcgaacaagatcaccactaatgcctaaacataattaaaattaataatgttaaacacttcaatattaaaaaagtttaagtagcttaccatggttaatatagcgtccgaaaattgttctgacggtatcacaacaaataaacacctacacaaaattatcaattaataattaattaaataattaaattaaactaattaaaccttaaacttatggcataaaaaatataattaaatatttagctaaatttttattttacgtaataacaatttataactataactaaacttaattaaaacaactgattaatttttataataccaaattaaataaataaaatttttacctaatcaaaaaacttttctattcaaaaaacttttctttaaatattttttacacaataaatcttttacaataacaactaattttataaaacattataatttttaaaacacatcaattttttacacattaaatttatacaataacaactgattttaaattaaaaacttatttttttcctaaatatttacataaatcaatatatatacatatattcagctttaaaaaaaataaatatatatataaataaatattataaaactaaatacctatatatatatacttagattgtaataaaataaataaatagataaatattaatataaaccttatagaagaccggcgggtggtggtggtggtg

SEQ ID NO: 234780 - DNA, 1258 bp, Cannabis indica
ggaatatttacaagaaagaaaaaatcataaggaatataatataattaactaaatatagagtataaaagtaaggtaacacatactaaaaaaaatacatgtatgtagaaacatatttgtgattgcacataagcatgaagcatcatccaatattattattatcatttatacaatatatatatatatatgtaacaaacgtacgtaaaccatatatttaaaccaagtgtatgaaattaaaaacaatttacaaccgcaacatgcacaatatatataatgaattaaatatataaagaaataaataaggtgattaattaccaaaactgtgtttaatctaaatgcaacttatcttcccttttcttttttctcaaataaaatttaaacaagccaaatattaagttgtgtaatttgctgcagacctctcatgaaaattaatctcatatatatatatatatatatatatatatataagtaaatatacatatatgtatgtagttaatttaattagtgggggaggaagaggtaatgaggctctgtgtatgccatccttgttccaaaagagcatctgaatctgatacaacatttatatttatagatggttttgcatttttgtatattgcatatagtaccagctgtgctattccaagaatgaacccagttccatttggtacctaaaattaataaattcaacacacaaaatattaaaactaaataattactttacaaaaaatattaattagcattttgaataaataaatattaatttttatccctatcacgtcccaataatgaattgtttttacgggaataaaaactgacacagagtaaaataattatcaggaatatttcacactcattgacctgtctcaaaatatataaatatatatatatgggatatgattttgttccgttattgtactttcacggattacagatgaggaaattatttgatctgacggctgagattaatctagaggtagttaggctaaaaagtagaaacgtattctaacactcatttaatgtaccctaagatctatctaatgtaccacggaatacattccgtaaaagtacatcacgtgacaaaatcatatccctatatatatttatatatttttcacctatccttaaattaaacacgaagaccaagcttctatagcaatatactttttacttgatgctagaaatggaaaatcaagctaaatccatggcaagatcaagttaaacctataatcaaactagatccactaattgttttatatgacat

SEQ ID NO: 234781 - DNA, 1072 bp, Cannabis indica
gcacgtaatttttgctagtatatatatatgtgtattagtgtcttttttaagggtaacatgtattatagtttttactttatatgattggatatttttacaatacacattttaaaaagagatttaccgatacaccttatttatttcggtatttgagagatttttttagtttaatttctttatagtcgtatatattgtagttatttaagacattttgtaaaattttaaaagattcggaaaaattaaacatgttgaaaataaggttcaaacagtctattgcacgcgagactcttttattttacatgcctgttaaatagattgtttgaactctatttttgacgtgttaaatttttctaaatttatcaaaaatttaaaaaaaatatcttaaataactataatatagactgccataaaaaagtttaaactaaaaaattttacaatatgttgaaacaaataagaatacatcaataaattatttttaaaggaatgtattgtaaaaatatccaattacgcttaaacaaactaatatatatttagttggattaggtattcttttaagatgcagattatgaaaaatatagggacgattttgttccgttagtgtattttaaggggatgtattccatgatgtacgacaatcgttagatggggtagttatttgatctgatggctggggttgatctaggggtaattagggttaaaaaaatggtaacgtaccctgtaacccattacaacgtaccctgggacccataaataaattcacacacattattacttaccttgagacccatcagccgtacaatggaatacattccgtgttttgtatttttggacacaaaatcggctcccaaaaaatatattggtagatctctttttaagaagtgtattgtagaaatttttaataatttttcaataattaatatttatcatagtagtgtattaaatgtgttactatttattataaatagtgaaaataagcattaaatgctaggcaagtgacatacaataatagactgtgggaagaaaaagaagatcgtatattctgaccaatatatttatttatatgtttgtttgt

SEQ ID NO: 234782 - DNA, 798 bp, Cannabis indica
ttgggaactcttcaattgatgtagtagctgaaagtgaaaccttaatatatatacacgacttctattgtttttctttttgttttagatatttttgttgcttattaacataaatgttatatatagattcttttttaaggaaaactcagcagataattttgtattattttattttatatattaataactaaaaaataaacattggttatattttatttaataattcggttatataaaattatattatattttttttttctataatatgaataataaatttactaattttgtatttcttttattattttttatgtgtttgttttttaattaatttattagacatattactatactttttaaaatactaagtgaggctagcacgtgcctagctctccttatgtcacttcatttatacttttattagcttaatttttatttcataaataattattttactttttacatattagttatagtgcaaattacaaaaatacgtaagaactaaagactaacttttaaaattgacattttagttatatatatatataagatattcattatttagatatatttcacacactatttgcataatttgacataaattttataatgactggtactactttttaaatgtagcatgagtaagtatcaatactatcgggtatctgaatcaccaacaaatttcttcagatctacgtcactgctaacttcatgtaaacaacaccacaattaagcttttgttcgtgcttaatcaaaaactggaatactaaaggtttattattgttgctgaatttagggaaa

SEQ ID NO: 234783 - DNA, 1490 bp, Cannabis indica
attgaagaacataaataatataattaaattagaaactaaccatctcaagattgagatcatttgatctaagatcaactaagtgatattaaattagatagatattatagtaagtttgttatatcttatccaagtttaatatcggttccttctgatgtatactccatacattcaatcgaagcttactttaccaattccctagaaaggatatagcacttatccaagatgcaagtaaactacactgtagattatcatatcagtaaaattctgtgtactgataaatcgtaagaatttatttactcacataatcttgattacttttcactgtgttaacaatacaataatcaggaatatcaatatgataaggatttagataaatttataaatcaaacaaatgatcatgatataaacatgtgaaccaaataatacattaaacaagtaataaaataaatatgtttctttattgataaatgaatattcaaaattacattgaaaatagagttttagctaaggcacaaaactcaataatttttaaaattaacataatttacataattcataatttactcacaaattttttaatgatatctaaacactttgaaaagtattctttattaaagaaaattttcatatatatcaaaggcttatacttctagctataagtaaaagtagaaacttaatcaaacagaattattttagagtttcagctattttagctgagagatagaatgataaattcttcaaaaatattttattactctctttcattcaatttaattgttattttaattaataaaaattattaatatttgaatgatatattgaagagaaaataaggcaatttgttatgaaagtttaagttaaaaaacataattttagtattttttttagaaaaaataaaataaaagttattgatagttttttttaaaacaaatgttgggtgatatttacctatttttctctcaaaccaaaaaccaaaaatattaaccacgtattatgtggtgtagtagtagggaaatttttactaacctcctttacttgggtaaaaggttcgactcaccatactcctcattgtcaaggattatgttttttaattttgaaaagaagcgtagtcatattaaatagatgttagacctcatggtcgttacacaaaatattctccggtaaagagtggatcgaaatagatccgtacatctggtgggtgaaagcccatttagccacattatgggccgcaaagttacaagtcctactaatattcgaaaagttacaacatatgaaaaaaggagaagacttagtacaaaaggagacatagttctctagagcccaatgggacgccttaccattaagagcgttgatagctagcctcgagtcactctccataataacatacttatactctagctccattgcaacagacactgccaagcatcaggccgcagcttctccacaaagagcctctgaaaaatccaaccgggacgtgtgaattcgaatca

SEQ ID NO: 234784 - DNA, 1371 bp, Cannabis indica
aacctcgagacgttagacttcgtcccccttatggatggttattcgttgaagcacttaacaatgtaaagatctcgaaagataagtattttgtattttatctctattagactctcccctacagtgactacttagagataaatttataaagtatggaacaatggtggaagctcataaaataagaataaccttgactctcgcctacctggacaacattggattcttgttttgatcgaataaaaggttgctagaatggtgtccattttagatgagctgactactctattcaatgaatgatatctttgactctcgcctaccaggacactgtatcagtttgttggaaaccttggaaattatttaagatgtgcttattttgtattttcacatttttttattctgattgtatgataatttctgaatgtgtatgaatttatattgaaccatattattttctgttattaatttttgtagttaaaacttcaatctttagtgttggtctaaattagcttgttgtttttaatgggacaaatcacaaaggattgtcatccgttacataaacataatagtgttaaatctcaatagataagtatttgtaaatgcaaaatctagttgtacattcaaagatgacaacttagactagtatttataatatgaaacaatgaagaagtttgtaaaataagaataacttgaactcttgcctaccgggacatcgtcagattcttattttattcgaaattatcctttaatgttttgacttagcatttcattttgaattttcttaaatagtatatcattagatgaatggtttataaatcatctgctcatgatgtcactctaatttatcttatgaaaatgaattgcgcagatgactatattcccgatattctatcccaaaatgatataaattctcgatcttagaaatctcctacttgtatatgcttactacaggaaatttaaacttagagttggattagtagtggtggtccaagaaagaataactactcaatgtatatttggtataaatttaagttcttgactttaaattttagattctaaatagaaattttaaattttagattcctagaatacattggacaatatagtatgacttttagaagctttaatatctattttttgtcaatggatccaaattgtatgttaatgtatggaatatgagtttagtattctgtgaccatgatctacttggactattctaagaactctttgtagtaactagacctaattcatcaaaagaccataactagaactataagatatctatggcatttgcatcttgttcatagtggttttgataagatgatcctctgcaaagagacaatatgcctatatccacttgaaagtaggatcatctat

SEQ ID NO: 234785 - DNA, 1243 bp, Cannabis indica
actctctagattttaaataattcaatttgtaagaagttgcaatgaacaacagatatggttagtagattcagaattaacaatccggatggatttgtcattctctaaaatacatgattcaaaaactaaagcattaccattattcttagtattgagaagtctaggatattttgatttaaaatgttccttctgttaacaatgagaacattgaataatatgtctgattaattgttcttgtgttgttctaattgctggttcaatctgttgtgaagaataatctgaggaagtgaaattactttctatattcttctcaactgagtctgaagtagtaagattgtcggaggaatcattctcaatatctttaactttctttttgcccttatttgtagtactggacagggacctccttgcaagtgacaatgtcctttcataagcacgcagttcagcgtccagcttgtctatgtcggacgagttccaattgttagtcataaaagatacaacaaattggttaaactcaggtgataagctgttgagaacaaaatgaacactttgctctctagataaaacaattctcagcatagttgctttctggaatttcagttcatcatgagcaagtgtgaactgatactctgaccaggagtcatcttcacactttggagttcatttgcaaaggcataaactaattgaggattgggatgtgggttgtatattttgatactgcaaatatcaataaacagaaataaattattggtttgattaaattcatacacaaaattcaaaaaatatgtttgcaaaaatatcaaaaagtaaacatattaattattttccaaggtttccaacataatgaaatatagtgtcccagtaggtgagagtcaaagataacattagttgaatagagtagtcaactcatctaaaatggacattattctagcaaccttttattcgatcaaaataagaatgtaatgttgtcccggtaggagagagtcaaagttattcttattttatgagcttcgaccattatttcacactctgtaagtttatttctaagtagtcaccgtaggggagagtctaataaaaatgaaaactttcaaaatacttatcatttgagatcttatggtgataatgcttcatcgaataacaatccataaaggggacgaagtctagcgtctcgaagttatattgaaataattaaccatgtaagttcaacaatggagattgaatatctctttgattaaagctcattatt

SEQ ID NO: 234786 - DNA, 1460 bp, Cannabis indica
tataaacctaaagcgtttatcacttcggatacccctctgaccatcaaagaagccttacaatctcctatatggaatccttccatgaactcagaaatcacagctttaaagaacaatgatacttggaaactggttccattacctgaaggcaggaaagccataggttgtaagtggcttcacaaaatcaaatataaaccagatggctcagttgacaaacacaagtctcgattagttgcaaaggggtatcttcaacagtatggttttgatttcactgagaccttcagtccagttgtgaaaccaactacaatacgggtggttctcaccatagctctttccaagagctggagcattagacaattggatgtcaataatgcatttttaaatggggacttatatgaggaagtatacatggtgcaaccccccgattttgtcgactcgaactttccaaagcatgtctgtaaactcaataaagctatatacgggttgaggcaggctccccgtgcctggtttgatacactacgacatgctttgatctcatttgggtttacatgttcaaaggcagaccaatccctcttcattcaacagacttcatctcatactctgtttctgttagtgtatgtcgatgatatcttagttacaggaagttctccttctgttatttctgatctggttcagaagcttcacaactctttttctcttaaggacttgggtcagattgactacttcctggggatcgaagtgcatcatacaacttctggtctgcatttgtctcagaaaaagtacatcatcgatcttctatgcaagaccaaaatggactgctccaatagcctaccaacaccaatggtcagtagtgaaaaactctctgcttacactggtgatcctcttcctgatcctcatcagtacagaagcatagttggtgcccttcagtacgctgtagtaactcggcctgaaatcgcatatgcagtaaacaaagtttcacaattcatgcaaagtcctttagatactcattggaaagtagtcaagaaaattcttcgatatcttaaaggcactttggatcatggtttactgcttcaggtctctcctactctgcctcttactggtttttgcgatgccgattgggcatctgatcctgaagatcacagatcaactacgggcttctgcatttatcttggaccaaacattatttcctggagctctaaaaagcagcgtactgtgtctcgatccagtacagaggccgagtatcgaagtttagctaatgcaactgcagaaatagtgtggattcagtcattgcttagtgaacttcatctacctcagccctcttctcccaccatttggtgtgataatcaaagcacaatccttatgtcagcaaatcccgtgttacactctcgcaccaaacacattgaactggacctctattttgtgcgagagcgtatcctaaataagcaacttcacgtgaaacatgt

SEQ ID NO: 234787 - DNA, 1288 bp, Cannabis indica
caagacagtataattatcaataatcataagtaacacttctcataattattaatgccatttcatatttttttgtatgacacagacccgcgtgatacactcacaggcctatttatgtctatatgacataaacctacgtgttacgctcacacgtctatctacaataaggccttagaacggttcatctcggttctagttaccgagtccaacctgattatgccttgaacacataacccttaatttcaatatacatcatggcataacaattacatattaaaaatttactagggtaataaccctaagccaataaaccgctctatttagagtaataactctaatcccggttgctagcttcgcatatatatcatattccatatacgcgacattgtgcatatctctacgtgctaactacagtcttacctaatgtcccaaaaatatggagattccaaatcaccgagttctcctggccaagtgtcggtaatcttagttacaatcctgggatacacaagtatagggttaatccctaaatccatttctaaaattactaaattggcatttaaatgatagatattcacatagaggttggaacaagctttccaacgatataaagaatgtcgcaaacggagtcccgagtaaaaagttatgactaaaacaaaaacacaaaaaaaaaaatacaataagctgccataaaatggccgcggctactgggtttaaaaactcagaaaacccaatttccagccacgaaaatgcatccaaaaacacaatttttatgctaaaccagctcacaatcatagtaaagtttcacctagcataaatcaaataaatagaaaagaattacacctaattcactctccaacaacaccaaaaaatcagcaacaaaaatcagcccaaacacacaaccatttcaaccaaaactctcaaaccatcaaataggttttcagtaactatacggagagtaagcatacaatttcatacattaaaacccaacaatattaaccctcaaaaatcaggtttaaacatgctcagccagaagcacactcaagagcaaaacttcacaacatgcaaactcaaaaactaaaaatttcccacatattttaccatcaattaacaacaacaattagggataaaaatcatatttcacaacttggaaaatcaaccctaaaaatttctaacaacataagtgcaaaatcaataaattaaacaagttcaagttacaaagcccaaaaacattaccctcaataaattttagcaagagaaattaaatttaaaaatagtaataagtacctcaaat

SEQ ID NO: 234788 - DNA, 1259 bp, Cannabis indica
tgagtaagttatagcttaaatttttagctctcttgagggttaaatttgaagtccataacttcaaaattttgattggtttgtgagacatgacttgatagagcattgaaatagcttcgaaacataagttgaatctcgttaatcgaatcaatattgagtgaattatggtcattttactaaaggttgttctgctcccatcaccctagttaacatccaaagcccaggttgacatatgacatcaacttggatgctatttttttaggctaagtaatattttgatatcacttagctaatttttttgttctggcgaagtcgatcaccagttctcgaagatgttgctattttgcgaaaatatgagactcaaaactacttgatttctaagtcactttgctgaaaagtgaaaatatgaagttgtaaatatgacttgtgtgacttcatagctctcagttactatgaaaaactagacgaatggtcgggatggaattagaatcgaataagtagaacccagtgcactaggtcatacgtcaacctaggcactgggtgctcttttcagagcttctaggatatctttttgatacttctaaggttcttgaaattgaagatgaggtctcctacctcgtttttgaccatttgagagagaatgctaagagcaaaatttgtatttagatgatcaaaaggttgattgttaacctgggcgatgggcccaacacttccatgtcaacctcggcgttgggctcagttttgatgcccctggaattgtcgcttaatccccgagtttacttgtatctttgttatttctgatgcgaaaaaaatgcctgaaacactttttgaaaaaataattggaaacagtccaagttgacaatatgtgaacctgggtgctggacccagtttcaggcctttagaaagttttgtttgctccctaaaaatactttaatcttaatctttgacgtaaaggataatatgtccataagacttttacaaaaaaaaaaaaaaaaaactcctcagaattggcccaggttgataaaatgtcaacatgggcgttggatcctcgttttggcctccaggttgatttatttcttccctgaaaatacttatttctctattttttatgaagacgaagaaaatgcccaagaaaaaattttctgtttaatgcttggaagtggcccaggttgacaatattgtcaacctgggcggtcaatgcatggggcacctggtgctccgagtgctcaaaaataaaagttctctgaatctaattctgatgc

SEQ ID NO: 234789 - DNA, 1988 bp, Cannabis indica
aggtttaaatttaaaataaaaatctaactaatcagataaattatgatgatttaaatttaaatttaaatattaaactcattaatctaatgcttcactatttatttatctcactattaatatatatatctatttttttctttttttttcccagtcacacacacgcacaacaacaacaacaacaataaaaatattattaataatgataataataataataataataataataataataataataataataataacaatacaattgtatcacacttcatataccgaataccaatatatgtgtataaactgaatattacagttgtctcataggcttaatgaaattgactcgatactgaccctaaggcggcgatcaattgtcaaagagctttatcgtggaataacttaaacaagattttatgtattttacttgtatgcactcatgcatcacatttacagcaattctaaaattatatttattattcatgcataatcattatgttactttatttatttttagtcatatcaactatgtcaaatcctcttactactttactagcacttaaaaaactaaatggtgataaccttataaatagaaatcaaatttgaaattaatcctgatttgtaagaatcataaatttttcctaaccgaggagcattctgaggagcccgctgccaatgccccaaaaaatattcaagacgtatatgatgcttggatttaatctaacaacaaggccaaatgtttcatgcttgtaagtatggacaatgttctatgtaagatgcatgagaacatggagaatgcatctcaaatagtgaattctaggccatgtttgggcagcagtaaaatcaaacaagacatgatgctactcgtagctacatgaattgtaagatgaagaagggtgtccctgtacgatctcatgtattgcacatgattgagctaatgcatgaagctgagacacatggggctatcatagacgacatgactcaagtaaagtatgatccttgagtcgctatctccttgcttcaaagctttcaacacaaactatgtgatgaataagctagagtttagcattactcaatttgttgaataagttgactgtgtttgagaatcttaacagggataagttcaaggaaggggaatcaaacgtcattgaagcaaaatccaactctcctccttcttctagtaagaaaaagaagtagaacagtaaggacaacgacagtggcaagcccaaaggcaagaagtcacccaaggccaagaagaacaaagctagccctaagtctaaggaaaagaagcataaaggcaagtgttttcattgttgcataatgggacactggaagagaaactgtaacaactatctcttagagcttaagaaaggtaaatatgatttattcattcttgaagctaacttagtggaagatgataaatccttatggattgttgattcgagtgacactaatcatatttattcttctatgcaaatacttaaattgtcaatggaactggccgatggagaagtgactatgcacgtggttaatggagcacaagtgtctaccaagggtgttggtagagtctgtttgaaatttgacaataaatttttgttattgaacaatatttattttattcccaaatgtaccaagaatattatttctttatctcttttgcataaacaatttttcaatattggttttattaataatgagattattatttccaaatatgcgtatttgttctgctaaatagagaaacaaactttatgtgctcaagccaagtgagcaattaattttaaataatgaattgtttagaatagcattgcctcaatcgaataagagccaaaagatttttaattatgatgaaacgtatctatggcatctacatttaggccatattgggctagacagaataaactggttaacaaaggatggtcctttgagagaactaaaagttagaactcttccggtatgcgagtcttgtcttgaaggcaagatggaaaaaa

SEQ ID NO: 234790 - DNA, 692 bp, Cannabis indica
aaaatattaaaaatagcataatgataaacataaaatcacagcatttattataatacaaaatttatattatgctatattatgatctaaatttagattattttttgttatgtgagatatttgtatcacaaattcacaatttagtaaaaacttttgacaaaatgaggtctattttatatttgtattatttatttgtatgctcttataaagtggttttatcatatatgtaatgtaatctaattttgaagatcaattttaacaaattgctaaatatggatcatgtccacatgatattttatttttctttttattatttttgttgagaaaaagttatttttttaccaaaaaaattattaatagaatgtgagatcataatggacaactttttgaattgttaatgttggagtatttttttaaataagaaaatgtgctaaattttatgtaaatgagaaaaaaataaaataaaattaaaaataatattttaaaataatatgtgtacttttgacaattataggtattgccccattggcgatactcactttaagcagtacaagagaaagtatactattattagtacaatttaatatcagtttcacatattttaatttaataaataatatagaaaataactaaccacaagtaatacattagtgtatgttactagtagcaatgctaatattgacaatagaatttta

SEQ ID NO: 234791 - DNA, 3549 bp, Cannabis indica
cttgaaaaacttgccctatgcctgattcatgcatctcataaactacggacttattcccaagcacatcccataaaagtcttgatggatcaaccattaagacaagttttatcaaaacctgatgcttcaggaagattgattaaatgatcaattgagctggggcaattcgatataacttatcacccgagaatattaatcaaaggtcaagctttggccaatttctcaattgaagggatagtctccgaagaagatccacttgtaaattacaatgcaaaaacatggaaattatatgtggatggagcgtcaaatgaaaatggctcgggtgcaagagtgataatgatctctccagacaactttaaatttcactacgcattaagattccaatttgacacttctaacaaagaggccgaatacgaagctttgttggctggtttaagaatggctgaagcgttaaaagtcaaaaatcttatatgctatagtgactcgcaattgattgtaaatcaagttctaggcgagtaccaggtgaagggtttaaagatggaaaaatatttggagaaagttcggaagaacttgcagaagtttaattatttcaagattgaacaaattccaagagaacataactcaaatgtcaatgcactaacaaagttggcctcacaaaatgagattgatcatttaaatttggtaccagtggaaattttgagcgatccaagtttatgtgaaaaggaagaagttgagatgatagatgccctgtctacatggatgacacccatattcaaatatatactcgagaacttcctacagacaaaaaggcaaactcttgtattcagtacctcgatatacaatagttgagggaaaattgtataggaggggctatttaatgcctctcctatggtgtgtattgccaacaaaagcaaatgagataatcaaggaaaatcacgaggcttttgtggagatcatgtaggttggcagagcttattaaagaaaattatctgtcaagaaaattattggccaacgataattaaagattcacatgaatctgtcaagatattattggggcattatcactctagtttccataacatgcaaaaagttctcgattttgttgtcaataacataatttgtaaatttggaatacccattaaaattgtatctgaaaactcagtttgatggtgaattgttcactgagttctgtgaaaggaataaaattattaagagcttctcatcagttctaagaccccaagcaaatggacaagtagaagttgttaataaaaccttaaaggatactatcaagatgaagttagacactgcataagggagatgggtagatgaactaccataagtattttggtcccacagaacgacagagaaaacaacaacagggcacactccattctcgttggcattcgactcggaagcaatgctaccagtagaagttaacattgcaatccacagacgtgaattttacaatcaagaagaaaaccaagaactccttaagttatccttggatttacttgaagaaagatgtacttagtcgcaaattactaatacagcttatcaacatcgaatcacgaggtacttcaacaaaagagttaagaaaagactcttcaatgttggagatttggtgttaaaaaagagtatttgcaaacacacaagatgtgtctgctggagtgtttaacccaaacttggaaaatccttatgttatcgaggcagtagtaggaactgggatttataaattggctcgacttaatggcttgctaataaaaacccactagaacagtgaacatttgcgaccctattaccagtaaatttcaaatgtaatgttgtatttatctatgtaacatgtaaattcttattattttcttattatcaacaaagttaaagtttttccaagtaattacaaagttttctttaaaattacttaaaagacatatatatgtgtatatcaaccggaatttatctagaaatacattatatattacaaacccacccattttaaaaaaaaaaatcgagtaaggataattgattaaaattgtctatggacaatataaagtcaaaaaaattgaaccttttcttcagaaaggaaaattgaagtagcagttgtaaatgagattaactcataaaaagaacataaagctacatgtgaagctaaatatttaacggctcacattattcatgcatgtattataaacgaggcacagagatgtcttgaaaaaataatacttaacctaaaatatgaatagatggcttaattattcatataagcaatcaaaaaatgtacaaaatagttcataaagtgaattattcaaagtatgtttaagttttcttttaagttatatatggcagattgaaattgctcgcataatattggataaatagtgcactacacgcgtaacataaggcagactataactgctcacaaatcgaaaagcataagcagaatataacagctcgcacgcatacttagtagattaataactacttaaagaatatcaaaagaaaagcgagatcattggaaatgctttcttaaaatatcttaagttggatcaaagtataattgtttaggttgtgaataaaaatgcaaataaaaaaatgtatcaagttcaaacataagatacgagataataaaagtaaagatagatatataaaaaccaaatttggtcatccaacaatacaaaattgtatttgcaataaataaagctacaaggggcaaaccattgtctcggcgaaaaggccatttttctaatatgaaaaaaaaacaagttaaaaaccaagtctacatagtgggagacgtggatggatcttcttggtctgcctcaacctcttcttcctcactgacctcttctattctggtcttctcgcagaaggcaagcatatcttcagctcctggacccaaaaagctgaagtccatgtcaggattggctgactaggtttgatatgtgcttctcctagaaatactgttgaccctatttttggtgtcaactttggcatcctcaagctttttgttagcctcggctggatggtcttgatggaatcctcagctctttgatcattttctagtcatcttggcattgtttttcagcttcctcccttacacgagaaagttcaaactttgagtcattccacttcttggccattgtgtcccgatgctctctagtctggcgaagttcagtctcgagcattttaactcgctgaaaccctcgatgtgagcagcaaaggaaagaagagatgcttgcaagaaaaagatggacaataagaaagaggtataaagacaaaaaggaaaaagaaaaagagactaacctgatgcatgaggtcgtaacttctttacgcaagaccctcaaaattaccatttgtaagtagatcccagtcgctggacttaaaggtttgataacgccgccaaccgtttgtagcatgtagcgagcagagttgtgaaccttcagtcccaactttgagggccaaagggcaggagggcttgagaagaaccatctccaggcgagaaccagagaactttacttggtgtacttgttgggttttatgccctaaataaaacacatt

SEQ ID NO: 234792 - DNA, 2418 bp, Cannabis indica
ttctcaacttattaataataaaataaacccaagaaaacatataattcaattattacaaatactgccctaagtcaataaacaaaattaggctaattaggatttttttctcccgaactttgacatgtattaaatcatgcccattgaactttttaaggtcgttaaaaatgccccctgaactattgagattgttgaatttaaggacttttgtccaattatagtaaaaaaattctaatgtggatgtaagatcaggggacatgatttagtacatgtgaaaatttgagaaacatgatttggtagatatcaaagtctagagagcatgattgaatacataaacaataactgaaatagtaaaattgaatgaaattagacaaaagtccttaaatctaacattctcaataattcaaggtataatttttaacatccaaaaaaattcagggcacataatttggtacatgttaaaatttagagtacaaaaatcctaattaaccaaagaattgattaagaccctaaataatttaaggtaataataaaaatacttaaatttttcttttgtttttatatatttattttttatgagcatacaaagcaatgaagaagttatgtgcacatatataaaagtaatttatggtgtaaatatttaagtttaattctcaattgtaaataaatacttaaatttaagttttgacggtaatattacttaaattgtatttttaaaacttttgtaagtacctgactattaattgtcaattaattatctacatgtcattttcttattggtatatttaaattaatttttatataataaatataaatttaatgacttgcaccaattaaaaactattacgtggctattgacttgacacttaacgactcccctatctccatcaatagaagcataaaaactccaaacacacacacacaaaaaaaaaattctacctatgtatgaatttagcattagaaaaataatttttcacccaaaataagctataataataataaagtacaaatacgtataggattttattttatcttattaaaagaaaaaaaagcatataggattttgtggtccataatttccagctagccaagtcctccaagctatattattaatattgtgatgattatattttccaagtcaaataagatggttaagaaaattcttataaaaaccaattaatacttttaaataaaagaaaaatgacattttttatttaaaaagcatctttaatagctatatattagctcatgtttataaaattaagggatgaacataaaaatgtaattttttttcactaaaatagcattttatgtgaattctcttaaaactaaactccaaaagtagtgcatatatgtggtttaaatttgatacatattaaaattggtgccaaatttggcacaaaaatataacatgtgtctaattttacactataataaatattattttttttatttactctattgccactcactaatacaattaataacttttggataaaacctgagggaatgagcgttgggttgcacctattacaaatcagattaaggccaatgttgatggcgcgttgtttgagcaaaagtctcgatttggagttggctgcgttgcccgtgatcattgtgggcaaatgattgaagctttcaccattagcaagtcgggtcgtgttcaactggaggttgctgaaattattagcattaaggagctttaagttgggttgctcaacactcctgggggcatgtgattattgagactgatagcttggtttgcgtccaagccattaaaagtaatatgtctatgccttcttaatttagccttttagttcaagatgttcttaatttacttttgtcgtacaatcatattgagttgtgttttattaaacgatctgtaaatagagtagctcattgttttgcaaggggttcttatttctcaacaagtcgtgtgcttcaagtagaagattgttccactgaagtacaatctattgtaatgaaagattttatttgttaatgaaagttactgatttttattcaaaaatatatatatatatctacaattaataattttttatatgtttaaggtggtttttatatattttcaataaaaatttaatattttagttatttttttaaaatatttttattaaaataaagtttattttacccttaatatgttggagcacaattatataattaaaccaaatataatattagcttattctttttagccaaatctaaaatttatactattagagatggtctaaacaatttatttatcacgtaataataaaaagaaaaatgatgttaataataatatgtatatgtaatttgtaatatgtgtttcgtataataactctaatagaaattatataaaattttaaaagtaaatagtattttggacctaaaagtcattgattaaattttttattt

SEQ ID NO: 234793 - DNA, 648 bp, Cannabis indica
taattttatttaatttcaaaggaattttaaaaataattaagttttagataataatattcggtatactaatataaacgtgtcacgtgtcacatgtacaagagtatgcacataaacaatctatatggtgtcatttaatcggatgacaccttatatttgatactggtttagaagttttgagggttttaccgtcaaaatttaagatttgagagttatatacaagtaaaatgatgagagggtgtagcggtcaaaaattattattttttatatgatgttctatatagtagttgtaataggcattctttctctttttgagaagtttagaatattttatggtgtaaaaataaaatttaatataatatgtggcaagcgtgtgtaacataaaaattacacgcatccaactgaatgcatgaataattgttggatttttttgaaaatggttagatgcctaatatatttgtaaatatactatcatatgaaaaaataaataaatttataatttcttatatgtgaaaaacaaggaatacccttaaggtaaggtaagagaataactgatgctttcaccaaataattttttttatatatataagctagctagtggcaaataacttctgtgaagtgttgcaacgttttttcttttattttttcttt

SEQ ID NO: 234794 - DNA, 1342 bp, Cannabis indica
ataactatggtagaaatggtactcttttatacttgtggatacattttttgtaattaaaatgatgatcatgttcattataaccaaaataattttaaaaaattaagtgttttggtgtcaatctaaaatttgggatacttattagttttcttgtttaataatatgaattttgaatgaatataataaagatatacatacacatacacatacacgcataaacatgtagggcaccacactataataatgcatactttttatactttaccgcggtaaatggtacactttttatacttgtggatcaattttttttaatatgatagatgttcattaaaccaaaatcatttcaaacttttgatattgtcacatgaataaagattattttatattatatttttagtattttaagctattcaaattttgttgaaaccatagagaatgttcagtataattacaatacatatcggcatataaaaatgctaattaataacttactctagtgtgtaaaaatgtgtgattcatggaagtaaacgaaaagtagtattagtgtaatcttacccttttgtgtacaccattatatatagccttatgatttttttatgtatatatatattaaagtgttagttgtaaggtgttgagtttgttacaaattctgttattagttaaagtagtttgttaggtattatgttagtttgctgttgctgaagtgtgtgtgtatataaagtgttgtacctcctctgtttcattctaatgaagtgagcattcattcatttacaattctttttttctttctcttctgaaactaaaatggtatcagagtcaaccgattgttgagctcttcttcctcttcgcttctcttcttcttctttgtttcctctacttctccatggctcgaggaggaggaactcaaactcgaagtaacaagaacaatggagttgcagctggttctaatcgattttcttccttggatgaaagcaataagcttcctactaccgatccacgaagtccttattttttgtccaatggcgataatgcatcttcttcgttggttcctaaaattatcactgatgctgagaattatagctcctggggtagatctatgatggttgctttaatggtgagaaacaagataaaattcatcaatggtgaattaccagaacctgacgatgaagattacgagtcatggattagatgcaacagcgttgttatatcgtggatcctcaactctgtatctcccaccattgctgatagcatcatgtacatggaaaatgcataacaaatctggtgtgaattacaagaaaggttccattagaagattgctccaggaatttttgaagttaaaagaagt

SEQ ID NO: 234795 - DNA, 873 bp, Cannabis indica
agatcctggtaaaataaaattccaacaaaagcttcaattatgaaattgttgttgtgcagcttctctacttcttctttagagctagcgctcgctccttgtccaacagtcttcgcttttgttgaactggccggaagtttggatcaatatttaggacatgtgaaattacagaaggatcaatcctgaccatatcctcatgtgactaggcgaaaatgtcaaggtttgctctcagatattttatcgatgctaattttacttcgagcaacaaacctttttaaattttaatttttcgggtttgaatattcaggtcgatttcaatctcttctaattcttccattggtccaacattgctgcttgggtccccaagtcgagggtccacatcttcatccccgccttgggaggttccctacttagtaatgttttttcccttgtccgaactctggcgagtggatacttctttttaagccttggtaatggcaaggttataacattccccagtagcctcctggtttcctcttaggcaccccaccccattctttgttgggaacttaaggcatgaatgaaatattgacgtaacagcctttaagttatataaagctggtcgacctaacatgacattgaatgctgatggaactgcccaacagtgagggctaggaaaattttccttagaggtgtgacaccttggccggagaaaccataattgagctagagccccattttgtcatacggtgtcttgaataagatgttggaagaggctccattgtctatcatggttcgggccaccatcttgtttgctatctggacttccacgaccaatgggttgttgtgcaggaaattgatattgatagcatcatcatcattaaatgttatggtggg

SEQ ID NO: 234796 - DNA, 969 bp, Cannabis indica
agatcctggtaaaataaattccaacagttgttactcgagctaaaaacttgaaaaacaagaaaaagaaatttccagactcccctacgcctaacactaaggcagtaggaaaggaggaaaaatgggggaaaaagatcgaacaatggcagtaacacaggctaacatctctagcggaaagaaagctagaactggagagagatcctacaaagagtatgagcctagattcacctcctattctattctcttagccctaaaagaagaaatctatctggcaacttagtcaatagtgccatacagaaagcctcttccctttaaagagctaaggaaaaaagacatgaacaagttctgtcgctaccataacaattacagccatgacaccaatgagtataatcagttgcaggatgagatagaattttaatttgtcaaaagtgtgctaccctccagtgccatgtgaggcttgaggaacctacaggaagcaacgctcctctctaacccgcagcagtggcaagtcagttcaatatggtagttggaggtccatatcttgttggtaactcgagaagagcactagagaggttagtcagatctttgtgccacgagccaaaataaaaaatgttagaggttgcaaagcatcctctaaactatctatatttcgagtgtgatccaattacatttgaggaatttgactcagaccacatccactaccctcgcaatgatcatctcgttgttgaggttcaaatagccaacatgatggtggctagagtgatgatcgaaaacagagcatcgtcaaacatactttttcaggaaaatattggagagaatgggtttgtctttaaaaaacctagagccatgtgaccaactcacatatggtttcagcggagatggaatcattccctatggtaagattaaattaccaaagattgttggtactaccccaaggaaaaacaccattatggaaactttcataatggtcga

SEQ ID NO: 234797 - DNA, 1305 bp, Cannabis indica
gagaataatgatcgggtcagatgcgctatttacatgctgcgtgaggatgcccacatttggttggaaattgaatcagagggtcatgatttgaataacatgacatgtgaggcttttcaaactttgttctatgagaagtactacaacaaatttattcgagctgctaaagcaaaagaatttatacggctaacctagggtaatgtggcagagatagagtatgccaccgaatttgattggttagcaaagattggtttagatgaaatggccactgatgctgctagagaggccaagtttattcgaggattataagaacatattgcttgagatttaattctagttgccaaacaaccaagggttgtccacatttatgctcaagtagttgacctaccccttgttgctgagtgtactgaagatcaaattcgaaagagaaacagtatgagaagagattcatggaagcaaacatctagtgttggtttcggtaagggtgttgaccctaacaatcttaagaaacaacctaatgatccgtcaactacgaaaccaaataagagattccaaggtcaccaaggtttctgacaaggtggaaacaaaaatttgcaaacctatacagagtgcacgaggtgtaagagatgctataagggaaaaatgttaaacttgagcgtgggtgggccatctaaaaagaaattactctcggttacagcgaccgtaatagaaggaaaaaaaaggacactttagttcctgcttgggtgtttgctttgcccaagcagaggctgatgctggttcttctaccgtgataagttagttttttattgatggtacattgatgagtgtttttaattgactctggtgtaatgaattcatatgtgtcgagtatagcgattgaaaatatgcttaaacctagagatgctttaccaagagcttttggtacgttactgcctactagagaatttgttatctccagcaggtgggtcaggtcccttctagtgtttgttgagggaagggaattcttagttgatttaattgaactgaactcaaaggattttgatgttatactgggaatggactggcttgaaaagtattatgtaaccatcgattgtaagagaaagatggtaacttttgaaccagaaggataggaccctttcgtgttcgtgggcaaggttcaaggatctcgaattccattaatctcgacgcataaggtaagagattttttttaggatggatgtgtcagtttcctagcaagtgtagtggatattacgaaagaaaaaccaatgggaccggaacacgttacagtagttcgagagttctagatgt

SEQ ID NO: 234798 - DNA, 842 bp, Cannabis indica
cgcatctccgcctccagcggctgatcagagtcaaaaatgacagccaaggcctttaacactgatccctccgagatagacgccacaatcccagccgcagcgcgcaagtccttgtacgttgcatcgaccagcagcaccagttttccagagtaaatatttgacgaactcagctgcacaacaccaggggccctcggcaattcccaaacagtctgaagagtagcagtggcatggttcaccttagcaagaactccctgccaagaggggttagtgtgttcatggaaagcacaattacgagcagtccccagagcatcaaacaaacagataccaaatctaacaaattcaccataatcgttatcctcagctccctgtagaaaatctggggagagaagccattccaccatgtttctaggagagtcaaaacagagattctcacttctaagggaccatcggctagcaaaccaaacagctttagcaataggacatttaaaaaacagatgataggccgaatcctcctccacaccacagagaacacatctagcttcattaccaaaaatcctttggagtcgacttccgaaggggattatatctctgcaaagtttccataggaacattctcagacgctccgtgatctgaagtttccaaatccgagaccaaagctgatcagactccccccaacgacccttgattatagacttatatgccgctctcagagacgaataccccatttatagcgtctttccacactaggagatcatcttgggttgtaggaagctgccctattaagttcagagaactggccacactagggacaaccatctatggaccaatcgagatatccactcccc

SEQ ID NO: 234799 - DNA, 880 bp, Cannabis indica
attggaacccatggttatggacccgaatccatagtctttcaaaggctcgccttgtctttgctttgtctcgacaaagtcctctagttgtgaaggtatttatcttgaggaagagaactgagcgtagaactctcgggagaactcatccaaagagttaaatcttcccgaggccagcttaaaataccactgttaggctatttcagatagggttgcctgaaagatcccatagcacacatataaaatactatgagatccaagtaatgggccatggcaagttgacctttggccaagtaatgggccatggccatccagcctttgtccaagtaatgggccatgaccaaccatgaccgacgagattctcctggtcggccatgctggtctgcaggttaatggacggttgattgtaatgccctaacatatagaatgcaacctaacgcgactaaacataaactaatcccgctaatccgagatgtactagagccaagagaagaaattaaactttaaaacatagaacaaaataataacttgtaataatgaaactttatgataaatccaaaaagagtacatttcattttcggattccatagaacattttcaaaacattacaagtcattagtacacaccaacctatgcgacaaaagtggagatttacaactattcccctggcagacccaaccctcgcggtctagcttggcctgaatatgttcaatgcaccgtaaaagccctcgatctcatggatgctgaactactaacttactatttcgtgcataatagagcacccgtgagccaagacccagaaagacagtataaacaatgatatgaataacaattataatcccttaagtgttgatgccaccgcatctattgtctacttgacatagac

SEQ ID NO: 234800 - DNA, 723 bp, Cannabis indica
gcaactcagggcatcagtttagtatgcaatttcatccataactccacctggagggaggaccttgtccaccaatggttccaactagaagacgccagaagaattttgaatatcaccttaccaaaccacccagtggaagactcttggttgtggacacccgaaagcaatggcaaattcactatccgctcagcctaccgaaccataaaaaaccttgatcaaagaatcattggtaatgaaaaatggcgaattttatggggggctaagatgcacccgagactgaaaatgctttggtggagaatactctcaaattgcctattaacccgaggtaaacttcaactttttgctggtattaatgatcccaattgtcctctttgttctatggtaatagaagactcgttgcatatcttttggaattgccatttggctcgttccttgtggtttggctgctgttggagtattaggacttcctcattcaacttctccaattgggaggattggataaattggttcaaaatctccgataacagaccaaaagagaccagccttcatgcattccttgagggggctgcaataattttcgaaaaaatttggagcgaaagaaacaaggtaggtcaccatcgtcaaagcacgcccacgaagataatccttcagctgatcgataatcggcttcaggaggcttttcagacccttcaaagtggctcagctccgatgaggcagtggctgcct

SEQ ID NO: 234801 - DNA, 1698 bp, Cannabis indica
atagatttatgatttagggttttctatattacaacagttttaggaatatatctagatctgtgatatttatatttcttgagtgttttataaatcctaacaagtggtaccagagccaccttttgctaaatagattaaagatctgatgattttgtttatgaaatttgctaaataaatgtacattagtaaaattagtagaaattagatttataccttaatagacgttgagatacaatattttctccactaaaaatggtggtcggaggtataaccactaccttatacttttggtttaccctaaaattaaaaatgagaaaaatgtgatcttttcagggatatagttttaggaatgaaaaatagatgatttagaaataaaaatgagcaaaaatggtaaaaaaaaaaatggtgaaatgggggtaattttctatagtggttggcggagagggtttggggtttctctggttgggggagtttttgggttggctgatcgaatgaggaagacaaagggctgggctaggattataaacccttttagcgtcggtaataaccaacgacatagggggcacaccctatggcatcagttatgtccaaataaccgacgccataagtggcgtaaaatttccttctaaaaatttccaaccctatgccgtctgttatttattattatgctgaaaaaaaaaggctttttgtagtagtgagcgttactaagttaagtcatagaatccgaaataataggttacactcacaaagtaatgtccctgcctttgccattaggggacataatttgaccacacacttattccccactaaaatttatgaccccctttcattaaaatagagcatttctggtcgcgaccacaattactcccgaccaaaaacggtctcgtcgggaccgtaattcaatattttgctttgatatctctcagtaaaatgtacataactttcacataataactccaaatgagttgattaatgatgcattggaaagctaaaaaagatatctaaaacttttatgcttcgaattttttcaaaatctgaacagtacatagttcaatttaggcttcaggttttagctatattttcttacaaagttttctaaaatttgaccaatttttacattccaagtgttaaaactaaaaccaaagaaaacaagattaattctatttcaaaaagtgaccatgatgaagaaaattaactctaaaaatgatttgacgaagaggctaaaaatagcctaacaagggtctttgttgttcgtttttatttttattgttagttttctaaaatgttggaaatattggcggtcttctacatatttattctcggtaataccaatatttacgggtatagagttaaaaagtataagaattattttttctaaaaatccatcataatattataaaattatgatcaacttgggaggtaaatattttccctcaaaaccccaatataattatgcatagattttagttctagatatggaagtgctatcaagggagtacattgcgtcacctcatactgaaagaccatatatattgcaccacctcctattgaaggagcacattgcaccacctcctagtgaaagagcatattgtaccacctcctattgaaggagtacatgttgggttttgtgccctaaataaaacccatttcaatataatcagatctacttattaataaagatcagaaataacattttatgtt

SEQ ID NO: 234802 - DNA, 805 bp, Cannabis indica
tcagattcaaggaataatccaatctagtttccagcctgtagaacaactttctctgttttgaacccaggttgtaagtcgtgtatctggacccacaaatcaagatgttgatcggtttagttattgggttatctcctggctttaatctctcaataagcaattgtttacgatcgtaagtccaagggctaccagtgataactctgtcaatgtaaatttcatggtagaattggaataaaaatcgattttgttcaagtatttttacatacatccctttccctagtttccacaaatcaacaatgatattttggaaaacttgataatctgaaatctttccagaaagaagcctcccaataaggcaccaccgatcatcatactctacctcattcagttcctcttcttccaattttgtaacaaagtcttccttttcatctaagcaatttgaccattttttctccacatccttcataattccactgcttgaagccatggtgatcaataagcaacaacaatccaacatgttaatcacgaacactcagaaacaaaaggccaacaaaatcagatcctcacaaacatatggaaactctcaatcacagagagaccgcacacatgtcaaaagacatgactaaagattgtatttttaaccttaaaaaagaaaaaagattgaaactttttgtacataatttttttagtaagtatatcaaacgtcacttagaaaagaaatgaataaaaaatattaaaagaaaaaaataataaagaaaaaagaatcataaattaataggatactgaatttcaaaataataaataataa

SEQ ID NO: 234803 - DNA, 1219 bp, Cannabis indica
ttttataattaaatatatagtgaggactaattgtataattcaattagtgaaaagcccaaaaagctattctcacttattatataggttatagatatattatgttgcacattttattttgaagacatcgataactaatttcataattgtagaattcattctatatattaatttttatctacttttattatatttagatatattaataaatttcaaaaaatagtatttattaaattttacttattgtttatttatatttatttttgaagaactataatttacaattacttattcacgagtttaattcatgttcaagagttttatttttttttttctttccaaagatcaaatttcccctcattctccttatgctatttgaaatttaatttttattaatctactaataaatattgtttgattttgtttatttgatttgtgaaaaaaataaatgagttaaccaaatttataagaaaataaaattatttttctaaattataatagaattaacttaaaatatctctatattttaaatttttataataaatatcatttataaatatctaatttaatctatacatacgaaatataaatttgaaattaaataattaatccactctattttgtgcgagaattttttatttttctattatttttcattataatagttgaatgtatctttttgtttgctttcatttttagataaaaaatgttatgattatttttttttataataataatattattttttttatataaaaaactagaataattacttttattattaaaaaattatataaaaaatgattaaacatattggaaaagatattaattaataataacgtgagataccacaataatatctactttaaatatagtgatggctacaaagtgatcagatatggtgataacaattattttaaaattttagatttattgtctttttttttttagtttttgttttagatctttctattttgtgtgagaattattccgtttttattttttttttttattataatgtacatttgaatatttttttttttttagtgtgtttctttttttatataagaaattacatgatgattgttttttaagaattctttagagtttttttatatagatttattattattttttaaaaaatatatatttttaaattatacataaaattaattaaaattattttacacgattttattgtttaattaatattcatacctac

SEQ ID NO: 234804 - DNA, 1526 bp, Cannabis indica
ggtttgggtctaggttcaagttcggggtttgggtctgggtttaggttcgagatccagggttggggtctaaggtgcaggttcaggttcgggtctaggtctagggtctggggtttggctctgggtctgagtttaggtccggggtctgcgtctgggtccaggtccagggtttgaggtccgtgttcagggtccggctgtctggctccaggttcaggtccagtattcaggtctgagaataggttcgggttcgactctagatccgcgtttggagtctagggctggagtcttggctagagttgaccctagaccctttgtaaataatataatacaaactaacacaagtcctttgtatgtattaaatattacgactcacattatattaaaatttatggtcataataattataacaatacaatattttatctaaatatattattatttgttatttaatacaatacgactcttatacgatttataagcgcatataatataatatagtagaactcatattttcacaatcatttcaaaatatagggtagacctaacaagcacatacatatttacggctatgctctcattccaaacatttaacataacacaacgtacatatggttcagataatttcaactatagataaagcgaacacttataagttggtggtcctcatgaaaaacacaattttggatagaagaacatcccaccataatctttccaaaaaaagagagcgaaacaaataataaagagaaatcgatcgtgtaggtttttggtgtaaaagtgtgtgaacatacatgcacatactcattctttatactagtacatcattttatatagggacaataaataataatttatttcaagtatctggcttttataagcgatcgatattatagtttgagattagctgtgtattatgattttgaatatgactcatactttcataaataattaaatatgtataaaattatcatatatatggtattagtatacttaaaagaaaaagaaataagctactttcggctgcttgaaaaacaagaaacattaattagactatggtgcctccaaaataaagagcatctaaacctataattgtatggtgcttagagtatttgttataagatagtttgaatttggtttgttgctttaattaatatttgtttgggaagtggttgtagttgcttaaattaaatatttgcgcgtatttacaaattattatatagttaatgacattgtcttttgtcaacatgaagacagagagaaaagaaaaactcttatctaaattttcaatcaattatatctatgtccattacctttaatttctttattttggttttcctatttttctggaaactttttagttttgaatataaatatgagaattaggttaccaaatatttgttagatgaaaatgtctttctaaaagcatatgtttagcaaaaaataaatataactaatttattataagaagtttagctcggttagactgttaccagttaaaaagttcaattaatacagagaaaataacatgttga

SEQ ID NO: 234805 - DNA, 978 bp, Cannabis indica
atgcgtgtacccccaaatgtacgaacactatagtacacacgaacaacacgtgcaaaccatctataaatatcgcgtggtctccaagcgtacggaccatcctcgccccaagggctgggcatcaatctgtgggcccaaagttaacgtattttatgtatttactccattagcaggtcatgttttcatgcaaaccctagcgggtcacatatatacctgaactcgaatcctagtctagaaatactacattatacccttatgcaaaaggttagaaatttattgtgtaaacactatagcaaaaaactagggttcataagcttttaagaactctactgtaatacatcaaggctacttagccaaatacaattgaatcgtggactagggttcattaatacctaaaccacgtaaaaatctctatctctactttctattgctttatttaatttctcaactcttattataattgacttctaaaaatcttgataaatattttggtactttcattgagatttgaagaaatatttgaaagcaagttgtgcctataacaatggtggctaccagaaaaaccaacatcgtacaacttactgcccagggccaagacgctgtcatggacgacgtcaacccgtctcccacagtacatgcccaactgggcactgcagaggacggaaaaacgtatgaaggttatggtcgtttgaccaatacaacccaatgtcaagaataatatgtcaatgagaaccccatcgacaaagacaagatgaaggaagaccccaaatgtgaaaatgatgacgagattaaatatgggtattgtaaagatggatattattatgaacaagatcttgaagtactctgggtggctgatgagcctgctgaaaacgcaagaaaacctgacaagcgatgccataaaagaggtctctgaagaaaatgctctggcagagcctgtccacgaggagaataacctcacaaaaaaggtaaatcctactaatg

SEQ ID NO: 234806 - DNA, 733 bp, Cannabis indica
aatattttttagtgtaattttggtgttgtggttggagtgaagatagtttttaacatcaaatttggtgatagtgtgacactaaatttaatgagctccttggagatgctctaaaatcatgtatgttgattaatttggccatttgcaatgcaacactgcaatttgcagcttttgactgccatgttgatatataatcctcatgcatgcaaaagaagatggaaccattgttcacattatgaaattcaaatgtaaagtgtggagtagactatatattctacaaacttatatttctcgtgatcaattattgtctttttctttaatgaaatgatattaataataaatgaaaattgttttgctatttattggtaaggaaaaataatatgtttttttttttttttagtagaaagggagcccgctaagaagaaagaaaatccactagattgcaggggtcatcgcctatccaaattgcaacttcgtctaaccctgaagcccatctcgccaatttatcagccaaagaatttgcattgcgattgatgtgagatattcgagctgctgggaataaagacaaagtttccttaatttgcagaatgagatctccaaaaactgacaaatcttacttgtgatggtagagtgcatcagttatggatttgcagtccatttctatgacctgaaccaggaaatgctcgtcaatgcaccagcgcagtatagagagtagagactttgcttctaaggtggc

SEQ ID NO: 234807 - DNA, 1227 bp, Cannabis indica
acatgaaacactaatcaagtttctactaaaatttagaataaacaaaacattgtctaaaactaaaaattttttctgaaacttgaggcgggcttttcctttagcttggaccgatattaattcgccatttttaactttgagcttcaactcccctggatttaaataatcccaagtgtcaagcagctgcaatgaagaacaaacatggttagtagatccagaatcaacaatctagaaggatttgttattctctaaaacacatgctgtaaagtcaatgcgtctgaccctcacgtggcccgacacgccaccttgcccagcgctgaacaggatccacccatgcaggatgagggggatcatgaaggggacactaaggtccaggagatagaagaacagggcgatgtccgtcctggtagtccttccgaggcggaggaagaggagaaggctgcacccccaaactttgggggatacaatgaggctggggagccggtagactcgggtggcgacgtcctggttgagggcgtggattacgtcactgaggatcttactgcagcagttcctcaaaggaggcaaagtgccttgggtgctaggtgggtgagccctccgtccaaggtcactaaggcacgtttacgggatctcgaccaggttggctatctgggtgagctagactgttatgttcccgcctcaaacaatcgagcctcaaacccttagagggggatgtgcgactggtctggtgctcacgctaaacaaggggcactgctgcctttgcacccatactttaggaaggtggcagacttcttccatctctgtccgaccaaattcactcccaagggcatcaagtacatgtctgccatattcattctctacgccacccaaaagtgggatatgccttctccccatgaggttagctggtttttcgattagaagtcaactcccaagcaaggcaggtcaggatacttctacgtttctcagccagacttcaagtggttgacaggcaccagggacaaggccgtcagcaaaattgggaattttgttgacgagtactacatggtggatggcatgggaaaaaacttatactcggttccagcagattcctgtatatcagcgtccacccctcacgctcgctctcagggatagagctcaaagtactcactcagctgtccggtgttgcacagaatatcactttgttgacctcagaagacaacttgtggagtacgggctctacccgaaggattt

SEQ ID NO: 234808 - DNA, 1424 bp, Cannabis indica
ttttctgggaaaccatgtcattatttcctattgttctctttttcttaatttcgttgtgtttccttgatccgtgtcagtcgacaatccctactggatcacatcactgttcaactagcacctcgcgcagcagatgaaatttggtttggggaggatcaggtatgaaaacctgtaacatttaatcaatggactgaacaataaatagaaaatatggaataaaattaacaagaccttttctctttgtatgccaagattgtgatagtttgctgtgagcagatttatatggttagtatctgttatgtgatccaatttattgatgtctctgatattcagttgagcacaatatgggctgaaacggctgacaatgctcgttcagcagcgagaacttttgttcttggtggtctttctgacaaacatcatggtgtatctaactcatgggttgcagatcgaatcaacgtaattgaactccttattttccttctattagaagcagatttcaagtttctatttagttattaatgtactaaataagttgcacttttcatataaatttgcaggatcttgataccgaggcattgaaaattgtcaacatgtgttatgaacgtgcaaaagaggtatctatacatgaagattcactcattttatggggaaatatctcttttgaatactgattgatattaactaagataacattgtcttccaccatatcagattctgaaccaaaacagaaagctcatggaggctttggtggatgaactagttgagaagaaaagtttgacgaaacaggatttcgtgcgcctagtagagttgtatggctgcctcaaacctctgccgccaagtatacttgatctcaggatcgctaagcgtaaccagtaccaagatcttataatgaaccagaaggatggctgatccttagtttctaactgaagtgggcctcggaaaacgacgtaaatcttaggcattttgggggtgctttcatttatttttttttatataaataatgtatttatatatatacatttatgggaaatcgtagtcaaaattttgacaatttttttaaagaaatatatatttcattctttttacccccgttgttccagcaactgatttatacttgtttctctatcctgaattctgttgtgtactactggtatcttcattcagttggtttgtttgactacaaacagaacatagtgattagaagtcatacatagtgataataattatatttaatttttttttttgagtactatatttaagaaatcttacctcgaaaaaaataccttaaaatttatcttattcgaaaaataaataagataaaatcttcaagggagtttctattatttttattttgataaatattattattattatttaagtagctaagtaaataggggtcctgagttccagcatgatatatcgtctcc

SEQ ID NO: 234809 - DNA, 1127 bp, Cannabis indica
tggttagagaaagaaagcacaccaaagaggagggttctctcccatctaagaaatttcattaagggcatccttagtcaatctatgaatcgcattataaaattatgatatgactaacataagagagagataccctaggaaaactagataataaaaccttaatgtctaaaaataaaacacattgggcccatcttagtcctaccaataaagcaagaacttctgcaaaatcatcaaaaatagataaaactagtaatttctttaaaagatattaaaataagtaatttagaatttatgccatgtataagtttaagaaataataaattttaaaaataaatcgtaataaaaacttatgtcatattgaaactccttgatccttgaataaacaagtgagtgaagtaaaaaaaccacatataaaaatatatgaaattcaataatgtcacattctattgaatgaaaatatgaatttaagttctagtgcttgaaaaacattctagattataattgtagtaaataaaaaacttattttagaaatcccttaaactgagagtgtcactgctaccgcacattatttttaagacgagcccaaaaatactttaaacgtcaaactaccatttatgacaaccaccatacatagtacctaacaaatcatagtgacacataaataaactaccacaatccatacaacataatacacaacaactatgtaaaaaataaaataaataatttttatttatcatatgtaaaaataaaataaataaattttatccttgattaaataatttttggtcaaaacacatattatcatatgtttttttatcaaattcaaattgcctcacttatgaaaatctacaatccatcattttaatatggataatttggattttttccacttaaattttgatatatacaaatcatgctttttgaacttttcaggtcgttaaaaattctcctcgaactattaagatttttgaatttaagaatttttgtctaattttactaaaaaaatctgatgtggatgaaaatttagaggtcacaattcggtacatgttaaagttcaggaacaataattttgtaaatattaaaattcaggggtacaatgtagttagcggtgaacaaaatatgggccaaac

SEQ ID NO: 234810 - DNA, 2449 bp, Cannabis indica
ggttgaagaagatagcccgattgctccgatgggctccatatagggcctgatgggtctgatattgtcttgttgctatcggacctatcaggccctatatcggacccagtcagtcagtattttttggaaaaattgattggccatcagactagtcatcaggccctatatcaggcctttgtcttcaacccaaatccaattttttcatcactatgcatcgggcttacatcggggatgcattggacccgcatcaggcctgcctagaaaatgcattttctaacccagaaattacagattcaaatctaaccctaaatctaatccaaaacgctcatatcagaccctaaatctatcaataaataatattttaaccctaaatcaataagaaaaacattcaaaatacaatagagggaaatcgtcattggtggttgttcgtcttcgtggtgggtggagtgggtcttcgtcctcagatggtgggtcgagtggtgctcaggtggtgggttcggtgggttcgacagagatcgagagaaagagagaaaagggaggaagagagtttttggaatgagaagggtaaaatagagttttagtaaaaattaacctatttaacaaattttgaatagtattgaattagtggaccaattttaaatcaattaatgcataaaaaaaaaatacaaatttcccttctaaaatcttcatacatcccatagtaatatctaatctatataatttacttgttctctaccaaaaccaaagtacttatttcacacaaatcccgagccacgtggtacaataagattggtcgtatcatcatcatcgtattcagggataatatatataaaataaaataaagaacgaatcccgaaatagttatttaaataagatgatcataataataaaaaaaacaaatgaaaaaaatgaattcaaaggaagaatcagatgatgatcaaaagaaagaaagagagaaacctgaattggaattggtagagttttcagtaatgaaatcaaacagagaaagccaaagcgttcgaaggaaataaaccttactgatttgtcacaatcataactatctcgctctctctatatatacactctctcactcttacacacgtggcagtgtaatgtatgcccacgcagataaattggaaaaaaattagggcttctctttcttaaatttatagctacgttccgtttaggtctgcctagatttaggtgtagcttggtcgaagttgtatttttctattgcgatttaatttttgcaactgacatagttttaaatgtttcggtcttatctctgtgacgttgttttgagtattttagttttgtttagatgatatggttttgttttatttttttttgtttcgttgttgctttttctttgttttttgatgattcgccatcaaatcgttgtttgtggttaggaataacaagctctttacgattgaaggagttattaatagtgcagttacgtaccttgcatgatagttgagtgttcaagttacgaggttgaatgaaactgctgcaacaatttttactgttgcgtcttctgagcggtaaatgaaattaaatatagatgttcttaaggttgattgtgatgctgcaatatttttcatatgattttattttagttttttttttcaataaatttgggaatcagacgtctgattatatgactcatttttttagagcccaagtcaaagaattttcgaacgaatgtgagaggatcaaaaggagactcgagcaaaaatacaagtttcctatatcgaaagcgaaagaaccctttacctaggcctaggtcaaggaatcagaaaccaactctagagtgaaaccatttgttgactctcgagcttctcgcaaacacacatcgatgcgatgtaaaacacattacatctgacctgagatgttttgaatagatgtatgctattattttaaaaaatgctaaggggtcgggacaccttatagtgcttggtactaggggtgtacgtcggtcggtttggtcgggttatatcatatttttattaacccaatataaatatcgggttgaaaaaatttaatcgtaacccgcccaatgaaaatttagaaaaagttcaacccgcccaatgattttgtcggtttagtcgggttaacccgtccaaaccgttcttcattttttttataattattattgttagtttctagaattcaagtaaattgggcagtttagaataatgtgtaaaccacccaatatattcattgggcggtttggattttcattgtattatttcgggttgtattttttgtcggtttattcggtttggtttgggcggtttattcaggatggacggtttgtaaattttattgaacacccctactatacaaattaatatcgagttcttcataatttgatcgttacatattgatatggtaatggacactattattttaacttattgctattaataatattacatgatttattaaa

SEQ ID NO: 234811 - DNA, 1706 bp, Cannabis indica
ctaacttagactgtttgatacaattttttgaaaaattaaaagttatttaaaaaaatctataataaaaatgtatctagtaagtatttaaaaaaaaaaatatcttattaaaaaatttatagaaaagttacaactaaaaattaaagctggtacaacttaatttttttaaaaaaattgttttgactaaaagactataataaattattttatactaaaaacatatttaattttctttttgaataaatatttaattatttattacatactacaaaaataaataaataatatttaaatttcttataatttattttgttttgaaaaatatttatatttatattataattattaataaatcacaacaacctagagtttttataaaccacaattttttacaaattataaaaatatttgaaaaatattataaattatttttataaaatatatataaatttatactacggaaaaaaataattaaaaatatataaaaaaataataaaaattttatataacataattttttatatatttgtaattataataaactagattataacattatcattattataataaaatcttaaaaactcgtagcaatttaccgaatactcagcttaacttttttctacagttctgtttttttttttcacaacacggtcacaactgttttttcttaaagaacaattatactaaattagcccttaataatgaaaagaattattaattattaaaaaaatatatattaaaaattatgacaaatttgtcaatactaataaaaaatatgataaatttgtcaatactattttttcttggaatgaaaatagaggctaaaatcggccactacaacgttcttgatagcaagagaaatagtgctattagaaaaatgacaatttgaccataaacaccccttgcgagtaagacagtaaataatatcattagcagatcatttgataaaataaacttaaacatcgataatagaatttaataaagatttgcaatcgtcaataagaatattaaaaataaaagagaaagaaaataaattttgaatcgcttgaaccaccaaaagagaattataccctaggcttcctgttgaatccaactaagtgcttctttaaaagccaacaacttcagcaacagaaagaagaacacttccataccaaaactgagtgaaagctcttaacacacgatctagctttataagtttgattgctttaaatatagctccattaatgttaattttgattttattaaatgtccatttagtccattgtcaatactacttaattatatgtattgctaaagtaaaatttaattgtcaaaaattaataaaacttgaaatacatatattttggatcaaatatagttcatgttatattttgtatcaaatttttttagaaatttgaccataaacattgtgcaccatattaagaccttcatttttgaatcaaaatatacatggtaaaaaatggtaatacactacttataaaacattctattgataatgttgttatatattttttaaaaatttaggatgtcataggaaaatcaccttgacatgtttatttgatcaataatattatatggtaatatataattgaatgcatttgcgatttttcattacactctttaattctcaattaaattaaataattatgaaatatatattataatttattcctcacaatatattttttttaatatttataattgtt

SEQ ID NO: 234812 - DNA, 1522 bp, Cannabis indica
cttggattattaccaagttctgctgaaagataatcaccgttggagaagtatttcgctttataaacacggcccacaagagattatgtgttacacaacagagccaaccttgtttagcaagcatgtcaagattaaaatcatggagatgtctaaagcccattccgccttgatctttaggagttgctaaacaatcccaagacatccagataatgccgctgcctgtagttgtttttgtcttccaccaaaaactagctataagtttctcaagttcgttacaagtaccgaggggtagaaggaatacactcattgcataagtaggcagcaattgaatgactgttttcaagagaatttctttaactgcttgtgatagaaacttaccatcccaactatgtattcaagcggtgattttgctcttgatgaagccaagcactacgtttttattgcgaccaatagtgttgggaataattagtgcaattaaatattaaattacatatattttaatttaataattattattaaatatcactaattttttgcaaaacgtcacctcgattcgtaatagcatttttcctagatggcgttaaacttatgtttgagctaatatttttgcaatttagggaaaaaaaaaaacaaataataccaagatcgtgtttgatataactttggcttataattaactctttaatttagaggaagaaaaactcatatattcttaatttcttttaaaaaatcttttgttttaataaaaagaataaaacattcttaaattaataacaaaaattagacttaaggtcgttacataaaatattcatagatatagaagatacatctaccatactaaaatagttataggaaaatgcctacccaaccacattatagatcgcaaaattacaagtccaaattattttagaaaacatacaacaatgaaagaggaggaaattcatttacaatgacaagtgtagttatcaatctcctaactagacctcatcccattcagagtgtcgataaccacagtaaaatcactttccacgatcacaaacatacaacttttatccgctgcaatatttaaggccgaacaacaagtcgctgcctcaccacatatggggccggagaagcacaacctcttggaagccacccaaaccaaattgtcaaaaaaatcgttttaacttttaccgaatcttaaaataataataataaaagttcattttttttcgcatttttgcgaaaattcacatagcactccacataataatcaatagagcaacctgaatgaccattcaaatctatataacaatccacataccaaccagtaccatcagagcaacccaaatcataaaaataaatataaaaattaaaaattgtatatgggtggttcccctaaaaaaagagtaaataatacttgtgtgtaaataaaagttactaagtgggctctctattttgttaaatgacaaaatgacctctgtattttctaatatggtacaaatatgatcgtgagctgatttttgtcaaaaataaaatttaataa

SEQ ID NO: 234813 - DNA, 2031 bp, Cannabis indica
atttggcctataattggccaatttttcccgaatggttttcaatttagtgaagtatatactgatagtttgtgcttcctgtctcaaattcattaggttctttctaagattataaatgtaaggaccatttctttgttgaaaccaaacctttagatcattccatatattggcagtagattcatcatatagaatactagaagaaatctctttggatacagaattcaatatccaagaaatgacaatattattattcctcacccaagcattatacaaggtataatctaagatcattggtttaggaatagttccatccaagaacccaattttatttttgacagatatagaaagttacatagctctactccaagatgcatagttatcttgtccagtgagaagttgagagacaagaacgttaccatggtgtaggtaatacgggtttgaaggatcttcaagcgagttcttttgattgatgaattgcagatcttgattcccatgtccagtagaagcagaaggactatcagcagattttgagttgggttcttcactttccctttgaattatggacggagtttcattcaacatgaatgaaacacagagaatagagagatgaacacggtgagcagaaggtcggagaaggacagggaaacgcgatgtcagcaccggagaaggagaccggagttaacaggatcaatcatggaaagtatatctttcctcgctctgataccataatgcggaatagaaaaaggaattctgtattattaaattgaatgaataatttgtacaataaccgagaacaatatatatacaggaggctgagacaaaagccagcaggaaaataggagctaactaagttaactacctatctgacacaacccaaagaaaaataaaaagtaataacagaaactgttagtgaccgttgagcataaatagctcttacaaaataagaaccatacaaaatagaacagagaacaaccactgtaaatataataaaaatgtatatatatataaaatggaaaaaaatttacattacataaattacttatgttcacttaatgacaaaaattaaagaaagaaagaaagaagcaaatggtcttgaaaaaaaaaaagagcagctccttttttaaaagaaaaaaaaaaaacaactaacaaataaagggtaaaagacatctcacataccaataaaattggaaccaataccgaatattaaacaaaacacaaagctattgataagattaagatgccgaaggctatatgtgtagataattacaaattttagtgagttaatgtaattttctgttaaattaaagagtgttggaacataaattaggtacacaaaggatctcaataaatttgggccttaaaaaagaagtcaaaagtaaagtgtaattgaatcaaaattttcgccaccaattgctgcttgcaatttgatcacccacagctcaaaatgtgctgcaaaacttttaataatttaaaaaaataattaatttatatgcaaaaattgtgggcatatttttcttctttttcagttctcacctatgcttttctaaataaaataaactaaatcccacttatggtagtcttctaaagaaatcatatcatatttttcacacatgattagattgttttgttccttctaatattaaaattataagcatgtgctctttttaagaatatggttagcttgattaagattttatttgtttatttatttatttaactggtcggcacataactgtttttgcttttcttattaatcggcttgtctttttcaagaaaagtttatataatttgtaagcaaagctacccatatgcatatatagctgaaacaaaattggaattttgtgatgccatttttgtctcaactatttggtagtttaactaatactcttcccttaatttatgaataaatgaccattcgcatgttatggtttgaaaatgtgtgatccccttgtaagaataaacgttatctttgatttcaattcatgtagataggtagtggaaaattaaagaatttgtttaaaaatattcctttaa

SEQ ID NO: 234814 - DNA, 1062 bp, Cannabis indica
gcatctccactgtgattatcatttccttctgaattagtttcaatatttgctgcagaaggcttcatgttgttatttaccgtaggattagcatttcgattagggaactttccatacaatttatgttctggaggatatccatgtagcctataacacttggacatggtatgactagtaataccacaatgaaactcaatttggtcggtttaaaccgatcaaaccgtgaattaaaacggttgtttttttacttttatataatggtcggtgggttttcgaattataaccatgaaaactgaaaattgaattttggatttattttgtgtaaaaagctgaccaaaccgaccgttgctcacccctagtcgatactcttgaataggatcccatagagtcttaagaggagtgaaatagttagtgacactgcttgtttcttgtgcaagagactgcttggttcttatggcttcaaaaactcgaggagcattcttctgattgaattgctctttaagatttgtccagattgttgtggcattttccatatgcataatgttctcagctatctcattcgacacagcatgacgaattcaagatatcactgtactgttacatcgattccatagctctaagtcatcatcgtcttcgtcaggttttggaagtttgccattaacgaatatgagcttgttcctcgcaattaacactactgtcatagctcgacaccacaagctgtagttttcacaactagttaggatctttggaaccaagctagctcaagaatgatcagtattagacagaaaaaatggattcctagcatcaccagagaacaatcggccaccaggatccagagccgaaaaacaatttgaagtctctgtggagcttcgactctgaactctttcacctctagccatgaagatgaaaatcaagggaacgagaatggaatctacacagagatcagctctgataccattttggctaagtaaaccagaaagaaagagagaagagaaagaagaaaacgtcgtgtattcattaaatgtcaatggaaaaacagggaagagagctatatatatcgagata

SEQ ID NO: 234815 - DNA, 704 bp, Cannabis indica
aaatcaattcagggtcctatttgtattattttagaaaatacaggatccattttgtaatttaacaaaacacaaggtccaattggtaacttttgtaaaacagatggtccaaaatgatatttacccataaataaataaataaaaggcttattacatatttgaccttaaactttaatatgtactaaatgatgtttttgaatttttcagtcgttaaattttttccagattgttaaatttaagtacttttatctaatttcattcaattttactatttctatgattatttatatgattatttatatagttctaatatatataaacacttaaataaaaaaaaaccatgcctctcgaaaaattatttgtattaatttttatttggcatattagctgcaaaattatttgagctatacaatttgtaacactaaatcccataaacttatttttttaacagcaaaactacctgaattcaggggcggatccatgtattttagttagtcaaaatatatatttttaattaaaagtgatatttataaatatgatacaagctttagcataatggttaagttttatagcataattgggatcaaatcccaataagagcataatcacattttagtattttaattctttttaatctctatcaataagggaaattggcggctaaacccccaacttttgggttgtgacagttaaccaccaaaactcaa

SEQ ID NO: 234816 - DNA, 653 bp, Cannabis indica
tttttttttttgcattttttacattttaacaaaaatttacatagcaagcttacctaaattgcaacctaaaataaaaaaaagttaaaaaaataatatatgaagtaattctacattaaaaaattataaaaattataatcataaatggacaataaaatatactataaatgctaaaatttaactcctatagtaaatcttattatagaaatcaacttttatactacataaagaataattaatatttagtccaaacaatatctcagagattaaagttataatcctaacattccaaatattgtaaacaaaaccaacaataattgtgacaattaataaaaataaaacaatatatacattaaaaataaagttttaattaccaagaaagtcatgcagtgacaattaattaagcttaccattagagaatcttccagtttattttgaagaaagttgtataagtttgattaataatgttgggagattgttattgttttgcatatcatcaacatttgaatctccagatataatttatatatatatatatgatacattctaaacctaattaacgtcatatattcatatataacaagcaaataatactaatttttttgattgatttatgtgatgatgaatcatatgattaggaatgtcagtcgggcccg

SEQ ID NO: 234817 - DNA, 903 bp, Cannabis indica
tttgaatcagtgagtaagttattccctttcttttatatatttgccatgaaatgcatgcattatttctgaattctctactatggattttgcctgttcttgaaatgttctaggttaactgtagaataactagatttagggtttggaaattccattcacgtttaaccgtaacgcctaattatctgactgcgcttcagttttaaccttaaattgttcattccatccgtccataagattttaacaaaaatcagattccaattgaagttttgaacttctggcattggaaattccacttctgggtgaaatcttttcttttgattcttaatcaggcctggttggcgtatacaatcttttttcattcattatcctgaccaactcttaatttcttgtttcccaccttttgtagatgaaccctagtaatttttgaggatgcaagcatcatatcgaccaggacttgcttcaactcctatacgaagatcatccccgtctccgtgcaagtctatcttcgtatagtgacaatctttcaaattctagttttaaagattgagagtaagtagcgagcatacgccttccccagaaaccgaggtgcaactccatttctatcccgaccagattcatggcgaagaatacgaccgtttcatctgggaacttaagaaaggttggagatgccatcttcctgctatctggatgtacagaaccatccgagcatagttgacactttgcccgagggccaccaaatttcggctactaaagtaaattctgttgccaaatttactgtgactattgcaaggcacacttctgataaaactccatccaatcgtaaaatgaatgcacgaactaagtagactgtcagaaaaccctcgtctaccgtccctcagtgcccgtctagctactctagccaaggta

SEQ ID NO: 234818 - DNA, 1099 bp, Cannabis indica
aagcaagaagatagatactaattctattcaaattcaaaagattgagtttaggttagcattttacattcatgacaaagatcatttatgtactcgggtgtagttttgctagaaaatagtttgacgagaatagttgactaatcaagtaaaggttttgagatgctctgtaggagctaacttcttggaagtatacagtcttgctgttcatctactgttctattaacaagtttttcaaagtcaccatggaccctgctcaagttagtgacctgttccatgatgcggttcaaatctccccagaagatatcaccttcgcactcaacctcggcgaagttgatgaacctgaagaagcgaaccaagttttagttgggaagattattagtcggtacagattaggaaaagctgctattcaaggctccctcaagctgtcttggagtgccatttcgggttggaagtggaaagaaattgaaggaggactgatacagttcacatttgctaaacgggaggatgctatgaatgtcctcgctcgtcgcccctggtttgtgtgtggtgctcttattgtgattatgccttggccagcctggttaacccccgcggagataaggttcgacaaaactcctctatgggtgaaaattgaaagcatacctccgttttattggaacctttctaatctcaaggaaatggcctcaagagcctctcccgtgtatgatcttccaccgggcattgaggatgcaatcggtatgagctccctgagatttagagctaccattgatctaaataaacccatcttttcagggtttttcctaagaaggcaaaaactaaaagacctttggattcagtataaatatgagagattacccaagctgtgtttcaaatgtgggtttcttacccatgaccagagcatttgcttcaagacacccacagttgtaaaagatagctcaggaaacttttacccaatgtatggcatctggcttaagagcgacgcccctgaaagatcaacattcacatcccccttggccaaatggtttcaagattgggtacttcaaaaacaaatcttcctggaccctacacttcgaaaccaattgaaagttcaaaaggcgttgcg

SEQ ID NO: 234819 - DNA, 754 bp, Cannabis indica
agttataagttaaaaggacattttgggaaattcactcattgatttaggtggctggttgtgggtgtgacagatggccattagaaacacttcagacttggtttattgaggaaattggggaaataagtaattaaaaagaaaaaaaaaaagaagaaaaaacacactttcttgctccttttccttccttgttcgaaccaacccagaccaacagcaagtttgagatttcttcgtatgattttgaggaattttagctggatttaactagagtaatcctaaggtaagatccctagctacttcttgctaagttttataaatgtttttggtagttcaagcatgttaaaatggtgattttgttgctgtgcgagttagggttgatatgtgattggtttatgttgtttagtaaagttgttttagatatgaatttactggttttgatgcttaattcttgggttgagcaagactcaataatggcatattgagtttttgtgctttttggctgttgtttttggattgattctgttattcgatgttggtacaggtgttctgaaaggtttggtatggtttggacacgatttgggcaagatttgaacttgtttgggtcacctgatgtaaactggttaaccaattttacaggccctgtaaaactggttagtcggatcaggggcaggtttctcgaaatgttcgatttgtcggttcgtgctatttttagagccttagttagttatttccttgatatttagggtgttgttataagaac

SEQ ID NO: 234820 - DNA, 1166 bp, Cannabis indica
gattgttaaatttaaggacttttgtctaattttagtaaaaaattctaacatggatgaaagttcaagaggcatgatttagtacatatcaaagtttgaggaacatgatttggtagatatcaaagtttggggagcatggttcagtacataaaacaattactgaaacagtaaaattgaatgaaattagacaaaagtccttaaatttagcaatctcaatagttcgaggggaatttttaacggcaaaaaaagttcaaggagcacgatttattacatgtcaaagttcagggaaaaaaattactaattagcttaaatttaattgtagactttttttagttataggagtattcctctaatttaatctgtattattttgcttatatatagtttatttgattggtaagcatatttagaaagttattatgtaaatagaatcgagagtaattcagaataattataaggtctaaggtatttgtttagctagataacacaataatataactataggtaattaatattgagtctcactcaactactctctctaattcggaggtaattgtacccatgtaattggaataattacaccgtgtaaatgtaaaatattactatttttaaatgattaatgttattaataaactacgtaattactaatttagttatcgaacatgaaaataaaaattcatacgcaattattacttcccatcgcttgcttgtgccacttgcatcaatctattgtacttagacatatgggccctgaagtttgttctaccttcctatagatccatttgtgatatttagaaattctccgggagctgtgcctctatgattcttcttaagcatggctcaagatccccatcttcttaattagtcatatatggctctgtttttttttttgggtcagatagtccgtaagtttagtcaaagttattatctaatcttccaatcgtctagtgtggtcattcaggagctcacatccacggattttgtcattgatgttgaacctattagagatattattacagtgaaagaaaatcaagacattacaacactattgcaataaaatacagggatcaataaagagattaaataaatgttacaataaataatatacaatatatatatacactacatatattatatataagaaatgtagaagaagatatatagattaca

SEQ ID NO: 234821 - DNA, 685 bp, Cannabis indica
aaacacttagcgtataatccacataataataactaagtgtaacaacttggaaacatgaaggacatgattgtccagtctgtgaggccttatggtcaaagagctgttcttaagtttcctcagtacaatggggctcatgccatttgtagaaggcatataattaaactaagctattatttggtggtcatctatatgcaatgcgagatggctcaacccacgtcaacgttaactgccttgaagataggaatgataagcggttgtgttgttatcaattgttttctccacgtgtttaaatagaacgtgatcaaagccggtgtttttatgaaaaatggttatgtaattcaaattaaaatgtaaataactgccaacctatatttctataaataggggcaagaaaagggacggaagatctttgggagaaaagattactaattgtaatactgtattaagtatccataaatatcttagataagatagaatcatggagtatgcagatttaactgcaaaaccacgtaaaatacttggtgtcattataactattattattcttctcagttttcttatcaaggagtattccttgtggcgttcaatcgacttatcaaacagatttccaccaccatttgtggtgtcttccttcatacccgggttgatgcttatctaagcaatgggtcgcggttccacatcaaaa

SEQ ID NO: 234822 - DNA, 728 bp, Cannabis indica
caaaactttaaaaatgataaaatacattacaattactttaacctgccacgttctctaaaataaaataataaatttttttattcaaaattattatacagcgtaataaattaggcagtgaaaaagtaaagaaacgagtatgagagtaaaattgaaataaaattagaaaaaatagtataaggtgtaaatttttcttaataataggggagaaattatggtttcatgttcctaaatctataggtatcggaggttgtcttttttttttggctaggcctgccgaccttccttgggcctatgtgtggcttggtcaaggttgtattttgctactgtaatttgtttttttgctattgttattagtcttatcttgtgatatggttttgagtattttagtcttgtctctatgacatagttttgagcattttcgtcttttctctatgacatggttttgagtgttttagtcttgtatgtgtgacataattttgttttattttgtattattattggttcttctttgttctttgatggctcgccatcaaatcattattagtggttgggaataacaagttctttatgactgaaggggttgttagtagtgcagagttatgtaccttacaccatagttgagtgctcaagctacgagattggatgaacgtgctgcaacaatttctactgttgtgtcttctaagtgatgaatgaaatagaatataggtgttcttaagattaattgtgat

SEQ ID NO: 234823 - DNA, 1949 bp, Cannabis indica
gaagagttagggcggcggagtgcagcgtttaagattgctttgtttgcagatcttcattttggtgagaacgcgtggagcgattggggccctaaacaagatgagaactcaattagagtcatgtctaatgtgcttgactatgaaaccccaggtcattttattcttaaactttttttttttttttcatgtcttttggttaggatgatttatgagcttcatgaaatattttcaaaataacatactagcaccaactagaattttagcattgatgctatttattgtttttaaataaaaaattgaagttaaaaaattattgtaagctaaaaattagaataaaataatagcgactaggatcataattatagtattttttaaagagtgttatacgtatttttagaagtaagagtaccaaaataaaatattattatatttttttttataatactaccattagagatggtcttatactttatagcaattctataaggatttagttggttggacttttaaaagtttttcctagtttatcgaaactcttaaaacacttatgctgctgttttgataagtagttagtttaagttttcagctctaaaagttcttttaacataaaccaattttagtaacattttcactagagcttccaaaaaagattaaagtcaaaagcaatagtcaaatgagatctcaataaaaattgtaactgaaacttaaacaaacacttgccgtactttgactaaagatagttattttcttaagttatatagaacccaatacttaattccactaaggaaggtgctaagcaccggtaatacctttttagcaattctttaaatgaaattgtaactgaaacttaaacaaaaagtcgcctcactttgactaaagatgtatttttctcaaatgattagtttcttattgttggaattggtaaaatgctgtttggactcaaagggctactttgggacacataacagaaataacaacttttaagtttttcctgttatgacagttggactaggcttagagttaagagaggattttgtccactattgagagttgattcatggagcaagactccattgttgtacagatttgaaacaagttttgaataaagagattacaaggacccttgaggctggtttggtcacttgaaccgcgtatgtgtttgtgctctttattttcatttctgttttggttattgattccttgatcgaaccagttctgttttgagattgaatgtgatatatatagtaaagtaaatttatttatttatgtttgattatgtaaatgcaaattttgtaatttacttgggagatgttataacaacaaacaacataggaataagaaatgcaagcttgtattgggatcaagcaatttccccaacaagagagaggggaataccatttgctactgtgtttgggaaccatgatgatgcaccatttcaatggcctattcaatggttttcaacacttgggattccccaaattctttgccctcttcccaattctactacttctccaggtgaccatatattatatatatcttccttactaaagtttatatcatacaaatgcgagaaattttttgtcaagcaccacaaaaagtagcatattaataccaattataagatgttatgttagtgtattgaacatcttaatgtgacaaatagtaattttctacaaataattgtcgtaaaaaagtttcataacggctaaaatctttaattcttgagaggacaactcaatgttggtctttcggtttggctgaactaggataaatctttaatagtttccttgaaaagggattatttgatttgacaatgtatattgtaattattttataagatcagtttccaataagtcctcaaattagagtaatatagtctatcacaaacgcggtttaagttttatttttgtttcggtataggggaagaagagtgtagctttaagggcacaact

SEQ ID NO: 234824 - DNA, 1236 bp, Cannabis indica
atcagtctgaggatggaaggttgtactgaatttcaaggtaaactttggatccctattcgatatagtagactttggagtgccatgtaacctcactatttcattcatgtataactgtgcaaactgatccattgtaaaagttatttttactggtagaaaatgtgccgacttcgtaaattgatctaccacaaccaaaattgaatcatacattcctgtggttttaggtaatccaaccactaagtccatagtgatatcctccaacttccactcatgaagtgtcagtggctgcaatagtcctgtcggtctctgatgtttagccttgatctactgacaagttaagcatcagaatacaaatttcaccacacctttctttatcccacaccacaagtagtagggtcttagatcttggtacatcttggtagtaccaggatgcaatgaataaggattggcatgagcttcctcgagaatcttatttctaagttatgcactacttggaccacaaaccctggtcttatacaacagcatcccattatctgacaccgtaacatttttaacttcaccagcaaaaacctctgctcgaatcatcactaatttcagatcagttaactgagaagctttaattcgttccaacagatcagattgtaatgtcaaatcatgaagtttgcctacaacaaactcgatgcctgatctgactatgtcatcacctagctgaggtgaaatcttaatcatactagctaccttcccgggacccttcctgctcagggcattagccactacattagccttcccaggatggtaaaagtttcatagtcgtaatccttaaccaactccgacaaacgtctctgtctcatattcaaaactttcagggtaaagaaatatatgaggctcttatggtcggtgtaaatctcacatttttctccgtagagataatgccgccaaatcttcaaagcaaaccctaccgcgacaagttctaaatcgtgagttgggtatcgctgttcatattcctttaactgaggagaggcgtgggcaatgacccgatcggcttacatcagtacacaccccaaaccctgcctgcatgcattgcagtaaactgtaaacttttccttatttgatggtagggcgaatatcggagttgtaataaatccttgcttcaactcttgaaagctttcttcacacatatctgtccataaaaatcgttgattctttttggtgagttcagttacgggtattgagatctta

SEQ ID NO: 234825 - DNA, 2606 bp, Cannabis indica
acacaataagtaaaataagtaagagtcttcaaattttatataaatccaaaaaactcaaaaccaagcttttgagaaagaaatgatacttacatataatgcgaaatgctgttgtgttgattggggagagcctagtagtctagaagaagtcatccttaaaatcggtcttatttggtaacctcacaatgatcatgcaatcacttgtatgagtaccgaagtaataaaaacctcttgaacatcgcttccttgtaggaacaacttttatagaataaaaatgtacaatttcgaggggagtaggacactcccaacccaaaatggtataagacctttaagcaggccaagaatctgtaagaactcgaaattaactgaaaaggagtaatttcaagataattatagaactctttgtaatattctctcaaggggagtactgctccagccttaatgtgcttgaggctctaagcgcctattcctgatgaggcactagtgctgacttcaccacattcttcttgaattactctttttggtggaaagtagctaaattcctctggagcgacggacctaatgcgatatcctcgttcttgcttgatgccacaagagtttagtatattgccgacatagtctccaatagaccttactttgcattcaatgagctctgcctctaaaatgactctaagatcttggggggtctttgatttacgagcctgggtggtcatgatttcgaaatctaggtcacctagtgaaaaatcaacagtgacttgaggtaaaaacacgggtctagctaaagggatagaagttaaaatgtgagattctggccaagctacatcttgcagaaaacggcgtttaccctcaataatttcttgcaaaaactgcctataacgtctaacaattttagcttgatgggtttctattaaatgatccttattttggcatcatttacctcaagttttgatttaggtttgtggattttggattcaaatggaagggctaattttttttaggacaatctgtttctaggaaattcggggttagaattttaaaactagattgtgacatgtttacagacgagaataatcccaatttcttgaaaaaattaattctacctaaaccagaaacctttgaatctaataaacctgaaattattccttaaccctaaaattatccaacaaaacaaaaattacatataaataatcgaacaaagatagataaagaagataatcaaacaaataatcagactataaatatcaaaaagaaaggtataaaccactcactcttctaaggaagattttcaaccaaggaggaactttgtgattgaggttgagatgagtgaatcaatgcgttctgaaagtttctgaaggttaaaaaagtaatttgatgaaacacgtaggaagaaagtcggtgacaatgagggcatgcaaggtggtgagaaattagagataattttttcacagaaaggcttaaaggtttgaaaggcaaaaatggcgaaatgactgcttgtctcaaattttataccctgaaagtgatcaccattagatcaaaagaacttagatctaacggatgggaacactgaaaaattggaaaagacgggacatttaatgctaatgatgttcctcaaaatactaactgccaaaacccaaagcatgcaattttttaaaattgggttaagacaaaaatacccttataattatttaaaaagctctttttaattaaaaaagaactttttaaggggcaattattatacctaaaatttggctacactttagaagctgacatgtgtcctacaaatggaatttgaatcaactttaatgatataataagtttatatcattaaatgtagaataaaataacttgttattattaaaaggtttaatagaaaatattcaaaactcgctgactatatagtcttaagggagtaagaataaaaaacttttgaacggatattgacgagacatatgtctacctcggaatacatagttaaaaagaagatattcgttcaagtagaataaatataatcacaaacagtaacctcgaattatatacagcgagggagtcgcatcgcaatattaactcaaatgaagagatgtaacgaggaaaactacctgccaacacttagcatttttccttactaatatggacaaggaggataattcatgtcaaacgagataccatcttccaagtcagcaataactgtctaaaggataaaagaaagagtagttgggtagttattagatattatcccacatgtgatgaaatgatacgtggggattgtcctcgtgtcatgaaaaattatatttgaactgatcccaaaagaataactaccaatctatactcctataaataggggcaaattccacagaaaaaaggatgcaaaattgacgagaaaaaaatactatcattctgatattgtattctgtacctaaaaaatgtctttaataggaaagacaatatgcatatttaactgcaaaaccatgtaaaaatatctggaattatttattattttatttttgtaaagtatttattactgaaaggcttgttaattttgggtaagaaaaatttgcattaacactatgattctaggatgtttaatgcacgtgatggtgagcacgagaccg

SEQ ID NO: 234826 - DNA, 1021 bp, Cannabis indica
ttataattattaaataaataattttggcatttataagattgaattagaaaatatggtattattgaaaaaagaataaatgattgaaaaaagtgacaaaattataactagagattgattctttatggccgacccttagagtgaatttttgcccaatattttattcttttttaatccatataattaagtgtgcttgacttggagtaatcttgggatgggagacctcttgtgaagttttttcagaaagcgtgcaagtgaggacaaagtacgctggaaacgcttatattgatttgcaaagccagtcttcattctaagaagcaagtagagtgacgtattgtataagagccataattttatgagtgtaaaggtccaataaaaacttaaagtgagggcattacacaacaataaagtaagataagtttgatacagtttatttttttttattattattttgtaatgtttttggtgggacaaaaaaaagtaaaataagaattaccttttcagatattaaaatttaagcttttagggcatctctttctgatgtagcaatgaattagccaaacatacttgaaattatgtaacattattatatttttattataaaataaatatgattttaccctcaaactatgacatgtgtcacaacattcttacataaagttttgctcttgaattattataacttctttttttttttttgtaaaagattcccctcgaattttagacataattgtaaatttgctcattcggttgtatttctttaatttttgctaacatttttgtgatgtaaaactaatcccgaactaatctactataatttgagactcttacaaaaaataattacatacatctggctcatgactatattattaaattattttgaaaaatgaactaaatacaaccgaaggttaaattttgtaattatttggataattcgagggatttttattatattttttttaaaaaaataaatttaggacgcaaatcatatgattattcatatttaaaaataaaaatttggttt

SEQ ID NO: 234827 - DNA, 1556 bp, Cannabis indica
aagcaagcttctcagacacagatacttctccaatggtagatttctctcatctggtctaggatccaatccatctctaacatggagaagcctgttttggggtaaagaactgcttttgaagggccttcgatggcgagttggctcgggtctctccatcaattgtgcaactgatgcatggctgcctggtactacaacctttaaaccttatttcttcaagggggctgacccaaatttgatggttgctgatctaattactgagcagaggcagtgggatttgatttcattgagagccaattttagccaaacctgaatgtggatcgtatactctctataccactcagcttgtttccacatgatgatgccatgatttggagccattctttcacaggtatctacaatgttaaatctggatatcaactagcagtttcatatgctgaacaagatgatactgccagtagtcattcaatggaaaattggtggtgcactttttggaaaatgaagcttcctcctaaagtgagaatctttgtgtggaaagtttttcactcaacacttcctgtagctgctgaactttttcgaaggcatatagcaacttctccccactgcagtatttgtaattctgctgaggaatcaatcaatcatgcattgttcgactgtccacggaccaaagcagtatgagattttgtcttctctgcaaattgattttcacactttgcgacaaagtgcaagtgctgatataattttgcacctatcgacagctctatctacatctgaatttgagttgttcttggttctctgctggtgtaattggcatgaaagaaatgccatctatcatggtaatactgttagatcatcacaggcagttgcatcatatgccccctcctacttggcagaatttcagaatgccaaagctaaacgttcacagccaacaccaatttcaattactgctactgatcctaggccctcatcagagttcacacatgccccaaaatggactgcacctccccaaggaaggctcaaattaaacacagatgctgctattgacaaagctcgcaacaaagttggtattggagcaacactaagaaattctgatggatttatagtagctgcaatttcgaaacctctgttgggaaattataaggcagaagagatggaagcacttggccttgcccttagtttgaattggttgatttcaaataacctctcagtcgacttcattgaaactgattcactcttagttgttcaaggattattatcatctcagtcctatttatctgcttttcatgctattttaaataatattaactttcttgtatcctttttcccacgagcacagatcaatcatgtatatcgatctgctaacacttatgcccacactttggctaagtatgctcttacggtggatactgaatgtatttgggtggagacttttccttctccactagtgactcttatgtaattctttgaattaatataacagtctctttctcaaaaaaaaaaacaaatcaaaatttactgtgcgatcataaaacgatcatatatttttatttttgacaagaatt

SEQ ID NO: 234828 - DNA, 774 bp, Cannabis indica
acaagagaacaaataaaaaagtttgatcctctaattgatcaaatttgtcttttatgtgttgttgataatgagagcataagtcatttattttttttattgtcagtataggaagacttgtttgtaggaagttaagtgttgaatggaataaaaatctgcttctgtggatttattctaattaattaggtggattcataaagcaaagaagatgagtgctactaagaggagtatcatgtgtgttactcttgcggctttattctaccaaatttcgagagttgggaatgatgtatattggtaccatataatatggcatataattaacacattatagatggttgaaaaagatatacaagttatgattactcttgtaataaaaaagctcatacaatagatagagattggttcaatttgttatgtcaaaaattgtgtatagtttttgaatttttttttgggatatggttgtacgtggttggttaatatttttggaagttgaacaatataatgattcttattcataaaaaaaagcttattttataatcgctctataaatatgtagttgtccctaaaaagcactagggttcttgtattctcttcttccctattagagaaaaatacatcaaacaatagtatattgtttgaagatcaaaactatctatgcaaattctattaatggtttcaggttagtgcttccactctcgtgttcatcatctttttttatttagcaaaggtgttaggctaaaattagtctaagtttcgggtcatattttcggttagttt

SEQ ID NO: 234829 - DNA, 843 bp, Cannabis indica
aatagttgccgaaaatctcggtcaacaataattaataacaactataaagctacctaaagaagaattacctagagttaaaaactttcattaacaccaaacattcaaaattcaatttttatccatcaagtcaacatatgagtgtgaaaaattgaaaaagggaatttgggaaatgaaaaaaaaaagttaaagaagtgagagaaagtaagtagagaattcacattagagtaattaaataatagttaaataatttagctaagaggtaaaaaatggtaccctatcaaatgagtcattttagataaaaaatttagcttataaatagtgtttaattacatgtaaaaaaaattctatttattgaactataaatattatattaatatatttttttgtaatatatgtgtgtcatattatatatatattttttttaaaaatgaataaaatatattaaataaataatttataaatgaaataaagaatatatgaaaaagctgatatataatgtaatgtaaatgtactaagtaaaataaagaatgagatatttaaaatagcattcataataatttctctaaaatagagaatttattttaaaaaaattaaagaactatactaaaaatatactacagtagatgttctaaacttattttttgttttaaagtttttttaaaatttacttcatgctttatatttgtagaggaagtggagttttaataatgtattttaaataataaagtaaagaagctcttgaaagtgttaaatgatagagtaaataaattgatagataatgtaatgtaaaaatgtgttgtaaaataaataaaaaaagagtctttaaataattaattttgaatg

SEQ ID NO: 234830 - DNA, 958 bp, Cannabis indica
tgtgtagtaagggcaaggctaagtttgagcaggcgtgagagtaagtaggtgaagattgtaattgtcggggcggttaggcccggagggtgcgatctttgggacagatatagtcgctaggcgacaacttttgtagtacatactttgtaacagttgtaaatattttatactcgggatcccacttatatatatatatatattattttggtatttataagcaataaaataaagttttaattaatcatgttttccaaaaaaactcgctgattagcaatgagctacacaactaagttaaagttacgataacacgtctaaactagtaggatgttacatactcgcgaaaaggaactcaagtcgaggttcccactattgtatcccacccagaggtggctcttaagagcgtcctggaggatgaacctctcacggaggatgaaccctctattaaggataaagggaaaaggagggccaagacccctcccactgtccaagctttcaacgactccatctgggagatataccaaaaggcaaactatttttgttcttacggtatgttagcggcatatgccaatggtgtcagactacacaatgttctcgagttaatgtggcataggatgtacgccacaagagaatttgcgtccacgagcatggaggtattcggtgcttagagctggtcccatatttccaatggagtgcactttccattgaggtcctactttgcaaaccttattgccaagattgggatagctccaatttcagatgaccccctcgtcctacaggctttatgctaggtggtatgtttttttgcaagatgaacaaacttgaagtgccttcctaagaggaaatattgtactttacagtctgaaggccaacccaatgaggataaatagaagaaactaggcttctagagactagacaagcgtcttgattctcattatcctgttaatcacaacgattgtactca

SEQ ID NO: 234831 - DNA, 5231 bp, Cannabis indica
gaagaagatagagaaccagccagaagttgatggacagagagtgcaagcgcgtgaagcacgggtgcgtgtacgaccccgatggctcaaagagtttgttaggatggagcaaagatgagaggcagctgctggagaattctgttacaattatttgctttctttttttcaattgtaatttcggtagcaggggtatataaacccttagaacaatttgtatggtttttatgtgttgaatgaaattgctggaaacggctggagattggccttgtctcgaagaaggcgtgtctaacaattggtgctctcattgatccttcattttcacaatgaagaacgaggaactcgctgctatgattcatgcgttggaacttaactttcagaaacactctgaagaacaatttgctcggtttaatgccaaattggaggaacaagtgaccagactggacgaccgtgtcaaccagctgcaaacaccatcgggaacatctcagggtgggcatgagagcgtaattcaggatctgcattcaccatcgaagcaacattcagagggagtatcggaaaacagagagatgaacaacattttgaagaatatgcgtgtgaaagtgcatcggtttgatggtaataacgttgaagattgggtgtataagatcagtaagtttttcgacttacatggagttcccccaagtactcgattgtctttgattgcctttcacctggaaggaccgccatctacctagtttcagtggatggagaagggaggtgggttttctgattgggattcttttctacgagcattacgattgcgatttggtgtatcggtgtatgaagatcctttgggcagaatagcaaaattgactcagacgggacgtgtggctgagtttcgggcagaatttgaagagcttatgactcggatttctggcgtattcaagcaatttttcctgaatttttttgtgtggggtttgaagaatgagattaggagggagctgttgttatcaaaacaggtggacttagctgatgccatggctaaggctcagttatttgaagataggcatgacgatttactggggcgcggtaagacggcgagcaatcgcacagggtggtctccgaggtttccgatttcaccaccaacaggtcagagcccgactggatctgttataacttctcctacctctactgttgcagtgccacaaaaattacacaaaccaagtccttctggactaccagttaagcgattgtcacctgctgagatcaaggagaaacgggataaggggctttgttttacttgtgatgagaagtacagttttggtcataaatgcaaaaactgtgttctttttctctgcactcactgcgatgaagactcagaggcagcaatgcttcctcaggatcttgacggtcttgaagtagtagatgacgagtccaccgaggaagtgagtctgaattcattggccaattcgtccaatccgcgcatctttcgtattactgcgcaacagggcactgagactttggaagtgttaattgacacaggcagcaacaataaatttatccaggaagctttggcggctcgattgggactagcatgtgaagatacaaagaaatttaaggtgtatatgggaaatggcaactccctgtggtgttctcaactgtgtaagggtgtggaattaattctccaagggcacaagtttttggttgacctgtatgtgcttcctatttggggattggatgttgttttgggtatgcaatggctccaaaccttgggaccttgtatacatgaccaccgagctttgacgatggaatttcagtggaagggcaacgtgattaaactggctggtatgatgccttcgggagatcaccaactatcatccgcgcaactgcgagttatgtgtagagaaggggatataaaggatgtgttcatgctagcaacagttacacaagaggaacctgtgatcaataaggagattacagatatggaaacccaactccctgtgcacggacgtggtgttctttttgagtttcaggatgtgtttgccgaacctacacagctaccgccccaccgattgacgaatcaccgtattttcttacaaccagggtcaaaaccagtgaatgtacggccatatcgctacccctactttcagaaggatatcattgaaaaattggttcgcgagatggaaaaatatggattcgtccaaccaagcaacagtccttattcctcaccggtcttattagtgaagaaaaaggacggatcgtggcgcttttgcattgactatcgagcactaaacgacattactatcaaggatcgatttcctattccgaccattgacgaattgttggatgaattgggtggagcaactgtattttcgaagctggatttgcgggctgggtatcaccaaatccgtatggactcaagggatattcataaaacggcatttcgcactcatgaaggccactacgagtttcgggttatgccatttggtcttactaatgccccttcgacattccaggccaccatgaatcaggtattcaaaccactacttcgtcattgtgttatagttttctttgacgatattttggtttagcaagactggcgaagaacatcgctgccatctgcgcctagttttacagaagttacgggaacaccagttttttgctaaaggcagcaagtgcaagttcttccagtcggaaatcgattacttggggcatttagtttcagctgaaggagtgcgggccgacccttccaaaatcacagccatgatagagtggcctaaaccgcgcactatcaaacagttgaggggatttctgggtttaacgggttactaccgtcgctttgtagcacattatgcaaccatagccgcccctttaacggagcttttgaagaaagataattttgtatggacgacacccgctgagttagcttttactcagctcaaggcagccatgacagaaactcccgttcttattttaccagatttctccaaagtgtttgtcattgagtccgatgcttcaaatgtcggtataggagcagtcctaatgcaagaaaatcacccaattgcttttttcagcaagaaattaggtcccaaatttgtgggtacgtcagcttatttacgggaactaagggcaattgtcgaagctgtaactaagtggcgacaatacttactaggccgccactttatcatccgcacagatcatcgaagcttaaaagaattgctcacccaagtgatacaaacacctgaacagcagcattttctacggaaactcattgggttcagtttctccatcgaatataaggctggcaaaacgaactcagcggcagatgcactctctaggcgatatgatactgcgccatcacttcttacagctgctatttcctctgttaattttgattttctggatgaaccgaggcgtgaaaacaccacatgtcctgaacttcggcacatccacgaacaacttgctgctggttccttaccggcaaccgactattcagttcgcgaaggattactctactacaaggagcgaatacgagtcagctctcactccaatgttaaacagcaacttattcgagaatttcatgagactaagatgggtggacacgcagggatagaacgcacatttttacgattaagtgcgaatttcttttggcccgggatgaagtcggaagtgcgtagctttatacaagcgtgccttgtttgccaaacagtcaaatattcacccgctgccccttatggacttttacagccgttggaattgccggaacgggtatgggaggatttatccatggatttcattgttggtttgcctaattcatttggggtcactaatattttggttgtggttgatcgcttcaccaaatatgctcattttggtgcattaccgactcattattcagccaccaaggtagctgatctcttttcccatatggtcattcgtctacatggtttgccaagatctattgtttccgatagagaccccatttttactagtactttctggaagaaattgtttgagtttatgggcacaaagttgaaaatgagttccgcatatcatccacaaaccgatgggcaaactgaagtcaccaactgatacttgaaaaaatatctgagggcgttcacagcagacaatccaaaacaatggagcaagttcctttcctgggcagaatatcactataatacaagccaccattctgctattggtatgacaccttttcaggcagtttatggtcgaagtcccccaaccattccggcctatactagaggctccactactattcaggtggttgaaaacgatctgctcacccgagacactattttgcagcaactaaaagacaacttactccaagctcaaaaccgtatgcggcagcaagcaaacaagcacagaagagatattgaatttcagccgggtgaactaattttggtgaagttacaaccatataggcaaggaacggtggccaagcgtcttaacaacaagctgtgtagaaggtattttggtccttttcccattgtagctcgtgtaggagcagtggcgtacactctgggattacccgcgggcagtcgaattcaccccacttttcatgtttctcagctgaaaccgttccatggcaactccaacgttccttgttttccactaccagagcatgctgtcaacaacaaaccagtggtaattccacaagccattctcgccacaagactcaatgctggccaaagacaagtgcttgttcagtggtcttcatgtgccccggaggatgccacttgggaagactttcagcaattctgtcagatatacgggttttccaaccttgaggacaaggttattttcgagcaggggagtagtgttagcccagcccaattcgagagcccaatagcacttaacccaaaggaaatacgagaaaggctagaagggtggattgaacaagcaaatggcaaggaagaaccaactcagttctgtgaagaggtgaacaacgcgaagaagatagagaaccagccagaagttgatggacagagagtgcaagcgcgtgaagcacgggtgcgtgtacgaccccgatggctcaaagagtttgttaggatggagcaaagatgagaggcagctgctggagaattctgttacaattatttgctttctttttttcaattgtaatttcggtagcaggggtatataagcccttagaacaatttgtatggtttttatgtgttgaatgaaattgctggaaacggctggagattggccttgtctcgaagaaggcgtgtctaaca

SEQ ID NO: 234832 - DNA, 2394 bp, Cannabis indica
gaaaaaaaatgaacactggctgacagacagagtgaaacccaatttgaaaacgcattttttgcttctatatagaatcatcggctgtgttgaaaacatatgaccaaataaaaaatgaaaatacagtaggggaaagacctgaaaatgaatataagattccggcgagaatgatcggaattgtgattcccaagctaaactattcccaccactgtgatgaggctataaagagtagtactagtagccagtgctgtgagtaaaaaagtgagtgagaaaagtaggaaaacgacagctcaacggagacatcttaaaaagggctcctttttttcgtctgacaaaattctgaaatgtgaaatctttggtttagatgcttttggcgttactaacccaaatttgcaaccatttatactattaaattaattaataaataaacactactcacgagctaagtgaggttggtaattggtatatgcttttctaattactattaccaccttaatttatcacaattttacataaagtaccattttttttaagtttgttaaacatttttgacctttaacttatcaaaattcagttttaataatatccagttcaaccatgattgtaagtgaaccaaaaaaaaaagagtacattatttaacaattgatgaatgataaattcataattatcaatttacattaactccaaaacagaggtccaccctattctagggtgaaacttctcaataatgcaacaataaataataaagctattcgttgggaggagtgttatgtaatataatgtcattgttatgttggacttgggaagggtaatttggggatttgataagttatgtgatgtaatgtaatgtaaggctgagattgagttttggatgttggagaagggagttagtaagtacttaataagtggtggggtcaaatcaggttataaatttgatgatttctgcaattgtgttctgagaagtgaagtggcatgtgtgttagttcagcatatatttcgtcatctatctactatgtctcaactaactgccatcccattaatacgtaatatatatatatatatatatttccttttttacaaattattatgtaattttaatccccacaaaattttaaggggatttttactttttttctgttaagagaaaaaaaacatggtacacaatgtttttattttataaacaacactaaatagtgaagtcttgtagatggggattttatactaatgaaactgcaatgaggctgcatttatcaacactaagagcaaaattgactaaatattcaaagcttactacaagtgttaaaagggttaatcttcttcttgaagcttcctacaggctttgctctggttaagtattaatatcggtttgtttgcctgattctcttttcttcgtttcttcttccacaggtttgagcttcttcgtttctttctttcttttattttctctttgcttcttttctgtttttacattaattaccccctatcatctctttaattttgatgttccattttgttcctgttagcctcattaattgctctcccctgacttttgatttatttccctaatacgtcaccctaatcattatgcatttctccctaatttctcgagctccatcgctgtttaatgctatctctctctcacacctgcatttaattacggcggctctttcttttcagcatttaatttctctgcacaatctccactattttcgatcttcgaatcgttcttatacaactaaaccaaccgtcaattggtttctcttcctctcacacacaaaaaccatcattgcgtatcaacgccgaatccagaccgtctctcccagctttgaagcgatggttcagacaccagttctctcttcgaggcgacttttcttctccaggtactcttctctgtggtttttttctatctttgcttatttatatgttctctcccttactctattcataccactttcgtttcccgttaaaaatcctgttagttccctttttcctaccttaatggcttcctcctccagcaaccctaaccccataactgctcttgatgatgaggacagcctcgtccacgacttcgataacatttccatccactcttctactgatgctgattcattttgcttgtttttcaaacttttatctcccaaatctgctaagccctcttggattgaaaaagccatgtccgaagcttggaccctccgttttccttgccaaatatctgaatatcattctgggcttttcttggcttccttccaatgtgatggcgataggcgtcgaattcttgaagaacagccatggcatttcgataagttcttgatggtcttcactcaccctgatgtgccgccaacccctactcctgaatctattcgatatgtccctttctagatccaagtccatcgaatc

SEQ ID NO: 234833 - DNA, 905 bp, Cannabis indica
aatcaaagaaaaaaaaagtattttgcactaacaataacaaatatctaacgaaacacaatattgaactgaacatgaaggtacattactaactttactaaaggtttatataactctaaaggttatgacaatgcattaagcagcaaaaaaattagtatagagatagaagaaactcaaattgagttacttgtaaagtatcctagctctagcactgaacctttgtatctaaattttagacactaaatcataaacaaagttaaatctgtatattgcaagatgattgcaaaatttaattatgtcttacttaaagaaagaaaatgaactatagtattgaaatgagactttgaaagtgggaggtggctaaagtcaatccaataattataaaattaataagttaggatttttcaatatatgtatgacataatttaaattatcaatcctaaaattttactcatattaataaatatatatgttctcatggtatcataccatgtctaatttatcaatcccaaatgagctagtacacttacatcaaacatttcatcagcattacatactaaattgtttttggcttttgacaagtatatatccttatgtacacataattttttcattaggtaaaatttgtatccaatcaaaaaactatagtaaacaattaaacatagctagagaccagtgaatgatatttttccataatatacttttctttttatctattagggaccagatttaactaaataagactaataagtctaacacgctattaacaagcttttatcatttaaaaaacgaaagaaagaaaaattagtaaccaattatgattatctatttaatttcaagttcaaaacaagaaatcctaagccaaacaaagataactactttttgaaaaagaacacatattaaaaact

SEQ ID NO: 234834 - DNA, 999 bp, Cannabis indica
taaaatctaaacaaattcatcacaatacttacaaatataaacataatatttttttataacaatttttcctattgacactgaatgcaaatattactctcaatatttaggttaccacaaatgttacagatacaatagaatatatttcagcatatttgtgtgagtgcataagaaaagatacttagaccgagtataaataaattttgtttattcttcaattattcttatgaattcatctgggtggtctgcaaacacttcttctagatcgtgaatcatatcaatgtgaaagttcctatctgatacatccttttcgcgagctcttttcggaaatgacggttgagacacactcttaccataccatatccatttttggtaagtttggtctatatcacttatgtataagtgtcctcttgcatctacaaccttttattttttaaaattttcacacttcatacatgggcaagatatcatagtaggatcatttttattttgcatggcaaaattcatgaaatagttagctccatcttcatactcttttgacaatttattctttttcatctaatctctattcatattaatctataattacctaaaataatttaatgctattataagttaaaaattatatcaaagaaatttttaaacatgttaaattattttagtacttataaatcttcaatgttattaaaaattggacagattttcctctgtttctataatattttctaattttataagtacctatatcaacaaataacaaacacgataaacaaaacacaataaacataattaaaaattggacagagtttcctttgtttctattatattttccaattttataagtacctatatcaacaaataaaaaacatgataaacaacacacaataaatataattgaaaattggccagagttttttctgtttctataatattttccactttcatatattatatctacaaataacaaatatcgtacaataagtttcttccttatatctccgc

SEQ ID NO: 234835 - DNA, 1137 bp, Cannabis indica
tgtatttcaagcttctttttttttcttcaaagggctgttaagtggaattttaacccgaatgcgtagataatcacgccatactccagagaaatcgttcggatccgatttaacaaacgtgccaagaaaattaccaatacctgtgataatccttttcgacataaaaccaattggcatattatgaagttgaacccaaagctctaaccttgataatggaacctaccgcgaattaacccttggtttcaccctttcgaatatcagcggagctcgatcgaaggtccatggactgccctcagttaccctttcaatgtccacttcatggtagaactggaataggaataggttcgggtctaactccttgacatagagacccctccctggctgccacaacgtggccattttgttttgcatcgcttggagatctatggattgattagttagaaaccgccccaccaatagccacctatcgtcgatctcttgaagttcatccacacccgcttcaaataacagtccctcatcatcctcatcatctatgttcaaggttgcatattgctccttcattgaatcaagaaaaaaccgtagaacagagaattatagtaaaataatcacgccaaacaacatacgaaaaaccaaccgaaattaaataaccatgtcaaaggacaagacaaaaataatcctggatgcaaaaatgatcttacatatactttgttgtatgtttggtcattaaaaacctccaaattctatacaactttaaaattactacaaaattctaaggtctatcttttgaatcttgattgtctaaatggatttttactcaaaaagagtagctttcctagtgttaggaaagcatgtattggaatatattcgtaaattgtaactctaaagacgtgttattaatgtgatatggtcaaatgttgtgtagaagcaaagtacaacgagaagactaccaagcaagcaaagtacaatggagatttaggatacgattctaataaaatttgaaatagatttaatttaaccaacaaaatctataaatttgaaatttcattttactattctttaaaaaaaaattatccttttacttattttgtaaaattttatcctaataatttcccattttactcacaaaattctttccattta

SEQ ID NO: 234836 - DNA, 977 bp, Cannabis indica
atatatacatatagattttacgtataacactgtaaaatctaattactcatcaaaactaaataaaaatactaattactttaattggatgttggatgtattggatttttggacactccatccaccattcgatctgatcccattggatatttaaaaatgacatccaatccgatccaatcacaattagatatccaatgtttggcgatcagttgtaattggattgatcggttctcattggattggatcgatttatgcacacccctccatagtttgaatactcgccattctgggtaaagtaatcacatattctcgtttgtattttaattataatattttattcgatattatctaaattcctcctacaataaataataaataaataataaaataaaatagattcgagtaaggaatcgatctgaagtaaaaacagaaattcttcaaaaaaataataataataaaaagagtggccgggttaaaagtagctaaatcgagaacgtaacatttcctcaaatttttgaatggcgctgcttaacagtaatattaaggttctcgaattatgtaaatgaaaatagtcatcaattaaacagcatcctagaaaaagcccccatgagctaaataagaccattaattaaattagacaagtcacatataataatctaaaacactggggcttctctctctctctggctagctgctctactagctttctttcacttcttccttttcttgggtggctgaagtgcttcctcatcttcatcctcttcttcctcttcctcattttcctcttcttccactacatcttcctcatcctcatctccaccatcgtcatcttcgtcctcgtcttcctcctcatcctcctcatcctcatcttggtcctcaccgtcttcttcatcatcgtcttcttcatcgccattctcttctgcaccaccaccacctgtttcgctgtcggtctccttttttgagttactcttgttgttgct

SEQ ID NO: 234837 - DNA, 1412 bp, Cannabis indica
aatattgttatataatgaaaatactgattggttgaatattgataatgtgatgttattatgcatgtgatatatatgggctcacctgattaggtgatgcaaatttcctagcgacgtactgggcgtaagtatgggcgttagtgatatgtgatgagtatcgtgcgtagaaacgagctcacatgattaggtgatgtgatttttctggcaacgtactgggcgtaagtacgggcgtcaatgatatatgatgactaccgagcgtaggtacgagctcacctaattaggtgatgcgattttcctagcaacgtactaggcgtaagtacaggcgtcaatgatacatgatgagtaccaagcgtaggtacgagctcacctaattaggtgatgcgattttcttggcaatgtactgggcttgagtacgggcgtcagtgatatatgatgagtaccgagcgtaggtacgggctcacctgattaggtgatgtaattttcctagcgacatgctgagtgtaagtatgagcgtcaacgacttatgataaatactgggcataggtacgggctcatctgattagacgatgcaatatattagtactagattgtgccacgggctcacttgattaggtgatgaaattgtatgatatatgggtgcgggtttttggcacaggctcacctaattagttgatgttgttatggaatgtataggttccagtctatgacacggacttcactgattaggcaatgcaatataagattatcagattaaagcatcgacttgcttgattaaacaacatgatgttatgaggatggttgctttagtggggtaacataaataatatttatatgattaaatgaatatgaattctattattgttataatagttttgtattacataatatctgtatactgatgtttatttgtggcagatgccagtagtgattttgatttcatcttatgaataatgggtgactgtttgattcttattatgtataaatgataatattcgaataataaattatattattgttattattacttttcttgttgagtccttgttacgtgtgctatgtgttccaggtaaaatgcaaagaaaaagctagatcaaccataaggtgagaatcttctccagcaatgtacatattgaccttactggcctgcgtgtcgagttgacaggagttgttttaggctagttgtatctgctgtgtattttaattttgtgtttaattagttatcgtatatatttttttaacaaagctttttatagtagggattctcgaaacacgctttttatgccgttataatgtccgcttatagtgttatatattagtcaagttttttatattatcacggtttttaataattaattaatctcttagtattaaattagtttataaaatcacacacgtggtgtccctataaattaggg

SEQ ID NO: 234838 - DNA, 1298 bp, Cannabis indica
gttcttatctctgacacaaacaatgataatccattgatttataagaaagcaatggaagaccctgactcaaacaagtagaaatgccatggatcaagaaatagattccatgcgcactgacaaagtctggaaatatgaaatcccacctgaagatgttacaccatagggtgtaagtggattttcaaaaagaagagaaataatgaagggaaggtagaaacctttaaagttaggcttgtaaccaaaggctacatatggtgatcttgggcatatggtacaatgataatcaataacaattattctgaagtatacctattttagtactgtaaaaccaacggaacataacttggtttctaattttttgcgaggtctagatttggaatgtctgcatgtaacatgtattcttgaagccggagaataaatgagctggaaggagcttcaggaagttcttctcaactttgatagcaaacttggaagattccaagtggtcacaacaaatgaatacagtaaaggtattaatccttctagttaattttcatctcgacctggaccatttgctcattttgctaacaaatagaaccccaacaaaagttgcaactcaggtcgaggttatgaaagagaaaatcatggccctggttcaaattctagaggtggatcaggccgtggatatgataaaggagggagaaactcaaaacccacttgtcaagtatgtaggaggtatgtacattcagctgcctattgttacaataggtatgataaaaattttatgggaattacacatggtgaagaataacaacgggaagaaagaccatgatgccttcattactactccatatgtttggataatgatggttggtatgcatacaatagtgctagtaatcacataacttcacatgcttataatatgactaatagagccaattatggaggtaaagaaaaactaaatgttcgtaatagtaatcaactcatcatctctcatacaagttctggtacttcataaaaatacatgtagtcatttactgttaaaagatatgcttcatgttccacaaattacaaagaatctgattagtgtgtctaaactcatatttgataatagagttaatgttaactactctgattttttgtcttgtgaaggatcaagcaacaaagaaagtggtgctacatgggaaaacttagagaagtctccctcttcactcaacacgattcactccatcagcctcttttgtctcaacaaaatctttactatcctgtgtaaacgctatacaaagttcagtcaagtttttgagtttttttttttttttttg

SEQ ID NO: 234839 - DNA, 654 bp, Cannabis indica
tttagttctaatacaagagctgaggaacgaacaagattgtgcttaaggatggggatttctgaggtaggggataatagcacttacttgggactgccaaatattgtggggagaaataagacggctttgttggactttcttaaagaaagattgagaaagaagattcaaggatgggcaggtcgttacttgtccaaagcgggcaaggaattacttatcaaaacggttgctcaatcacttcctagttatgcaatgaatgtgttcttgctaactaaggaaatctgtaacgaaatggagcagatgatgtgtaatttttggtggaagtcttcgtcgaaggatagcaaaggtattcactggaagagatgggaccgtctgactttacataaatctaaaggaggaatggggtttagaaaccttcgagatttcaatgttagtttacttagtaaacaaggatagagacttctatctcggtctgattcccttggggcccgtttgtttaaggcacgatactattctagaggtgattttttatctgcagaattgggtcataaccagagtttcgtatggcgtagtatctttgaggctaaagatctagtaaaggaaggggcacgggattgaattgggaatgggtcaatgactaggatctgttggaaattattt

SEQ ID NO: 234840 - DNA, 1345 bp, Cannabis indica
ataaagtagtagaacaggtgtgaatgcctctttgtgttgttgctttgattcttattattgaaatgatttcatctgagttttttattattgctttgtagtctcatttctataacttgaaatgattcgatttgaataccctctaaaattactatttcattcattagtacgtacttgagagttttggagaatgatgactttataattgagatgtttcaagacttgcttactttattttatatcttaacttgtttgaaccatgaaactttgttggagccatcactatctaatatattggttgtattattcagaagaaaagaaaagtcattgcttgttaggttcattcattattagccataaaaatctaatctttaagcgttggacatttgaatattattacatcaactctaaaccaatactacttttgtctaaattctaagctacatccatacacttgttatctctttctctcttccaagatctgaaaccatggctgacttaatggtgggaggagctcttctttctagtttgatgaatgttctctttgataggattgcttctaaagatgtccttgaattctttcgaggaaataaggaaacgaatctaaaaaagttgaagactatgttgcagtctgctgatgttctactgaacgatgctgaacagaaacaacttggagacaacaatgtgaagaagtggcttgaagatcttaaagaagtcatttatgaagctgatcatgtgatggacaagataaacactgaagctctgcgaatcaagatggagaaaggcgaactcgaaagcacaacaagtaagtccttgagctttttgaaaaagttttataatccatttgaaaaggaagtgtcatctgaagtagagaagatccttgttacattagatgatctcttagctcagacaaaataccttgatttgaaaagggtagacatgaaaacaatattactagataaaccacatgctcctttgctagatgattctaagttttatggaagggagagtgatagagaggctattcttaagctagtcttgtctcatgatgttgttgagcatgggatctctattattcctatagtagggattggtggtattggcaaaactacacttgtccaaagggtatatgctgatgccatagttccacgacactttgacttgaaggcatgggtaactatctctgtcgattttgatgttttaaaaatagctaaacttatttggaaggaaatctccaaaaatggatcatgtgacgcagaggagctgcatcaagttcaaaatgaattgaaaagtgcattgacagggaagaagtttctttttgttcttgatgatgtatggaatgagaatt

SEQ ID NO: 234841 - DNA, 861 bp, Cannabis indica
cttggcgggcctgtgcaacagagcccgccccacttaagtttttttgaaatgatggtccatttgagttgttagacacgtgatcatccaaaaaggcagcatgtatatcctcttccataaataaatcttcttggacagattccccattaatacctatcgtgaccctccttcttttttgctccaaaatgatttttccatcatcctcctcacttccattctctgtaacaattgactttccttttttattaccattaattccttccccttccacactatcctgatttcccataatcacatcactcccaccatctactccttgatttactcccataataatctcttccgatggtacagttttagtgattaccgccgatctgtctatcgccggagtagcagaagattctcccgacgtcttcaccgccatttcagttcttaaccatcgtgcgcccatagaatgagttcttcgcctcggaggtgccttcatgtcgagattgtaaggcttcgtaagaagatgtggaggagtatcaaaagctttttcgcagaatctctcggagtgacccagcaatccatagacgaagcagaaggttgataaatcctcatatttgaaaatagtgtggcattccattctgttcttcatctgtagcttccttcctttcttcaaaggtttatcaatccgaattcgcacccttactcgtaaatagtctctccacccactaagaaagttgtttagatccatcttcacatatgatcccatgtaattgccaagatccttcagaactctttctgactgaaaaccaacctttaatccatgtatttgcacccagaaaatcagttccaagggaatgatactacgtggattctcac

SEQ ID NO: 234842 - DNA, 1165 bp, Cannabis indica
tatagaacaataaaaaataaaaaaaaaataaaaaaaaaaaaaaaaaacaatagctgaatatgctcactaaccccaaccaaaaatcagacaatagtcctcaattgttttaagaaaaaaaaattatatacatgaaatgagaacactgagagagtgagaaaatacaaaatacatgatattgattcttagaaaataaataaaggaagaaataaactaacaaaataaagttaaaacatattgaaaataaagaaagcaaggaaagatagaacttgattagcttggcaaaccagagacaagtctcctcaggtgggcttaccaactcaatatttctgactatcaaaaatgaattttcttttatcatctgtctcaaaaataaaagcattagttacattttcaaaaaaaaaatggtcattatctaagtcgtagagaaaatattgtaaatgactaaataaaaatattcttcgaatttcttcaatgactttgtatatcacattagtatgatatcatttattttcattcaaaatgaggggaacaattgtagaatgagaaagagtttctttatgaatagtggtggtattgttctactctatgaataatgtaggtatcacatcagtatgataaccctcatatggacttagctgagtgggttcttcaaaattttcaccactggaggtagaggtgaaacttacctcgttaaaattgtgaaaggtggtattagagatgagtgcttcattcaccgattatagaggaaagccgttagcatgggaacttatcaggtgaccagataacttgctcaaatcctgcttaatttgttttagctcaacaagtaagtcttttatcatctcgtaatttgtcaccatagatgattgtaactcaacaatagtgtcatctagggaatgattatatagatgttgagagttatgagataaccaagatcttcctcttcacaattacactcatggattatagttggactcagatttctaactgttgcccctgattttgcccaatatacgtggaccaaccacacagggacacgtagacacgaagaccttaatattcaaattaatggctaagtctttagtaagaaaggtgtcatccgggatctgcctcccagagaaggtctattaagtcctctatgctctcggaggcctaagcggtatcaaag

SEQ ID NO: 234843 - DNA, 1620 bp, Cannabis indica
ggatctttgatgatgtttgttttgttttcccaacttgagttggtagcttctatagttatttctgtgatgtaattagctactgagagtgcatattgtccatgtaggaattggatcagtatcttgtatatatggttcttcattttcataggttgcagaggttctgacaaagcaagtaatttcttgatttaatagttggttgccattgtccaatgactgtgtatagttaatgaatagtgggaaggcaacctcattgtcattttttcctgatatgctcataaattctgcaagaattatcgtccttgatcctcattggtggtataccttcttgtatttgaaattgtatttcaagaacagtggtgatgttgtttaattccaaagtatgacagattagtgttctcagttcttggtatgagaaacctcttggtatcagtatacctgtgacttgataatctgtgtataagcatttatctacaaattttccattgtagtatagtaccaacaataaaggtttcatgattctgttatagaacagagtagtagttttagatagaagtaatcaatgttatataaattatatatttagtttcttattaaatatgaaaaacttactggtttttgaaactttttctgtgtaaatcagattctaggagctgtgatcatgttgcttttttcttttccagtgtatagaggttgaacgtgatatctcttttgtttaacgatgattcttaaaacgatcgaaggaagcatagttattttcttttccaaaagttcagttcttatgaaatgatcgactgaaattcacaagtgaagtgttgtctcagtagcttcgagtagcactgactgaatctgacaatcgaagttttgaatctcacagtcaaaatttttgatcgaaggttttatataaggaatgagtgagtttgtttttgaattttgatgacgaaagctttgagtagcttcaatggtgaattatctcggcaccttcgattagcaactgtagagtttgttttgatttttgttgatcgaagcttttgtcaagctttaatggtgattttttttttttatttcagattcgatcgacatttttgcaaagtttcaatggctcaagttatggaggtttgaatagtcaaaggtttctttttgattttttttgttctcaaatagttatatatagttcgacagtaggacacgcacggtggttgatcccattttttctggttcggtaggaatttttttcagtatgaatatacaacctttgaagttttgaagacttgaaatagagcattggaatgtggtccaattaataatttcttatcatttttctttcatttctccaaacaaacctgaaaagttaatatggtattaaattaaagagcgttgttattgagcacctgtagtgtctagcactttctaaacatgtcaccttgcggcaggttggctagcgatactccttaaatattattatattaaactatatgagactcaatacttaattaaatcaatagctatatcataatttattcgtccagaagctctcaagcttcagcatttacttgttagagaccaagctaacatgaaatccgctcaaagacctaccaagttaggtaaatatagaagttattt

SEQ ID NO: 234844 - DNA, 1716 bp, Cannabis indica
gatgcttctagaagattgataaaatggtcaattgaactggggcagttcgacataacataccatcctcgaacatccatcaagggccaagccttggccgatttcttgatagaaggtataggccaatttcttgatagaaggtataactccagaagaaattccacctatttaacgagatgcggaaacctagaagttatacgtggatgctgcatccaacgagcagggttcgggtgcaggggtaacattaatatcaccaaaaggctttaagtttcactatgcactgagatttcaatttgatccttcaaataacgaggctgagtatgaagccttgatcgccagcttaaaaatagctgaggcattgaaagtcaaaaacgtcatctgccatagtgattcacaggcgagtgtgaaccaggtcctcggggaatactaggccaaaggcttaaaaatggcaaagtatttagagaaagttcggaagaacttggaaagattcgattactttaaaatcgaatagattccaagagaataaaactctaacgccaatgccttagcgaaattggcctcatagaacaacttggatgaattgaacttagtttcgctggagatactaagcgagccaagcatatgtgaagcaaaagacgtcgagataatagaaagttctcctacatggatcactcttattatcagttacattcttgacgggcaacttccaaatgaaaataatgaggcgcaaaaactattgtgttcagtgcctcgctacataataattgtaggcaaactatatatatgagggtattcaatgcccctacttcagtgtgttctccctacagaagcaaatgaaatcatcagagagattcatgagggattttgtagggataatgtaggttggcgaagtctatctaaaatgaaattagacaatgatattactggccaacaataaataaggacacccatgagtgtgtcagaaaatgtgatatgtgtcagaggtcttcacatatacctcgcgtgctgccaacagaactaagaatgatgacctcgccctacccttttgctatatgggaaattgacttaattgaggcattactcactgggcgaggaggatccaagtatgcggtagtagtagttgacttcttcactaaatggatggaggtcgagccccttgtttccataacctgcaagaaagtcctcgactttatcgtcaagaatattatctgtaggtttaggattcccatgaagatagtatctgataatggaacccaatttgatggcgacttgttcactgaattctgcgagaggaacaaaattatcaaaagtttttcatcagtatacaggcctcaggcgaatgggcaagtggaagctattaataaaaccttaaacgatactatcaagaagaagttagacgctgccaaaggcagatgggtcggcgagctaccttaggtactctgggcccacaaaactaacgagaagatagcaacgggacacactcctttctcgctagcatttggctcagaggcaatgctacctatggaagtgaacatatcgactcacagaagagagttttataatcatgaagaaaaccaggaacttctaaaattatcctttgatctacttgaggaaaaatgaactgagtcgcaaattaccaacgcaacataccaacaatgagttagaagatacttcaacaaaagaatcaagaaaagactattcaatgttagagacttggtg

SEQ ID NO: 234845 - DNA, 1087 bp, Cannabis indica
ctaaccctaattctaaccacaaccctaaccctaattctaaccactccgcagttgccgccaacaccagcagttgaaacggctccagaatcacagccccaacagcctcacctagagcgacggcttcacgaccagaaccagtaaaaggagaaacggtgcctcccatgactcggttttgggtttctaattcctcacagacggtcctattagatgcagcgagcacactcactttagttagtccacctcactctactctcaacgacatcagttcctcaccgatggtaaccattacactggacaatgttaccaccgacctcaacgatctcaactgggaagagtgttcgctagggttggaggggcaccagtaaacaaatcatcaaatgaagcttgggtcctctgaaatcctgtcgagaatttggggccaagaaaacaaccaagtttgggtatttgagtatttcgagctttgacttttttttttgtttgagggtatttgggttgtgattgcaacccaagtttgggtcgtggctatacaagcgtggtggtggtggtggtttggggtaaggggtcgacggcttttggcagtgagaagaagaagacgaagaagaagaaacaaaagaaaaagaaaaagaaaaagaaaaggaaaaaaaaatatatttatttatttatttatttatttttattttttaaaattaaaataataatttggaccaaaaatattttgacacgtggcaattttaaaaaaataaacggagcaattaacattaggacttacagacaaataaaaattatgagcttgaggactatcaccgctattttttgaagttggggacttatctgtatcaaactgaactttttgaagacttttgccacaaattttccaaaaaataatgataataggccttaggttgcacctaaatttggctcataatcgagctttttattgttgtttccaggcaactaggttaaacatcagttcttagggcttctccaaggagccatcaaaacactatatttagtgtgagattttctccaaggacacggcatctacggctgcatattgccgtttgtgctacagtgcacggtatatatg

SEQ ID NO: 234846 - DNA, 519 bp, Cannabis indica
tatatatattaaaaaaaaaaagtatgataatagacatggggacaagcattataaaaataatcatgtcctttttcatattttgtccttattatattacatcatcttgcaataattacttaattactcaattaccactccccatcattatttatatatatatataatatacactctctcctagcaactctaagaaaaacatcaaactaaaaccaaaccatattactctctttttcttctttgcattttggctgctctgtttcagtgtggtccttcttctgttttgaataaagtattgttctttgttctttttatatatataaatttttctagtggctttgagaaatgtatgcagaggcagggcttttgttcccttgtttccagaatttttctcaagaacttcagcaatatgatgaattttgcagaacagagaagtctaatgtttcaatggtataaattatttgtacttgttaattcagttttttcttcaaattttgcatctgggtttgcttaattttcttt

SEQ ID NO: 234847 - DNA, 2840 bp, Cannabis indica
gagtgcttgttggagatggtaaacagttgaaaatcaagagcagacaatgggactttcaaactggctatctacaacaattggaaagatagatgaaagaaaaagtttctcattgcgaattgaaaggacaattcaatacaatttaagacatattaaaaaaagcaagtggtttcggttggaatgaggacctaaaacgtgtggttgttgaaaagagtatctttgatgattgggtaaaagtaagtgttactttattcaatttaatttacaatttgatcatatattaattctcttaatatgttttttattcatcgtagagtcatccaaatgcaaggtgcttaaggaataaagcatttcctcattatgatattttggttactatatttgggaaggatcatgcaaatgggcaaggtgctatgggattttcgaaaacaatagatgagattgatagagcagcagaaaaggatcaacaatttgagttcgatccatttgctcaatagatgatcttgttggtaatacaaccgattgtcacacaagtactggaacagcacaatcaagaaagagaagtagaaagaggtctagaaatgaagattcattagttaaggtattgactaacagagtgatcaaattttttgaaatacaagctgctggtggtgatagtattagaagaattactgattgtttccagttcgagacagaaggtgcaagtagaagattgaaagtgtttgatgaactaaaatatatcgatggaccatcatttaaataatgaatccaagctggaaaacttcttgtccaaaatcaagattatacggatcttttattcacattggatgatgaatacaagttgacattcgttcttggtttgtttaagtgaggtgggatttaatagttgatggtatttcaaaaaatactattggggtgactttataaaatgtaagtgtttgacttttagaaaaacttttcgccgattaatatcatcttttggatgaaactttttgcaatataaaaatacgccatatattttattataaactagataatatgcaaacttcttgaatttaaaattttaatcaatacttgtttttttttttttgagtgattttaaccaatctttttaagacatactattatgtattaaagagcttttattatggtttaaattatttattcttaaaaaattattaacaaattaattttgcaattaatcattgtgatacacatatatatataggaattacaatttgagctttttttgcgggtcgagtctttcgcccgtgacatttgaactttatttgggtcattcactcgattcggcctggcccgataacagttgtttcgatcattgttagacaattatttttttatggtaaagaagagatatatagcctttaatatttttttaaaaaaatatatgaacaatatgaaaagacaatatcaatttaagagaaatgtctctaaagatgtattatgaaaaatgaaatttacagagatatttaaagttaaaaattctacaattcaaaaaaaaaaaagaagggggtgggtgggttaagcccgactcgtttatcttgggtcggacctgacccgccaggctaaaagaagttgtcggatcgggccagatcgtgctgcagagatatcgtaatgggggctcgaccttgcccgagtgaggttcctatttatatgtatattttactctttataattattcatgattgttaatttttttataaaaaaatatattaaaatattaaataaaatttattttgaacacttagaaagaaaaaaaaaggtattaaattattagtattttagataaaaaaaataatcattattgtaaagaaaaaaagttgtcacattccatttctatgttaaccaaacaaagtaatcttcatattctcaggcatcatcataatatttttgagcacaaccaagcacggtaatgttgctttcctaggtttataattccattcaccgctctgccagtaatgttaaacctattctcataaaatgaaacctccatacgaaacggcgccttattgttaacttgaatcttatccatctccactcatttaaacttgcatccattttttaagttcttagctaatcacaattgatcaaggttcattccttaatctcaaaggtccgtatatgtattaggtagaaattctaaaattctctttttaacactttcagaaatatacatattacatgtatattttttgttttattgataatcccttggtgtgaactacaactctaacttgtagtgagtctcccgttgaaggtgttgattcatcaacatctaagaatcttatatttttttcccgttattaccactaaggttttactccatgattcgtaagttaccattgtttccttgaaattatcactatcttcatacttggttaatcactctaaaactcattttacactcaattatacagtttgttgtttaataaagaacctatggtgattcaacatttaccaataactcgaatacatgtccattaaattgtatctcaatttataagcttttccccttcctgggtgagtacaacccttccatcattatttaataaggaaaccctttcctaaaatttcaatggtctccttatataccatattgactatccagtcaactataaacacacttttatatgttaccatggtaatatcctcgcttcaagcctccattgtgctcttatagtcacaaaatgatggcccttatgcacaaatgcgtcactctaattgcttccttgattgacgctagccctagagccaaatccaagtatttcaacatgctttgttttattcgcaagcttcatgggaaaacttcctaaatgaaatca

SEQ ID NO: 234848 - DNA, 2358 bp, Cannabis indica
taattaattacacattaattagtattcatataaattaaaaaaaataaaatataacaaacaaaaagaaagatacaatatgtttaatattaattgatttagcattattttaaaatatattatttgacacctataaataataggttataggtgtaagaattttttcctaggctcaatactcttttaaaaatttaatatttttattggatatatgtaagtctatattagttaatgtgtacactcaaaagtcatacacatcaatgattgaaaaaaatattcatatactatgaaaacaaaacaagagtatataccatagaattattctaattatataactctccaagcttatttttctttttaaaacaaaaaaggtaaatttaagtattttaaaatattagattgtgtaatcccacatctggagaaaattaagtgtgataattctgatagaatatagatataaaactacacaattgaatagaatttaaataaattaattggtactatttatattaatacattttgtactaataaaaagtttcaatttttttttttttttgtaaagaacactaagtgttcattaaaaaaagtagttgggaatcacataaggggacccctccctttgataacaaccagccaaatggccattaattcttacttccttcgccaaccaatctgcaaagtaattatccttacgattaacatacagcaactgacaagattgaaaactctccataagcttcaaaacctctaaagccagaggtcgcaattcccagtacggaggacacttgcatttttccagggattgtaccaaaatgagagcatcagttaagatggccaaagagtccagattgttctcaatgcccatttgtagtgcccatttaacaacgcccagttcaccttcctccggggatgcagattcaatccttctcgcgtcccagcaccactttcccgatgccctgtccaaagttccaactgcgataccagtgagaccgtttttccaggaggcatccgtgacgcaaacagtccgaatagagtcttggatcttcttttccaggtaagtatacttcccaccaaacttgctagccactgacactgggtctaaaatcgaagtgaattcatgatatctctgtgaaattctgtttctaactgtcgcaatgttaactgctatggaactgatcatagattcatttctcgatctccaaatttcttcgaacagaacccccatgtaagtcaagaattcctttctcaccccaggaggggtaagaagaatggcttccgaaatgatatctttgctgtccatcccactaaaagaggaagttctaagagcaaacggaccactgaaccacagagcttttgcaaaggggcattcccaaaatagatgctcctgcgtttccacttcctcctcacagaacgtacagcccttgttttgaacaaaaaccagtctatcccttgtagggaggcatccagcagctactctccagatcattgtcgatattcggcagtgcaagttgttgtgccaaatgatgtgccaaattttggagtctccctccaaagagagctttaaacattcccaatacgccctttttacagagaattccccatctctagcattcttccaaattaggcagtctttttcaggatgtggtagtctagggatcatagctattctatcccccatctgccctccaaataggttgtgcagcttctgtttatcccaagtattcccaggaagggaaagatcagctacatttctcaaacttggattttggggcaacaccgaactcattaggctggtaaactcctgataatctagccaagggatccaaggttgattccaaatctcaatgtctttaccatctcctacaagcgccatactacccatccgcacaatacctctggcatcgtaaaatccctctccacattggggaatcattgcttgctgtttcaacagaccagaaggatttcttcttacagtattttgccattaagcaccttacccaaggtttgtcttgactgttagcaacctgccaagcaagcttagagagaagggccttgttgacatcctcaaatcttctaaatcccaagcccccggatctcttgggtctgcatagtttatcccagcttagggtagcattgaatctttccttctccgtcccccggtccaccagaatttccgagcaattgcgtccatctcacgacaagtactcaaagggacttttgaagtcgacattgagtacaaaggcaggttcatcaccacagattggatcaatgttgctctaccggcgtaagacaagagttttgatttccatccctcaagccgagacaacatcctttccttgagccgattgtaatcctcttttt

SEQ ID NO: 234849 - DNA, 912 bp, Cannabis indica
tttttataaaaaatacgtaaaaattataataaaaagataaatcatatatttttttttttaaaaaatgttaaatatatattcatatatataaagaacggtagatatgtaataattttttgcgtcaaattttctaaaattatattacagtacaattttttttaaataatttgggtgttgttcttctttctttttctgcttcaacttcagcaccacccctatgaagcctgctgtgaaaatggagtgagcttctttttccttcggccaccatccgtcttcgtcacttcttcattctctgccaattacgccaattcacgcaggtgacaacttctacatcccccaccctattatgtcatcaaaggattcatcatttgcatgtataatctcatgttatgttatgtcttttgtattttcttttttctgccaagacagtctcattattattgttcttccttatttcgttttctataattagttttacagtgtctctgatttgtatgattatttatcattgcgttatagagcttcatattttcaattttgaatgttaccgaatcaatacttagggtacaatcgtatatgtagtttttttggccattggggagaggggtcactaatcaatcacttctctttacattagtatcttagaatttcgataatcttaatgaaatttgattaattcctcagaaacaagaccttctctgcctaataatactaatttgtagaagcttgaatatgtatgaatattttgaattgattccagtaccttatttagaaaggtctataaagatcttatttatttatcttaattgtacttgaaaaatgggggttgacagaacagatctggaactcagtgacagaatccatgttgccattgtcacgtatggcatatgagccatcttggtgtcgtatggt

SEQ ID NO: 234850 - DNA, 3071 bp, Cannabis indica
ctccattgtcattcaactaaaatagtaagtcaatttattctattttattaatatagcattctaaaatcttaaattttaactaaaccaaaaaagaaaattaaaattaatttcttttcattcaattcaaatcatcccagccaagcaacttagagaacctatgttggttggatttgctctttgagcactttccccttatatgtacagtccgagtgaactcaatcaaaatttcattatcttttaagaaatggaaacccttttccattaaatagttaataagtgaaataaacttagcaactcatccttttacttttgtttgaaaaattaaaactgaagagtaggatcacatcttatcaaacaaaataattttcattccaaaatataaaacaatagcaaaattcctaataatactatcatttcattccattactatacgcaagataaaaattgttaccatcctccttcagtactttatttagttatctgggtacttgttctacttctcatttctctcaatatgcaaatatagctcatccaaatattaataattatcatttatttatttttatttttgtttaatttcttttaatcatttaatatttctgaggtgccttactacttaatgtcccaatcactactatcaaattttcttccccttttgtatttgaaaacttcccctcagtcataagtacaaatgccccaacaaatatcattctttaattttaaattactaattctgaatttgcactccaaataccaatgagctaactgcagtaccaaagaaactgacttgaactacttaaaaatataaattcaactctaatatttgtccctatttaaatctagacacccaagactttcccaactgctcagtcctgagactgaagcaagagaacaacctttcaatataacagtttaaaaatttcttaacttcatgttttcttcttcttcttttctcctttacttatatctggtttactttacaaagaaataaagaattatccagtcctctatacaatgtagtaatatactgtggtctgtccctcatgacatattttggttcaagccatgtacaaataaattacatactgaaaatttctattacctgagctgataccgaaaactatttgcagcatcccaatactagaggtgaggtgacgactattccacaatgttatatttttagatcaaaatggaactctttattataaattattgtgctaaaccattttccactaagggaatgccatcttgaactaattcattagcaggattctccttagcccatattgctgcatctcggtatccaaattcaaatagcctatcaagaatatgatcttctgcaggctcaagtgcccaattaaaaaactgaaattttgaattttctttttttatcagcttacgataaaaagaaaaaacagagcatcagtcagaagaagaagctagaagattacctctcgaggggtagtcctattttcaggattgcaatctgggctgattccaatcccttccaaccctaagcgattggctgggaaagcacatacgcgaacctacaaaagaaacaatatttaagtggaaaacaacttgaattttatgtgttacaaagaaaagggtagaatttaaaatgagaataacccagcttctatgcagacagatgcaactcacaaaaactgattaaaataacaagggtattcaaatttttccacctataacaaaatagtttttttatcataacaaaatattttctaccagctaaatttcgataactcaagagaaatgcccaggaaacgtaagaacctcataatcaactgtatggttttagaaagtattggtaactatcacaagtttcagatatagaagtatatcctgcatataccgtctgtttagcagatgttggaggcataaataaagttagccccccatcaacgcaaagccgattacggaaatatgttgctggtttcggtgcaagatatctgcaatgaagttaactttcagtacagtgttcaataaattgcaaaagacgtaacatgagaaaatggtaagagaaactaataccctggaatgaaggaagaagtaaaaactgcattaataagatcttctttggagtcaaacttatccactaataatcctctcggcctccagagaatctgggttacagcaactgttgataaagaagaaactataaactagctgcaagatagtagcttgaaaaatatatggctccagatatatgaaaaaggcatgccatattccagctctaggcctcaaatataaatacaaatattaacaaatcttttttccaatcaaacaatttaaaagactattagaatttgtttccatagttgtacaaaagtagtttaagatcgccttgataattttcaaagaaagccaaaatgtgtgaggcaataattgacagaaaaataatcacaattctctctgcattaaatatcatttcatattcttgaaaatagtgagcaggtagctcataaaatagtttgaaaacctagcaagaaactcatatatacaaaagcaatcatatagtatttcacctttaaaatgtttcaaaaaactcatgatatacttttcaagcatcttatcaaaagtagtttgtacaagatatcttctttttcaataataataaaggtttgaaagcctcttttctttaattccttttttgaaacaaggctccaacctaatcttacgatatttgaggaccagaaaactaaaacaaatactgtgtaggtgctcaagggacttgaagttcagaccttgtggaagcaaaccacaagaccatttgggctatccctcttgttgaaaactcatttttttggagaatataggactgttcttgtgtaggaggagataccaatgatgcttataagactaaaatatgcatcaaaatttaacaatgtctaacaaaactaagctaattaaattaacatcttaaagcacctattttccaacacacacacacaccttctttcttaaccaaatgcctgaattggtaaggagtcattttcacttacaaaggtatagccagatcagatttgatgtgtatccatcaaaaacataac

SEQ ID NO: 234851 - DNA, 2610 bp, Cannabis indica
tttcagtgacacgtgtggagtgtaactaaaaattacctttttagtcagcctcattagtgacgtgcgttgaagtgtcactatacacttttagagttactcaatgtgattcactaaaacccaattttttagtagtgcacacatgctatcttggtcacgaatgactagttaagcgacggtgttgggattcgccttatcatagtgggaacctatggccattgcgagtatcttggctagaaagccttgatgcatggatgtactcatggatgcttgcaagcatgacttggcaggagttgttcgagagaccgaagtgtgcacaaggcacacggtcgcacaaaaaatgagcccattgttactcggatagttggaaggctgaccatggcttagagagtcaaggtgtcacacgggtgttccgcagcctgcaaaggtgaacccgtgacacgaggcaacccaagtgtttaattcattataagctttccaataaagggaaaaatagaaactaagtgtaattctcaaaattctataaatatccaatgaaccctacaaattaggggtagaattctcttgtaatacttgcacagaaaaacttggaaacttacattcattatattccctaagacttttctagcaaaagagttacataataacatttacttgtggactaaggctagttaacgcgccaaccacgtaaaaactgtttgtgtctttcttgccttttttttcttttgtttttattgtttataattagtttttcacaaatcttagtaaataagtgtttttagcctcgagcagtgtgtatacttcacctgtcctcccgcacctttctccgggtcgaattcactcatggagaggaagaagcaggaaatactcattgttcagtcaacacctctcggagatgaccaatttgtcattattcctttgtggaatcaaaccatggggtgattaagatgacgcatcccgtagtgtgggtcctaccaccaccctgactctctcctgaaccaccacatcttttggaagaaattctaagcaacatcatcaatcaaaaatgcatcaacaaggtcattcttttatttaattattatcatctcattttaaaaaaaaataaattgttttattatcatttaatttattaattatttttattatcatcaacaatttttatggcaatattatcatcaacaattaatatttttaatttctaaaaaattaattatgttttatatttaaatatttaaatattttttaactatatataatgtaatataataaaattattagtatcctctaattaaaaaatttgcaaaatacattcacatataaacagacaaacagtttaaatattttagtatttagatctatatataatatactgttatttaaatgcataaatctaaatcttaaaaaaataattaaaaaaattaaatgcactgtcactcatatttatcacataaaataaataaaactaggatacaaaagaaataaaataactaggaaaggtaaactgtaattggaatcagaattatcaatgggagaaatgtatcagtttaaaatagaaaataatcagaaacaatattttattatgatgtttactaaactgtccggaaagaaaaccagaatcatattattttgtttacataactaggaaaggtaatcgtaatactttaatttgacaaaattatcattattagaacatgtaattattttctgtttataaatttttaaggggtatatttgtctgttttatttttaattaataaaattaaaattaaaataaattaagtaaggaaaggaaaatgcattccctataaaaatggagagaacatttccctttgttttctccctaattggtgtagttcccactagtttctcctttttcaaaatttagtaaacaatggtatgggaatcactaccataccattcattctcattccctttaagtaaacatgccacaactgttttcttactctaaaactgatgacttttcacaatacatatgttaagtatttatagaatacatttttctttaacaagaggggaaaacggcttcaaatgctatgctgaaaagagtggccacgtctatgagttgaaggaagagccatgcaaatattgtgaagaacaattttaggttgttgatagttggggcataaagattagcttgtgaaggagtccgtttgatcgacgagcccactgggtgttgaatatctcaatttctgaggctgggagcacttgatctgtggtagacaagaagattgagccgaatgactatgacatggctctgttagaaggggcattattgaatgatgctactctcactcgacttagaacttagcccatcttaaacgaatcaaatgaagatggattgggcttgcaacgttatcatgctagcctaattaacttagggacagatagagtatttttgggcctgaaataaatattgtagcccacaaagacacttccacgtgattagtgtttaatatacattgtatattaatttttgctattcttttacaaaaaatactaacagcagaatttacttttttactaggtatttttataagttatatactgaagtatattgtatttatttttattttttttttatttttttagtgt

SEQ ID NO: 234852 - DNA, 1033 bp, Cannabis indica
cctactatagaaagtcaacatattaccacatcatcatttttctaaatacccatcaaggagtattacccattgagaaatgttccatataaatgggtatatgtatagtcataacaaactttttattgtacaagaaccttatcattcaaaatatacaaatctaacttttgtaagtttgatttacaaaatgattaggaatgattctcctagttttaaccttcataacatcatataaattaatattacttttatatattcttcaacatcttctttgtaaaattattgcctcaaactttacaatcaactttctgcaatcaagaatattaattagtataagtcaacacacaactcaaaagtttaaatataaaatcacctcatatatttgaaaatatttccatcaacaacttccttaaaaattccaaaaaaaaaaagagaaaaattaaattttattttactaactctttagcttaatgcccaattatgaaaatgaaattttgtctaaaaatacaacaaataaaatttaacttagttggaatatattatcttataaaaaaaagaatttatattaatacatcacaatttttattggtactactcactttctaaaagaaccatgttaagtactataggcattctaaaattttacttacatagaataaacaaagttatagtagtcaacaattcaccatatataatcctttaatatttagaagctctcatcaataagaaattagaaaatggaactagactagccaaagagtactcaaatactaagagaaatcacactaattaaattcaacttagagtatggttagtatttgactcattattatcacatcaattcactacaagaaatgtcacttttagcatcacagttcgctactacactggtaaaagtaacttttaattaccatcacatttcgcaaactacgctggcaaagaggtcaaagttgcgtacatttgcaatgactaaaatctaacttttaccagcgtatttacgcgttgggaaaagtcatttttgccatcgcttttcatt

SEQ ID NO: 234853 - DNA, 1176 bp, Cannabis indica
ttttttgggcacttcagctgccccaaaaaattaaaatattttcttggcgagcctttcatgatgcccttcccgttgctacaggtctagtgaaaagaaaagtcatcacagattcaacttgttcaatttttcgacaggcatgggaaaccgtggggcatgctttatttgggtgtaaatatgccaaagctgtatggagaaattctggtttcaactttgattggtataaagcttcatcaatgaagaaaggcgattatttggtacacctttccagtattcactccaaggctgaaatggagcgaatcatttgcatgctatggtcaatatggacagaaagaaatcgtgtggtacatgggcataaagcaaagcaagctcgggagctctcaacctttgctgagaattatttactgaactatagaacagcgctttcgaaataccagcaacctcttcaaaagccggttgcagcaacaggaaatggtactcatccatctgcttcgaatggccataatcctccatggaaaccacctcctccagctatttttaaacttaatattgatgcagcaaatgaccgaactacacacacaactggtctgggagctattattcgagactctacaggtttcattgttgctgcattttccaaaaagctgctgggcagttttgattcacatgagatggaagctcttgctttgttccatggtgtgcattatgctattccctttcaatttccacatctccaaattgagactgatgcacttcgggttaaaaatgcaatttgtaaccccactactgcttcctctgtttttaatgatattatcatggatgtttctagtcttctatcttttttccctattgtaaatgtatctcttgtcagacgttcagctaatatggctgctgacggtttggcaaaatttgcactaggggtagatgaagattgtttttggtcggattgtattcctccgcctataaattctgttgttgtaaatgacttttcggtttaatttataatagcagttttttcctcaaaaaaaaaatatattttggattcacttgcccaatttattaatattcatgtcaatgtcataactaagtaataatttattcattaaaaaaaactaagtaataattttattcagccaaaaaaaagtaccatttccataaaaaaaaaagcaaaaaaaaaaa

SEQ ID NO: 234854 - DNA, 2160 bp, Cannabis indica
ttaattatttccggttttttatttttagtacttctaaaacatttttttttttgtattttttacggaattctagatagagactcttattgcaactggcgctgtaacataaatcacaataaaaaatacgtgtagcaactaccagaaaaactactttagaaatacaaaccgtaaatttgataaaaaagttaaatatatatatatatttatatatataaagtaattccccttaattattccatcaatatttgatacttacatcttttaactgcagaaaccaagctctccgttttaaggtgttgatgccaaaggttgtagttgagggtttgatcttgaaacagtgcaaaaggtaggcatggtaacccactgtgatgaagaaactcaaggggactagtacagtgtctaaataaagaagcaagcccatgtcacaaaatgtaaactactcaataagctatggcaatttcccacacatgcacacatatttttatatatactatatatcttagtaaagaagagactaataatgttcacttttaagtttttgtgggtagtgggatgtatgtcaagtcccaataattatgtgagtggatccaatgtgtaatgcatatatataatgtttcctttatgttattgcatactccttttcttcatatttcttatacgccactttaattaacatggtatctatctatctatctatatactataatatgagcattaatgctccttagtccttactaaaggggtcttttcgtaagtgatgaccattagataatatttcgttactaaagagtcgtcattgaaaatcagtaacgacattcaaagttgtaaagtctttagttgacatatatggtaaaaataagaaaattaattatatttggtattttcaaaattggttctcttttaaatttaatatttttttgaaaattgtttctcttttcttaatgtgaaaagtctttcaaatcagattgtagttttattggtgaataaatatgtgattttcttatttagattatttggtatttaatttatatttttaagaaaagtcttaatatttactttattaattcttacttgatttcctagtcaagaaaacgtgtagagctatatatttaatgtacgtatattttattttcttatttatataaggaaattttgttgaaaatttgtccacgatgaatctgtttgaacggaatgacagttcgtttgaacaaattttgactcttttttagaatatttttcatttattttttgattgtttcattacttgtaaaacacgacatgttgtgtatttattgagaatatattgatacttagattatagatttatatgaaaataaaatattttattatgttaaaaatagtactatatctatatatgttattttttttataattgatttattttatttcttttttgatatgatttcattaatatctctccatctaagttatgtgatgtccaagaagaatttcataggaatgaaattggctttgatggagtcttgatttacaatactgactagacatatcaggatttcatttgcatactttccatatctattcagatagaatttcgtcattcaatgagtttttgtaagaaaactaattaatgtttgctctatttgtatttagaccttttggagctcgattttaagtgtcatttattactataaatatgacctaaaccaacagtttaagggttgaaccctttcactccttaatttcttatatttttagaagatggtgtttcttttgtaaaggatagttgttctacaattacttagtgaacttgtgtgtctttgagtattactttaatgtgaagtaaattccaaagtgaagaacataaagaaaaaccttcaggagaaggttcatacaagtcttgctttgggagaaagtaagcaccgctatctttaggagaagatttctacaagacttgcttcgggaggaagcaagcattgctatcttcgagagaagatttctacaagtcttaccatgggaggaagcaaacattcatcaagtaatttgaagtgagttcaaaccttggtatcttaaggagattcattcagcaaatagcactacaagaaattaggggttttccccacacatataatgtgtgggaaatacatctctatgtgtggggtaaactttatacccacacat

SEQ ID NO: 234855 - DNA, 758 bp, Cannabis indica
tttcaacatgtatagtatggcattgcattcaatatcatataatcactagagtaataaccctagaccatataaccactcacttttggataataaccctaatcccggctcctcatttaatcacaatcgtaatatcaaatatgagcaccatcgtgcttaactttacgtgctaactactgtcttacctggtaacccaagtatgtggagattccaaacctctgggtattcctaagcaagcgccggtaatcctagtcacagttcctgagatttcacaatatagaattaatcccgaaattcaatttcaataatcacataattagcatatagagctcaaatgatctttccaaagatataaagaatgtccaaacggagtcccgattcaaaagttactgccaaaacaaaattggaaaaataggcatgcccactgccaaacctagtcgcggcaaccaataattcggtcgcgacaactgggttcagatcacccaaaaatcccatttttaaggcctaaaaatgcccaaacataaacttaacttcacctaagtcatacacaagcaaaaaacatgttaaactaaggtattttcaagcattagaaccacaaaatataagctcatacacaaaagcaagttccaaaaatcaatacaaattctccatttcacaagcttgaatacaaggctttgatcccacaacaaaaacctagaaaaacagagcattatcctcaaattcaaaccccaaactcagtcttaaactccactaaaacatcc

SEQ ID NO: 234856 - DNA, 798 bp, Cannabis indica
tgctaacagttgtttctccacataatattattaagtaacaatagattgtttatcagtgacaaaataataatgacaaatttttttcatgatgatgctcatttcaaattttctagttgtaattaagttgtatattagtttaataatagttgtgttactataatattattataattaaaagaaggctcaaaattagcaatacacgactcgtacaaagaaaactcaattatggtaagttttgtttgattacatatttattagttgttttaaggtttaatattagttttctcatagcaaatataactgttgcattacagttttatgacagttatcccataaatgacttacaatgcttaaattttcaaactcacaggaaaaagacgtaattttatttctcatattttacaatagataatttgatcaagcaatgaattttgtaaattatgaagctacggctcaatacattttaatatattgctaatatgaagagctagtacacaagctgaaacaggtgctggaatgcatccaagaacacacataaatgcaactaaaacaccaagtgaaagaatgataccaaccattgaggataaatgacgactaaaattgaaagaaccttacttcacaaggtatccattgtgtgtgaacatggtcaacagcataataacagccaacacctccttctttgtgatgagcagctcattagtcgcctaacaattattttcaagttgtatgtcatatttaaaatattaatagaaccataaataagtatcaatatcatatttgacacattaatgtgaagtt

SEQ ID NO: 234857 - DNA, 547 bp, Cannabis indica
taacaataataatcacgcgtgcttgaccttgtgttttttgaaaacatattttagaaaacaaagttacaaaaaacaaaattttgagaacaacgaaatattattttttgtaaaaaaaaaataattcacttttggttaatattttatctccactatatttcacgttattatattcattattttcttatattattttatctctcatcattttctcatattatattctctctcatcactctctctatcttctttctctctcatctctttctcactcatgattttctcacactttctctcccaccattttttcacattatttctctctccttattctatcttcactttctctctcattattttttttcttatcactttctctcattattttttcatattatttttctctttttattttctctctcatcaaggtttgagttcgagtccaaagccctttttttttttgtctggatatgggtccgaggccggcttcaagtcctagtctaagatccaggtccaaatcctgattaggtcttgttcatatcaggatctc

SEQ ID NO: 234858 - DNA, 1213 bp, Cannabis indica
ctagtcaaccagggtgagacatagcttcagaacagttttaggaattgtgatagaattaagagaagcaataaaagagtaagaagaaaaggagacatgattatgagaaacaaaagaaaaaatatgatatatacattggcgtttacctttacgtagtgcaatgggaagattatttttgagttctggatctgatgacgaagatgcagttgcaagacatgaaacaggaggtggacgcatggtatacactacattataggaaactaggaagtggtggaggtgctagaggtgtaggcattgcgggagctacgatcgaggcaggtgaaaaaacaagagactcgtcataacatatatcaggcgcagaggatgtaacagaataaaccaacaaatcatcatccttctcctgacaagtaggagtaggtgaagataataaagtgtattttctacaaaaataacataaataaaaacaagatatttgttgagatcaggataataacacctatactctttctgaagacgagaataatcaagaaagaccactttaatgacttaggatctaatttggtaacatgtggacgaacatctcgagcaaaaaaaatattaccaaatattcgaggagcaactagaacaaatgacttaccaagaaaaagaattataaatgggatctcacatttaagtatagaggatagcatgcgattgataagaaaccatgttgtggaaactacatcggcccaaaaaagtgtaagaacttgcatttgaaacaagagggcacgagcagttttaagatgtctgtttttacgttctgctacaccattttggggtggagtatcaatgcaagaagtttcatgaagcatgtcattagatgtcatataaggttgaaattgagcagatgtatattctttggcattgccacttcgcaaagtacgaacagacacattaaattgattttgaatctcctcccaaaaagcacaaaacatgaaaacaactcaaaacgatttttgattaaatattaccaagtaacacaagaataatcatctacaaaagtaacaaaatacctgaattcaggtttagacaaaataagaggaagaccccaaaaattaaatgagttaactcaaaaggaacactagcacgtttattgacacgtggactcaaactaacacgatgatgtttggcaaactgacatgactcacaatctaacgaagataaactactatattgg

SEQ ID NO: 234859 - DNA, 989 bp, Cannabis indica
attgaaaaagcactgtagcgtgccttaacattagggtattacaattttggtatcagagccaccaagtttatctaccgaagcttgccaagacatgtacaatcttcatcagagaaagctcggctcacggttcagtaatcccgtacatgtttagtattatatttgattattaaagtatgttaggaagcatattacattatgatcatttattttaagtttgttacctttaagtccataagagcggtattaagttttatgatcactctctaaactgcctggcttacgggttcccaggccaagtcctatttaatggacgcccagtgaaatacaagaagtcagggtaatatggttgaccagaggcggtcagggaaatcaaattccccaaaatccccgtggtcgctgtcgtggcccgtggcagagtttagggtgctcgtcttgtaaatcaaccacaagctcctccgaattgggagtaggggtttgcagaaatacaagatcgaatctgccaacaagaagaagaaattctgagatgaaggcagtagggtcttcctgccgtgcctccacaacaagctcatgctgtagtagctccagcggtgccagcagaacaacttgttgctggcaaccgtatggagctgttatacgaaagattctgtaagcaagcacctccagtgtttctgggaggtccagatgtgatgaaggctgagcaatggctcatggtgattaagcgaattttaaattttatgggggtcgttgaaaatgatcgggtggcctgcgctgcattttagttccaggaggacgctctcgtgtggttggagttggtgtccgtcactcgggatgttagtgtaatgacctgggaggagttccgagagttattcaatgccaagtattataatgaagctgtccacagtgctaagtggaaggagttcacagagttagtgcaaactgaggggatgtcggttactgagtataccccaaagtttgaccgtttggccaaa

SEQ ID NO: 234860 - DNA, 932 bp, Cannabis indica
aaaaaaaatatataaaaataattctgtatagtaagaacatttaggattattaaaagtaaaaactaatttagaaaacttttcttagtacaaataagttataccacaagaattaagatctccggttaaaaagtgatgtcttaaactatgttaaattaattaaataaaaaattaaatttctaataaaattaacaaaaataattaatatatttaatataaattagattaattgatgtattaaattttaataaatttaacacagtataaaacacttatttttaaccgggatcttgattcctacaagagcatcccttccaccttcgactggcgaatactttacctatgtgctattatataaatatatatgttgaaaaccagtaattgaaattcttttgcaatggaaacgagaataaagttttatacaatgacacgtgtaattgtgtgtgatataataggtagccttttgttataaatttggaaccatatatcactagtacacatgcaagtaaaaaagtcaagtcccaaaaacagtcaaatatactgttatcagtctttttaatatgacaaattattaataaataattaatttcaaagtgttatattaatatagtattaagtattttaatgtgtcaaatagaaatatttaaaaaatatcaaaaggtactaataattaatgtattaatttattaaatattattaattaattgtaaaatgctatttctaaatagtactaagtatgatactttatactaatattctgaatactttaaaatactcaatactacaaaaggtgcatttcaatatcacatcttataaattttatttttataaataatataaaaaaactgttaactaattattaagtgttaattaaatactgctaccaagtctatagcaaattaaaagataagcaattacatagcataattatcaga

SEQ ID NO: 234861 - DNA, 2452 bp, Cannabis indica
ttttgataaagaattcttagtcgaattatctcaaagtcttgcttcttcagcccacgtgtcacagtccagttggtccacgtattttggacaaaatcaagggcaacaccaggtaaaatagtagttagcacgtagagttaagcgttgtggcgctcatgtttgacattttgttgtgattaagtgagaaaccaggattagggttattacttttaaatgagcaattatgtggtctaaggttattactatagtgtttaaataattttgaatgcaatgccatgttatatatgttgaaataaagaattatgcgggtaaggcataattaggttagactcggtaatcgaaactgagataaaccaatctaaggccttactgtaaatagacgtgtgagcgcaacacgtaggtctatattaaatagacaatagatacggtggcatcagtatttatttgaactgagaatatattacatattgttattcatactatcttgttgggcttggctcacgggtgctctactgtgcaggatagggtaaattagttggtgatcagccatgagttcgagggcttggcggtggattgtacatgttcgagtctagaccatgcgggttgggtctatcagttgatctatctgtattctcagttttttcgcttaggtcgacatgtaaaaatgacttgtaatattttgtgaaaatttttacgggatcccaaaacacatgtaatattttgaaatggttgtaaaaatagttacaagttatatttttatttcttaaatagtttaaagtttaaattctgctcttgtttctagtaatcccagtttagcaggattaggttatgtttatcgaaaaatcgtagtgtgcctaattgttagggcgctgcaatttggtatcagagcgccaaggttttttaaacttcctgtagaccggctgaacatgtacaatcatcgtcagagacaagctcaattcgtaagtgtgagagtaaatgcttaattgcttatgtgattatttgtttaccgctttctattttaagcagtatatgagcatctagaatgaatgctatatggaaagcatgattagtgtttcatttaataaatgtttatttaataagagaaatagaatggatgagttagggtttaagacaataagtgcgtaatgtggtattggtgtttgactcgcagagattgttgatttcagggctatttatgaaaatggaccctcgacaatcatctagaccacagggttagcatgtagagcctagtaatgacaaagccaatccaccggcaccgcctgcgcctccgcagaatctgagggataatgcgggggttaataatggtaatccgattgccgattggcaacaaatgttcctcgaaatgtgaagtatcatacttcgtcaagaagatgaattgagttggtttaggtaatcggcaccaatagtaccagtagaacaagtgttaccgccagctcctatttcagtggtgggtgacccgggatttatcctgccacattgagattctgtgttcgaacgtttcattaagctacaacctctaatgtttctgggaggtactgatattatcaaggatgagcagtggatgagcactattacccgcatcctagataacatggaggtgtcagggacggaacgacttaattgtgctgcattcatgttacaagatcatgctcgcgtctgttgggatattgtgggttagacccgagacgttagtaccatgtctcgggaaacgtttaagaccttgtttaaggaaattttttataacattgctataagaacttcatatatggaagattttgtgaagttgacccaagggaagaagacagtggcctataccctaaaattcgatcgtctatccaagttcgttggtgacctggtaccaacggacttcacccaaaaacaaaaatatataaggggactgaatgccacaatcagtcgggacttgaagattaccatcgattacgacacattatataagaaagtggtcaagttagccttgattgctgaagaggcagagcaacatgtaattaaagaataagctgctaaggatgttgttacggcatcaaatcctagtgtgggtggtagtgtcagtaaggggactgacagtgacaacccagatcacaaacggaagactgaaacttctagaacaccgagaagtaatagaaagtattggggaaacagatggccatcaaggtcacgggtcgacatttagatattacccagagtgtcccagatacaagatgtaatatcccaataaccctaatggtaagtaattaggatttataattacattttggattaatcaggtaataagtgggattatgatcctactaatctagttcaacataaattttaaatttgctataagtgagtaaataagcataatttataaattacggagatttatatagtatgtgtaatgaccgctctagtaatgtggattagtaaaggcaat

SEQ ID NO: 234862 - DNA, 2081 bp, Cannabis indica
atttatacattaaacaatcatgaaataaatcatgtgatccatgcaacataaaatgtagtttctggtctttattaatcagtaaatctgattatattgaaatgagttttatttaaggcactaaacccaacacaaaatccctcttcaaaaacaccaaaatcactaacattaaattaaaaccataagattatagaaatagagtgagaagggggtcggttggaaaaggtttcaatcataaaagagatttcattctttattatttttttttcaaaagtgtaaatatataccattttacaatttgtttggtcaaatgatcactttgcccatagggcctataaataacataaataattaccaagggtagttttgtcatttcatatcacacatataatatataattccatatatatcatgttattgccttaagcacataactcacaaattttggatcccaaacttggtttgaccaaaaatacctgattgtgactgtaccgcgctaacttgtcaaaaattacctacaataagacaatatgaatatactatacaataatatagtctattagcacaatataaatcaaaattatgattttactatccttgggcaaaaattacaaaaataccccaaacttataaacagagtcttaaatgtgaataagtcttatataattttcacgttattagttatataataatataattactcaatttccattaatccaatttatttagggttgctaatctatttactaatcccgagatatacagaaatcatctgaaagttggacccatgacactatggagtgtcttttaaactttttgaaccacgaggatgcagcttcagataaggtagcaggggataacacacatttcaaatccccaaccacttgatgtgcttacatgagagtattgaaatcacttatgtagacgccatggtcagtggtcgcatcatacttgatattgtagtttgcatttcaaactatagattataaggtaatgccaagatacaaggtacgaagggctttattttttcatcagattcatactccttcattttattgttattcaaaattttttggagttgtcttttaagcaatgttatgcatggatttccatttggtctaccacaatcaactcttacatggacaggaggattgttggaatggtttcgaacatgtggattggctccttgaaaatgaggaatgtcggcacagttaccaacatgaggattggctccttgaaaaggagggatgttggtgtagttaccaacattgggatgtgttaattggggatcttctctttggggatgccccctttataaattttcacttgatctttccccatggtattgaggattagtgtgatgtgcttgataggactaaggttgaatgttgtcctaaatacttatggagaaatttagcgagtcggtaccgtcactatcttcgaggaaggtttgttgaagatttttgaatgcccccagttgggaatatgtggtggtagcttgtgaccttgaacggtaactcacctcttgagtatattgtcgcctttctcggtgagggttctcccctttttcctagacgtcgagccctatattccttacaacgtgagatggtcgcgaaggtgggtcatgaccactatgtgtggcacaattttgattacctaatgcataatttgcatcattgtttgcacgaactcccatgtcacctaagaggaggtttttatattccatatttccttaggattcacgcagaggaggaaaattatgttgatttggtcctccttgatatgggatcatatatggcacaactacccatgggacatcctctgtttctctttgaattagagggttatcttctttcttctctacccatgcccaagtctctaaagggtggagttggagacaaattttgtttaccatgtgggccatctccattcaatggtgcatgagtgtgtcgggtacgtactccaatggtgggtattgacaaatttgtattgcaaagagcatcattggcttggtttgctttgttatgggtacctccatggtgggatagagcaccatggtcatctccatgaaatggcgcatgggt

SEQ ID NO: 234863 - DNA, 1056 bp, Cannabis indica
aaaacaattaattgtcatacaaatgcttccgggcagacgaatgtcatactttatttttttttagaaattttgagatattataggagaaagggtcagccaaatataccttgcaatcttaaatgatggtagttttcagtgtgacagtttaataagctaaacatggtgttgacaccaaaagtagaaaaactaaaattagttaaagagtatcgacctattgttttgtgtaacataatgtaaattgtctctaatgctttatcactgaggatgaaaagtgtttttggcctatcatcttatctttccaatgtgcatttgtcccaaagcgttcgatacctgacaacattatggacagttttgagctgtttcactcactgtttaaaagaaataataacgagataaaaggatttatggcactcaagcttgacaagagtaaagcatatgacagggtagaatggaggttcttagccagtatgatgtgagcgtttagctttgctgagggttgggttagggttatcatggattgtgtgacgatcctagagtacactttcttaatcaatgtgcgccgtaaaggccgcgtgattcgaacaagagggttaggacatggatgtcctttatctcttcatttattcctcttgttatctcaattttggtactctgatgtggcaccacatactaatgacacgtggaatcgacttcacatatctgctcaaaagagatatgccgaacaaagcattgcaaatatctgcaaggacgaagccttcttagccgggcaatagacggtccgggcagcgtgccaacacttagcaacttcaacgcttgcatcgtaattcacagaatcaatccctataattatgggatcatattacagagatatgacaagctgtccaaatcccttgattagtgtattctgtatttaatgtgtaatcctaccaattatagacattgtaaacagaagggaaacttttccatcaaaacttatagccctataaatagtgatctattctcactgggcaaagggtcgagaaactaatctaagagtgttatcccaattttcgcact

SEQ ID NO: 234864 - DNA, 839 bp, Cannabis indica
aatcaattttttttaattatattgattaataaaaattaatttttttagtttttcagtacaaatttttgatgagtcgcaacatacaataattagaaaaacaaatttttaatcgtcttaaaacatcccactaaataaatatattgatcattattattaaatattaatagttttgttttatttttaaaatattagattatttatttttaacatttggcttagtagacaaattcatcaaagagaattaattagtagtatgacttttgtttggtcatattatctgtttgagtaggtatattataggatttttcacaaaaatactagaatctgggcaaaaatttagaatttactgtcacacggaatttttttacaaaaatgctgtctttttataaaacaacaaaactgaacaattaaaataacaatggaacaactaaaaaacaacataaaacaacattaaaaacttaacacggtacacagtataaaatttacatagtatttttgaaaaaaaatacaacattttcgaaaaaaattccaccccacaataaaaacgttggaaattttagtatatggtgtaaaaacccctatattatagtgtttatatatacatttatatgtatagaattattataattgtatatatacatagtatattaaccatgtttgatgtgtgtattctattaaatttttttaagagaatttataataatctatgtattatacggtggtgattttttaaaactgtaaaaaatgcgacctttaaacataaatataaagttatttataaattagtgaagtgatttagttaatgacataagtgtaataaaatgataatattatgacta

SEQ ID NO: 234865 - DNA, 1238 bp, Cannabis indica
tcaagctcctcctccttagccttgttctctgattccaacaaacggaagacagatcgaaggacccctctttcttcctggaggctggtcacttctttggactaggaagcaatggcagtttcaagttaatcatacgcctctagatctttggtcagctcgaccaccttttccttggcagcgagaagtttcttgttaacttctctcagttccatccggactaccccaagttgaaccctggcttcattagcatcgttcctggccaagtccatttccgcccgcatggtgttggacatggcagcatttttggaggcacctgacatagctaaggaataagcataagccatcttcagaccggtctgcacagagaagtgacattaaaatttgagctaagtaaagaaggataaaaggaaactgttaggaaagacttaccctcataaactccttcaggacgcctcccatcaccagatctagggaaaggtcattatcaacttcggccaactgctcattcaccttagggaccgaccgagtcatgtagttggtgagcatgtcttttcctctcttagtctctggatgcagtacgggaggtggggtaggggcgctgatctgctcggatccgcccttcgactgctcgggcctgtccgagctccctcctcgagagtctttggacttagtcatttttggggagaagggtctacgacggttggctcctcgaagagatcaataatcacctcggtcggggccctctctttgggcggggttgtctcaccacccctagacttcttggccagaggagataagcccgagcttcctcccagtctcttcttcagagcttcgagcattttctgagacatgtctgcacgaaatgaaaagcaacatagttaaggaaaaaacatgagatatatgaaaacataataatcaagaaagttaaagacaagatggagaattttgcacattggcagaagcatttgcccgagcaagacctgatggagcatcatcatctgacgattcttcttgctcctccaggcgtctttcccctttcctctacaggagtggacggccaagcaggtaaactgggctccctaatctaaatcttattttcaatagtcctgtgttcggtcagaagtttctcttccttttgagtggagtctccggctcttgctcacctcatcttcctgctcaaaacgctcttgagcttagttcttggctcccgcacccccttcaacttgcagcatgcttgagtt

SEQ ID NO: 234866 - DNA, 1302 bp, Cannabis indica
agttgcaataggggtttctatacgatttttgttgcaatttaagttgcagcgctagttgcaatagaggtttctgtgtagaattccgtaaaatacaaaaatagcaaaaaaaaaaaactattttaaagtgtaaaaatgaaaaaactcctaaatactacccatcttacccacagataattctgattacataactttttaaaaataaaattctaacttaaaattaaaaatctattataaaagattaaaaaaaaaaatactacgttaattttatttaaataaacctagcttatttttttctcatacaaattttcttttgattactattaaggtaaatgtattttctaatcaataaagttttttaataataataataaaaaaagaaatcacttcatatgttgattttaatttttttttttttctaaatttacagttcgggttgctctggtagtttctcttagtttctgtgtggttgctatacgaattttggttgcgatttaagttattccgttagttactattagggtttttgtgtaaaatttcgtaaaaataataataaaaaaaaactgctttaaagtgtaaaaataataaaaaaaaaccctaaaaaaatataatagtaaataaagttgtaaaagattctttaataataaaagggaattaggtttttttttttttttttttgaaaataagcgtattcatatattaatcaaacaagcaattagacctcgcgatcattacaaaatagattctccggtaaagaggagctcgggatagagccgtataattggtgggtaaaagcctacttaaccacattatgagaaatattgttacaagtcctactaatattagaaaaattacaactaataaaataaagagatgacttcatacaaaaagagacatagttttcaagagcccaatggaacacctttcctttgagcgcattgatagcaattctcgagtcactctccacaataacatacttataccctaaatccatggccaaagaaacagccaagcagcaagccacaacttctccacataaagcatccgagaaatccaatcgagccgtgtgaatttgaaccaccttgcctagatgattccttgctacaacaactatgcacatactctctaagcccactctaacatcacaatttagttttatccaatcctgaggaggagtccaaatttccttcaagatcggtgtaggactaggcaaaagagaagcatgtaactctgcaaaagaagtacaaatatggtcaatacatttagcacatccggaggagagttattgtgtaccatgtcattacg

SEQ ID NO: 234867 - DNA, 1088 bp, Cannabis indica
aatacaagagaggggggggaccctctcttggtaatggataaggtcatagtgtggaatgttcggggagccaacaaccaacaaaaacaacaactaataaagcaatttattaggggtcaaaatgcttgttttgttgggcttctcgaaacaagggtcaaggttcacaagcttggagccttgtaccttaatgtttttaatgggtggtgcttttcgtcaaatatagcttggcatcgaggagggaaaattgtgattgcatgggatcctatgaagtttaatgtggatattctcaagtgcactagtcaactaatgcacttaaaattggctacagtacatgggaatttttgttgttttctcacggtggtctatggagcaaatgaaagggaaggcaggaagaccttgtgggaggatttatgcaagctggatactaatgataaatggctcctgatgggagattttaatgcaattttggccagagaagaacgagttgggcataaggtgaagtatcgcgttgagacagaatttcttcactgtgtgcaacattgtaaattggaagatataagggcaactggatgttactatacttggtctaataagcagcagggacatgatagaatttattctaaaatagaccgagtgttggctaaccaggaatggattgattgttacccgaatgctgaagcgatctttgttaatgaaggggcttttgatcattctcctagcatgctatctctgtacccgaattggagaagtggcaagaaacctttcaaatactttagaatgtggtcatcacatcctatgtattctacaaaggtcaaggaggaatggaataaagaaactaggggcaccaaaatgtaccagcttatttgtaaattgaaagctctcaaaccagtcttcaaagagattaataaagagggattctcggatattcaggcagcctattctcaagccaagactgatttggatctgcttcatgaccagttgcaacttgatcctctcaattctactctgcacactgcagagctagaggctagagacaaacttgcagctacttttaaaaattacaattctttcttgcagcaaaaggttaaggc

SEQ ID NO: 234868 - DNA, 806 bp, Cannabis indica
gatccactttaaaaattcgttgttcatcattatcaaattcattccgtaaactgttttacttttgattgatattcacttgtgttcatcttgctcgtttatgatcttcttaggcccgttgacaaaaaatcgtgtcaacaatttaaacacacaactatcatttttttagatatttactttgaaatattattttatattttaaaattatttatatatattcatgtacacaaacaacataaatagactatagctacacttaataaacactatattattcacttaattaacatattggtttaagtcagatcagattattattattattattatataaatgagatcagattattattattacttgatataaattaatataattttcagctgcttattatatatttaatatttaattgtttatttatctatataaaaaaggatgttctactttatagtttataattttaactaataataataattttaaaaaatattaaaaaactactgatcttcctcttcctattgtcatccaattattttgcttttatactttgttttttgttggtaaatttgagaaatattggcaacaatacaataatttttaagttacttttttactaaatattaacaaaaccccccacaaaatataaattttctcttaatataagaacaaacaataaaaatttatacgtttgctaatacaaataatatatatttatcacccactaattaaataaaatttgttagtcgcgcgtgactatatatacataattaatgaatatagctagttaggtctaagcttgtgggaatga

SEQ ID NO: 234869 - DNA, 2854 bp, Cannabis indica
accaaatgcataataaaaaaaagtcattaatccaatttttaagtgacctctattaagggagtatataattttgggatgaaattaagcaaagacaactattacaacaaatttttatccaatcataatataaatcctacatgaacaaaataattgttaagttgaccaaaataatcattactattattattatttaaaaataaagataagaaaaacctatttatagatttgttaataataatattttgcttcccaaaatagcaaaaaatcaagctttaaaaacaaaggaaattgcagcctattttccaagacaaatattttttcttcttctttttttttttttctttgatacagagagaaaagaagaaattgaagccatgggacatagtttagtttcttcttcttctcttgttcttgtcccaatggtacttcttttctctctgtttcaatcgccaaccgaagcaattcaaaaggtaaaaattaaaattaaaaattaaccaaaaaattttcataacattttcttatgttatcatttttctttacttatcaaaattctctaattgtgtttgattttcatgtagtcttacattgtctacatgggagctcattcacatggcccgaaccctacctcgattgatttagaaaccgctacatcgtcccattacgctatgctcagtacttacaaggggaggtacttagctaattttgacacaaaaatttctcttctttgttttttcttgtttgtttagttttgttgtatatgttgttaaatttttttgtttcgatcgaattttaatgcagcgaggaaaaggcgaaagaatcaatgctttactcgtataatacatacattaatggctttgcagctgtacttgatgatgctgaagctaccgagattgcaagtatgaattttactctattttcctctgtttactctgtttttttaagtttttaataagtaatatttttttttttgatatagagcatccaaatgtgttatcggtttttgaaaacaagccaaagaaattgcacacaactcatacatgggattttcttgaattggagaaaaatggtgttgtttcgaaaagttcgttatggaaaaaggcacggtttggtgaaaatacaatcatcggaaacctagacaccggtaagtatctcatttgttaggatattatgccctaaattgtttataaaatcacatgaaattgttgtaaccattttatttttgcatgaaattgtatttaggtgcttggccagaatcaaaaagctttagtgatgatggaattggacccattccatcaaaatggaaaggaatatgtcaagatgataacaatgataaattccgttgcaacaggttcattcaatccttatatatatatatatatataaattcttgacttgaaatattataaaatgattaagaagaagaatttgcagttgatatagtttggatgttacgtaatgttatcatgggaatgattgtatataattatgaattttctattgtcatagaaattatatattcatattctatgttacatcataactatatttattatactacatttcacaccacacctaacatttttataaaacagtttttttttttgaaaaatgtataaaatacagtattttttaaaaaaaaatttgaaattttaagcttatatacatttttttaaattactataatatacatttttattatgattacatacattttttattaattttttatatttttataggaagcttataggagcaagatactttaacaaaggctaccttgcatatctcaagcttgtcaacggtacaatgtccccactacaaagcaaaacaatttcctctccctgcgacactttcggccacggcacccacaccctatccaccgcgggaggcaattttgtccccggggcaaatgttttcaacaatggtaacggcacagccaagggcgggtctcccaaggcacgcgtggctgtgtacaaggtatgttgggatggagacatgtgctttgattccgacattctcgccggttttgaggccgcgatagccgatggagttgatgttctttctgtctcccttggcggtgctgccgtcgagtattttcaagaaggtattgcaatcggctctttccatgctgttaagcatggattgaccgttattgcctcggccggtaatgatggaccgagtgaacagaccgtcgctaatactgcgccgtggttaataaccgttggagctagcacaattgaccgcgaattcaccgctcccgtcactcttggaaatggaaagatactcaaggtgattttttttttcataacacaatttaaattctcttttattaataattcatccaattgtaaatatgacagggtcaaagtctttcttcaataccattaccatctaaaaatatgtttccattactaactggagctgatgctaagttggccaaagcaaatgcttcagaagcgtaagtaaaataattaataaattcagtttatcagagctcgtttggtacgtcgtattacaatacgatataatacgttaaacactgatggatgacataattttataacagtttgttatgtaagcctaacactcttgacccgaagaaggctaaggggaagatcttagtctgccttaggggcgacaatgctcgaatcgaaaagggtcaacaagctgctcttgccggtgcaatcggaatgattttggctaatactatcacagatggaaatgatgtcattgctgatcctcattatcttccagcttctcatctcaactacaatgatgcaaatttgctctttagttacatcaagtctactaagtactaatattttttctcttttttttatcataatggaagaaa

SEQ ID NO: 234870 - DNA, 1123 bp, Cannabis indica
attaatattattggtttaaaattcagattagatattataaatttataaaaaataattatatttaataataaaatttaattaactatatatttatcaattataaactaatatattttaatttaagttataaaattattaataaaccaatatacatatatattatttaattttattatattttaatttaattttatattattaataaattaataatatattattttttatatgtaattctaattttatatgattaataatatataaattttacataagaaattaataatatattatttgttaaagagcaattaacagaatatttcaactactaaacaaaattataaaatacacacattatactttacatcaacattatacttcatatcaaaatgtacatgacattaattttaaccaaaaaaacaaataaatcagagtcaatgcaaatctaaacaaatcagaacatgtttagaaccaaaaaaacctaaaaaactaaaaacaaatcaaccataaatttggaaccaccaccttcggccattaatccaaaccaccatcctggcgaaaaccccaaattcccacagtccacctacacagcaaaaacgagagagaaacagagagacaaaaaaactcaaataatcatacatatctaatatgtacgagtctttcttcaatgaattaagatggtagagtagatggatcaaacccatgttcgacgctgacaagcctgccccaaatcaccggagcatcgccatctacctgagcaggagcttggtgtggtgctgcgctgagaagaggccgagattggggctttgttctgggcacgaagacgtcgaactgagaggagatattggggcttcgaggactgaggagggagaggcgggcttcgattgagagaaagaagaggaaggctttgttgttggttgtcggagaagaggagcagtagctccgattgagatgagagaaagaaagggagaggcaggctttcgaatctgagagaaagagagaggcatagtcgactgagagaaggagagagagaggcttcaatcgaagagagagatagagagtgaggcgtcgactgagagaaagagagagagaggcttcaatcgaagagagagagagagagaga

SEQ ID NO: 234871 - DNA, 792 bp, Cannabis indica
cgtttcttgtcaaaagcgggaaaggaggttcttttgaagtccgttgcccaagcattgccttgttatgccatgagtgttttcctgttaactaaggagatttgttctaatcttgaaggtatgatggcaaagttctggtggaagtcccaatctcgttcgggctcaaagggtgtgaattggataagttggaagcggctgagtagacataaaactgatggcgggatgggattcagggatcttcgcgattataatctttcgtttcttgggaaacaagggtggaggcttttaacaaatgaagactctttggtaagcaagatttacaaggctcgttattatccttcgggtaactttcttaatgctaccttgggacaaaacccaagctttatttggaagagtattatggaagcacaagggttagtcaaggagggttctagaaaatctattggcagtggcgataatgttagtatcctgttagatccatggcttcctgacccttctaatccttttgttcaatctgatcatccggctttaaggaatcaaaatgtctctagcttgttttcggtgtcttccaagagctgggacattgatatcattaatgatctctttgatgaaagagataagaacctggtgttgtctgtccaattgagtgactctgctactgttgataactggtgctggtatgatgaaaccaatggtttttacacggtcaaaagcgcataccgcaggcttcagcaagctactggtgtgaatgttgctgatcaagacaaaaggatgttcaaggctatctggaagttg

SEQ ID NO: 234872 - DNA, 1133 bp, Cannabis indica
aaatcttttaaataaaagaaaggagtgagaaagattttattaatattacatacaaaaaagacaaaaagaaaaagaagaaaaattaaaagaaaataatctacaatagatcaatagttatgatgtctcggaaaaaatggaggaaaataataaaaggaaaaaaaaataatcaccaagaaaaaaaaacaatttcatttattcaatctcttttgacttttgctcaattcatagaactttttaatgtaagcgtggacataattttatatttgtcttttacttcctaaattaatgtataccatcaggtttcaaaactaacggtattattattatatttaaaaacaacggtattttgaacaataaaataccaggaaataatttcgcaattaaaatgtaaattgcgctgcttgatgtaaataatcctatttttaatgattagtttttttaaataattaattaaagcatgaattctctcacataactgacgaaaaaaagtgattagacctactgcgtaaaaagttgaggggatatttctgaaattcgatagtatcacaaaattccagcgattttacttttttttgttttttcagcctaataaacttcaaatcatatgcacagaaacattatttgttgtcttcccaaaacattatggtgatctttgttttattgtattgtaatgggaatagcaatagaatcatgtttgatttaagtgtgatgacaaaaatgtcgttgtttaattattttaaatattaaaaatttaaataaaataaaaagtaaaaaaaatatttttaattatattttattagtttctaacaattacaattggctttattattcctgcttaggattacaatacaatgaaatgaccattattattgcaaaactttaaaattccaaccaagactacaagaaacaaaacttttcctcatactttagagaagtgcatcacaaaagtaactttttaagggtcactttttacaaatatataaccgggaaaaatcttgatttttaaaggtaaaaatgatttttaccaacgtttttttgtgaaagatgccactaaagaacacttttgcttaggagtgtccataaattgatccaatctaataataattgactgatcaaattacaaccgaccgtca

SEQ ID NO: 234873 - DNA, 989 bp, Cannabis indica
tggagaagaagaaagcttttacaaattttggcgaaggttctgtaaataaaattgttcaccctttgcacataaaaaataggagtatttataggcacatatttgggtaagggcatacccttcaccacctagggtttcttacttagcacattttaatagctggtgtttacaacatggcgatctgattgttggtaggtagggagcctcctcatcgtgtggtgcacggctgctgcaacccaactcgtgggactaaggacatgtgtcgcccaaagtttcaccttgcgaagtctgaggcagaggacaaagtctgatttggtgttaaaaggtatgcaaccgtcgggtttggctccgaaaagggcatatccaagtgagttctaggaacgtctagctaaagctttcccaaaccaggttaactcgctaccatcttggagcacttgtgacttctaatccctgttgatagcagttttattaatgggaatcccggagtccttttccacattttccagtagaaagagcctctaggtaacctctggtattatagcgccttccgtaaccccgaggagcagatggtatacattaaccatgcgtaatatgaagtgccatccttccgtaattgccatatacacttcatctgatattaaattattaatatttattattgaataatttatataaatatcgaaaaattacttattaatatgaggttgtgacttgtaactgtacagagaacaaagataacttagctctgaaacagtcagcaacatattatttaagaaatctttagtcaatggtagttagtacggttcactgatgtctattcttcggtacaagtaatctcggtttggattactaatgtagtatgatatctaagtgaaggtgttatatataatagagattatatatgataagcactaatataaataaagttgttgttatacctaaaatttggtgagcacatcataggaaaacatgtgtcgagctgggaagaacga

SEQ ID NO: 234874 - DNA, 788 bp, Cannabis indica
tctctgtcgctttcaaaattaattgaattaaatgttgaaaaaaatgtaagacaattaaatgcggtgagcgtggatcgaacacgcgacctttagatcttcagtctgacgctctcctaacggagctatccccgctttatgaaaattctccaccatcaaaggaactgtcttaaataattgtagcaaaatgaccagagatcttagacaacgaagggttgttgcttgtgtttcatctctttcaggtgactgactgacgggtagatgttggttgattcattattgagcttttttattattaagtttattatgctctgcaaaaaaaaagggtaacctgtcagacaaccgtgtgaccaacccaactagccgaagctgactgagaacgatcctctacagccacgatgatccaagggaacctcaagccgttaatcacacagtcatgattcatccactaggtttgatttcctgtctccttagaactcaaggaaacagaggtacgagtcgatagaacacatcctgttcaagtaaggtggtgatagttcttcctattaacttttcttcttaggttggtcaatctaaagtctaaaccctactcacactcagtactcacaaatcaccattctcaactcaaattcatttctttgatccgattcacagccatggagataatctccgatttcgaagaagaacacaaagagaccaaacctaagcctaagcccaacctcaacctcaagccctccgcatccctcttcatcctcttcctcctctgcagcgacgacttcgttacttaccag

SEQ ID NO: 234875 - DNA, 1140 bp, Cannabis indica
tcatcatcaaaattttcaagggcacgtttttaattagtagcaacaaggattctaacaacagagaaatcagtctcaacagaatcaacaacaaccacaacaataaggtctagtggagggtctaatcttccaacaaatatgctacttcagttcatgatagagattaaatcttccattaaggtcttacaaactcagatgggacagttggctattcaaatggccaaccaaaatcaaggtaacttgtcgagcactatagagaataattcaaaagagaaatttcaagcaatttccttaaggagtggaaagtatatgagaggcaaagggttgagcaacaagtggttgaaaagaagtcaaatgtgaagaccaggatcaacaggcaccaaaagagaagaagaagactactgaaggtttgtaacaacaagaagcctcacctcctatcagcattgatcaccatataaacggtcccttaccctcaaagactttgcaagaataatctggataagcaattttcaaaattccttgaaatattcaagaaactgcacatcaacattccattcatagaagccttggaacaaatgccaacttacttgaatttcatgaaagacattttatccaagaaaagaaagttggaagaatttgagatggtggcacttactgaggagtgcaatgcaatcctgcaaaagaaattaccacccaagcttaaagatctgggtagtttaatattccatgctcaatagggggttcaatggaaacaaaagctctatgttatctgggagcgattattaacttaatgcccctatctgtgttcaaaagattaaaattaggagaagccaagcccacaacagtgactctacaaatggcagaccattctttgactcatcctcagggtataattgcagatatttttatgaaggttggtaagtttatcttccctgctgatttcttaatacttaatatggaggaagatgaaaatattcattttgagaagaccattcttggctacaggaagagttctaattaatgtacaaaatggggaattaaagttgcaggttcaagataaagagatgaattttaatgtatttactccgattttgaacttttcgacgtcgtaggaaaagactggtgtgtgagaattgtgaaggt

SEQ ID NO: 234876 - DNA, 697 bp, Cannabis indica
cccgtgagccaatcccaacaagaaactataaagtaatgatatacatacttaccatgcacactatataatcagtaataccattcccatatgcctgtatgacacagacctgcatgttatgctcacatgcctatttatgtctacgtagcgtagacctacgtgtttcccttacacgtctacttacaatgaggccttagaacggttcctctcggttctaattactgagtccaacatggttatgccttgaacacataaccctaatctcggcatagcattcatacaacatatattcatattctcatatatatattcatattctcatatatatatatatatatattcatattctcatatatatatatattcatattctcatatatatatacatatcatggcatagcattcatacaacatatatcactagggaaataaccctgggcaattaaactgctcatgttagggtaataaccctaatctcggttactaattactcacatatatcatttccaatataggcgccaccgcaaataactctacatgctaactactgtcttacctgatgtcctacgataatagagattccaaataccggggtgctcctgaccaggtgtcagtaatcctagtcacaaatccgggattgacacaaacagggttaacccctgattttacattcataaaatattcacatggcatttaaaat

SEQ ID NO: 234877 - DNA, 1317 bp, Cannabis indica
ttaattttttttttttattaaaagagaaacatttattaatcagaacagaaaaatactatataaaccagtatctacaaaataacaaaaggcaaacttatttacatgttacaaacaaaatcaaagatttgttgatccctcttaaaaagattcctcctattaagaagtagtaatctcgttttaagtataattctaatcaaattgttcacataagaaatcaaaaaaatattttgctcaaagatacaagcatttcgattccaccaattaaataagttgctatcgcacaaatagccgcaacaaccctatgaagcatactgcgatctcgattagtattcaaccacaaaagccaattcggataagattctagccaaatagcaataccaaaccaagaatggatagtgtgcatgagatgcttggaaaaagaacaatcaaagaaaagatgattatgatagtcaacaccaacctcacaaactgggtagctagtagatttcatggcaattcctcttgccaaaaggtgatttcttgttaataagttattatgagaggcttgcgagagaataaatctatggttttggtatggataatctacaccaaattattttgtaattatctactttagcataaagagtaagaagagaattgtgaagtttactaacctgaaatcttcccccttttccagcatctagaattgtgtctcgagtgaaaacacttttaagattaagaagtttacgccaataccaactcacattacctttcttatcaaccacctaaaaatcttggttttttaaatagatagcattgatccatttaacccacagaacatcttgttttgttgaaatagcccaaatgtatctagcaatcgaagctttgttccacttggttccttcccggaaacccaaacctccataattcttaggtttgcaaaaaaaaatcccaagaagttagatacatcttactagaattacctttcacaccccacaaaaagtctctgcagagtttatcaacttccttgactattttcttttgaagcataaatatactcatccaataacaacgaatgtctagtaacaccgattgaatcaattgcactctacctacgagagatgcctgcttggccagctgtgaagtttcaattgaatcttcttaagaaaatgattacaatccactgcttttccattttgtttgcctcattatcacaccgagatactttagagggaattgaccctcataataaagaaccgaatctacgaatagccagtttacttgcttcatcgaccctagccaaaataataccatacttgttcgaagttaattaaattt

SEQ ID NO: 234878 - DNA, 656 bp, Cannabis indica
tcgggttagtagatcggattaggaaccctaaatatgttaattatgttttattgaggaattatattattatataatttaatatgtgaaactatatggatatgttgtattttaagacctcgttggtgtgttagtagtatttttgtaatttaaatccgagaagggtaaaatcataattttatgatatatcgtgcttatattattacatagtatgtttattttgtctatctacaggtgttttctaataagtcagcgcagtatagtcacaatcgagtattttaggctgaatcgagttcgggacctaaaatatattttcgggattaatttatggcgttataatgataaatgggaaaatttgtattattgtatagatatgtgtgtgttaattgataaatttttccttgtttatttatatgtggatataattgactatgaggtattttggtcatttgaccattattattcaacaaaaaatcatttttggaaaaattagaaaaccaatttctggtgtgaacctttcttgcccgacccctctctttcccttaacctcttcatttttgatttctttcaaattgaaagaaaacttttgatttagagtggattatgggtgaattcttgcttgaaacttgtggagactgcggtaaaactctttatctctt

SEQ ID NO: 234879 - DNA, 1241 bp, Cannabis indica
tatgcatggtctcattggtgggctcaacaacaagcaacggcccaccttctactaacttccccttatcattatccaacaacccaatctccacaggcccaattccacattttggaccactgcctggcccattaacttcgttagtcactaaattcgaattcggcccactacctgagaagtcaaaacttaaagccaacgggtttgtcaacttatcctgagttgtagcctccaaaataggaaaaattgcaggagccttttctccattattcaaaaccacttcatctccattaccattaccagtaaacctcctatcacgatcaactggcaccttgggcttccaaaccatggacatctcaagcccatgccccaacggccctcgagaagccatcgatttcgtacgtctcgagccacgaataacagaaggagatgggcgatgaacagttttgcccaccccattatcgtccgacgccgcagaacaagcggagaacctcaacaaaggggcagcggtggcaccaaccacaggtctgacactagcacaggtgaatgcattgtgaaacttagagtcggtggcaccaaccaatggaaacggaattcctttgccattagccatcttgacaagggacaacacagaacaccctcgccttggtggcctagacgaccgcagatatagcaaaaaataccagtttccccaaaaatgaaacgaagccatcttttgacaccagaggccaaatcaaaagaacaaccagatacctatggaatatcaatagtgatatccaccaacatcctgaagaagatgttccagtgcatagatttgtcctcctctaactcaactttaatcccattaccaatcataccacaactaaaacaattgcctttaataggtgcaatagacataaaaactaccaccaaagctatgcagacagtaaaagacaatcaccacacctacccagaatcaaggcaagactcacacaccgataaacagagaaccagaaaaacaataaaggaaaaaaaaaactactcacaaaacaaatacaaaaccaccaatccaaccacacataggagactcgaaaaactcagaaaccccaagaataaagcatccaaggaaaggcaagaacaagcagaggagaaagatcagatgacaacaagaacgacgagacaagaagagattggtcgaagcccattctctctgacgaagaatatcttactctgctcaacgtgctcctgatgaccattctcatctgctc

SEQ ID NO: 234880 - DNA, 704 bp, Cannabis indica
acatattgtattagaaagatatagatttttgttaaaaatacctgttaattatatgcagaagccaattagagattacaacactttaaaaaacttttgaggaaaaaaaaagaagatgtttgcaacaataaaggaacactatatatattattgtataagctttcaaaaaacacgcttacataccctttcaaaaaaaaaaaaaaaaaaggagagagatactataaatatttatgtgtgcattaatagcccttagtctagtttcttatatgagatgaggcggtgtgtgatatgtagcaaaatacctggcaagataaagaaaacgtggcagttaaatatctaaagaaaagtggtcaaatccatgtcatacaccattcactatcatcatcatcatcatcattattattattattattattattattatttattattaataggcaccataacaaaactaggcggtgcatgatatatactagaggcttggggtatcttttatacagtcctcatttcaccattatataaaaaacaaaacatgccggcccccactttcatcgttattattattattattattgttattattattattattatcagacatagacgagtgaaaacgaaaaagcaaaagtatatctcttatacattatataaagagcttgtttataagcaccatccatattaataagctactcttacaactttatgtc

SEQ ID NO: 234881 - DNA, 809 bp, Cannabis indica
catttcaagagatggagagattggaaaacattcctaatagaaagtatttatgaattcaaagatgtggctttccaccttctaagccacctaaactttatgaagaattaattgatgggaatgattggaaggaatttgtggtatctagattgactcctgagtgggcgacaaagagaaaaagtgcctagagtaaaaaatatttacaaccaccgctttggacgaggtggtgtgaggaaagtggaagaagaaatggagaaagagttaggcgaccaactcatcgacattgatagatttgaagtgtagaaaagacttcacgcgaataagaaaggcgaggtggagggcccaactgtggatatcgctaaacaaattgtaagttttaaatataaaattgcatttatatttatatttttcataatttatttctaattcaatttattatgtttgtacgatgattttcgaaagcaagtggaagagggaaggatatgtatggaagggaagaatgacattttgaccatggccctcaggataaatgagcatggtggtcgggtccgagccatgagttatggagtgacacaaacctaatttttccacactcaatgccctaaaaggaaaaagaaggatgatgccaacgatcgcttgtgagagatagagaggcgactccgtgaggtggaggaaagtaatagataaatacgagagcaattggctaatgatgcttctccccaagatagtttagacatatatcacacaaaggtaaaattttattactttgattaaaatagtttcttttttatgttactcaactctcttttggg

SEQ ID NO: 234882 - DNA, 840 bp, Cannabis indica
caaattccttcaaaaatgagaatgacattttgattgagcattgaaaaaacagtctaaaagttgaggagtacttacttgtattgtgaggtaagaatggggatggtggtgatgtgctagaatcacgctgcttgcacgacgacaatggctgtcctagcttcgattacaggacagcttgagatgatattagatgtcaagggaacgcaatgacaaagttggggagaaagatgtcaagattagaatgaagagatatgagaaggttgagattttttaagcaagaagtttgtatgaaaagaggatttctctctagttagaagattactgatgaagtaaaagaaatgacttcagtcgtcaaaaacctcatttatatggattccaacgattggaatgattttaaaatatatggtccaaattaaatagactgaagggaagatcatccaatggttggggatacaaaaggttggcatttaatacatataaaaaatgagaattaaatatttattattcatcattttgtgtagcttcgccaaggcacctgaggacagccgtctttttgaaaccagccatcattcattttctcaagaaatgcgcctaaaatatagagcgtgggtctcacgactccactaatcaagcattgtgcttcagcgagtccttgtgatatcaccaagcacgagaaactcgggataaacctttgggggaagactgcaagctcttcatataattctcgagagcttggggtaaagattatccctattcatgaatggattctgcatggaagcggtagaagggtgccacgtcaaatcatataatgatatcacagaccccatatagagataggatcac

SEQ ID NO: 234883 - DNA, 1271 bp, Cannabis indica
attaaaaaaataaaaaaatcttacttaaaatgttagagcactcacatcttatttcattcttacaaaatttacacaaatttaatcggtcttagcaccaaagaaaaaacattgttattttagagtattattccatgggatagcaaattacctaacgccctataattagttaataattttttataattttgattaaaataaaataagtagcactcgatattgagttgtaacaatatcaatattatactccataaggatgctatgtactaagactgaatattttgaccgaatttgacctaaacccaaccaacccgtccggacccgacccgatcaacccataaaattaaaaaaaaactcattctgtttgggcaggtcaggtccaacccgacacactttcggacgagtttgcgagttggttttttataattactggatttcgagttggacccaaacccacataccaacccaatcattttttatatttttattacatatataatatattaaaaataaaaaaaaaatagaaaatctaatcattttacttttattacataaataatatattaaaaataacaatatataatataatatagtttgaaacttgacttttgtattttagacttaaaattaatgtattttttattttattttaatttaacgaatatatattatggtggtataaatttataacttatatgattaatttaatatatagaaaaaattacataaaatttcagtttattttttttttaaaaaaaatattaacaagttgatcgggtcaacccgttgattcgaccaaccctgttaactcaaactcgcagacccacgaacccgaaactatttcacaagttgggtcagggtaaaattttttgaactcgaaattcgtaagtccgaaacccgcaaacctaaaattcagtcaactcgcaagcactactatgtactataaatgccctttaataatttttttggctaattaagatttttgtccccgaactttgacatgtaccaaatcatgccccctaaactttgaagaccgttaaaaattctctctaaactattgagattgttagatttaaggactttaatctaattttagtaacaaaaatctaacatagatgaaaatttacgaagcatgattttacacatatcaaagttcgagaggtataatttagtagatatcaaagttcgatgagcatgatttagttcatcgacaatcaccgaattagttaaattgaataaaattagacaaatgtccttaaatccaacaatctcaa

SEQ ID NO: 234884 - DNA, 723 bp, Cannabis indica
caaataacctgaataaaccgattaacatattttttactaaaattatttataatataatatataaattacatttaatagttaaaactattttacatttaaagtttgtattttataatgtttaatttaaaatttagaatctatagttgataattttatatgtatttgaatattgagattgaaatttaaaatttacatatgagcatatttttttattctattttttaaaaaatgttatttaatactaatgtttattcaatttatgatatttatttttaacattaagttaaagtataactctttaaatcttgaaagacgtatactatacatttattttttctaatgaattatttgaacactgaaaactaacaataatagaaaaataaaaaataaagattgatttaaacgggttaatctgatcaaaccgacgaaaattattgagcaagttacactttttctattttttcattggacaggttataattagatatttgcaacccgatatttatattggattggtaaaaatacactataacccaactaagctgatcgatgtacacccctatttggaacatctattagttggaaagcaaaccttcaaaagtttgtggcgctgtcgataacttaagcagaatgaatggttttgaccgaagcgattaaggaaacactgtggttaactgggttgatggaagggctgaagctcaatcaaaaagttattattgttca

SEQ ID NO: 234885 - DNA, 1621 bp, Cannabis indica
ggagattatttctgtactcaaattccttgcctactcgaattttgaaacattaatatttgccaaattgttctatcctagaagctaccaaaaaagttggttcatcttatctttggtcgagtttgatctggggattgaagtggcttaaatgtggtcttgaagatccattggtgatggaacgcaagtttgggcattcaatgtaatgactgcatgttaaattttgtattagtaaagacaattaacattaattattgatattttataattatatatgattttatattgtttcgggtcctatttttaaaaatgggcattagaattataacttctcaattctgaagattttattaaactataagagtattatttatgctaaatatgaattatgcaatttttatgatttttgctcggtgacgatggaaaatgcgatggttggtcgttagagtcacatgggtaagtttagaacctattcttagtgggacaaatatttgagatattatgaataccgggtttaagcaaaattatggttttgaccattttacctcaggcttataattgcttaacttagaggtcaaagggcattttacgaatttcatttattggtttaggtggctggttgtgggaatgacagctggtccttatcctcattttcaggctaagttaatattgataaattgatttaatcaaataggcaaaaaagcaaaaaatagctaagacaccattttctcttcctttctctttcaaaccaagaagaactctagaagcttgctgctgaattttgcaaattcaacatggttttagtaggattcgaggtagctcaagccataagtaaacctaagagttctcattttttatgttgtttaagctttaatttggtttgatgttgtaattttgagagttagtggctcttagagtttttgggttcattttaagttaaaattgatttcttgtagctggttgggatggtttgtgaggaggatgaacaagtttgagtttgaaaactcaagcctcattcatatatggcacttttggattttgagtatttttcttgctgttattggttggaaaatattgtttaaggtatgtacaggtgtttgggaaggttgacttagtttggacacaaattgggcaagttttggacttgtttgggttacctggtgcaaactggttaaccggttcaacaggtcgtgtagaactggttaaccagatcagtggcagggttcccaaaaaatctaatctttcgattcgtgttattttcagagccttagtttgttatttcgccaatacttaggttatggccaagttaattatcaatagtgaaactcgtgttgtgagtttaggttcccagattaggttttggcatgttatttacccatttgcgtaaatgtgacatagggcatccatctagcacgtgattttttgttcaagtcggtcagcacacttaaatttggaaacgaggtaagactagcatagaacgtattttatatgagtatgtgtatgtgtgatatatgcatgttatttatgattcttacactaccaacactagtacgatagtggtactgagtgcgttggcacaatctacattgtttaaagtatagtaaggtattaccaacactagtacgga

SEQ ID NO: 234886 - DNA, 1200 bp, Cannabis indica
ttttgtttttaattttaaaaacaggaaacaaaagtgtattctgtaaagttcattttccttttccttttttgattttatttaagtctggtctaagtccatggtcagatttaggttcgggtcagaggttgggttcaacactagagtcttggggaggatttaggtctaagtttggtcagagtccatatggagaccctttaggtaccgactaaaattaaaacaacaataataataagaaaatagtatagtataattaaaaataaaaataaaaaacaagatattgattttaaaataaacaaacattctatttattgaaaagtttttattacacagtaagttgagaaagattaatagtcaacttggtaagtataaccaatataactttaatacgtaataattagaagaaaattatatgaaaagtttggaaactatatatttggagtgggtaatattactccttacccgctccgaactcacttcgggtatataaaattgcaccccatctcgtcccgttatccattaaagagcacaaagaggagcctcaaagtgaaaggtaccacttctaatgcccaacatactagcaaaccacacctgcctagccaaaggataaccaaagaaaagatgacaaaatgaatcaacattctccttacaaatagaacagttaacaccattaccatagcggctaccacatggtaagatgtctctttcatgtttctaaaggaaaattttggtgcgctcatggagaggggctttccaaaagtccttccaaccaaacatcgttacattctccaatacaagctttagtacaagtgtgataaggtcatctccaatggtactttaaaaatctaaatatgatgtaattttttcaccaaaagcctccaacctaatactaaaagtaaacctattttggtgggagtctacaatgtcccactaataatagcgggcacagtagacaactgcatttttacttttttctcttttttttttgtacattttaataattaaataatcctttttaaaaatcaaataattatataataatccaatttattaattaaataatataataataaagaatatactttttagtgtaatttttagtgttgtggttggaattggaaaaatattcagtgttgaaatagtatctttttttcaaaaaaaaattcatcatctttattaattgcaatccatagtgattacatg

SEQ ID NO: 234887 - DNA, 669 bp, Cannabis indica
agtctgaattattaatgtctttgcctcaagtgaatttttttagcttatatgtttgaactctaaatttttaatggtaaaaataagggttgtaacccaccccgatccaatccaacccatattttgttgggttgggttggtttgggttataaaaaaaattaatatgaatgggttagaattttataggccgatcttaatgggttgatctattaaaatagcttcaacccgactaactcaacccatgctcagcctactctcttttgtgtagtttggtattaggagtaaatgtgagaggatgggaagcaaattattgattaaaattactatagtatccttattagtatagatatttataatattttttaatgataattttggtatttggtgtgtatatcttttttctccaatccttcttaaaatggagagattgtttaaaatttagaggaagaaagtctccctccacctctcctctcctttcctttctccctcttactaaacaagggcttcttcctctccttttaagctcgttgtaatacggcgtaccaaacgaacccttcaactctctccttccacccatccatcctttctaccaaacatagtgtaaaagttcatgcaataatacaaagaggaaattacactctataccctttttatattgttatcttttatttt

SEQ ID NO: 234888 - DNA, 1353 bp, Cannabis indica
aaaccctaatagaaacctcaagtaaagatccaataagcctctagtgatcaagcataaaaaatgtgaagaaaattaggtttccaaatcaaacattttaaaaaatcaacctatcaatggctatcagccaatgatcttccaataaaaattgagacataacaacctcattattcacatacaaaataagaaaaataatcaaatgaccaactattacaaggtaaccaaaagaactgaataccacgaaatacaaggtcaatagttatatctgatcgagaaagagaaagatatcacccctgttgaagcaaattgatccaatcaatgaaatatcgatgcaccaatatatagaaatctcactccattcactgaagccataataatatctactaatttagtagagcagtgacgaaataccattattataaaaataaactaaacaaatataggattgaaactaaaacaattaaaataattaaaactaagcacaaggggcacaccaaaaacaaaccaagcatcaaacttttgcaaaatatcataaaacccttaggaacccttaagccgagagttaccacacccttgaactgagaagacgaagaaagacttcctccacagagccatgaagcccatcctacggctagatacccacctcgtgcccaaagcccaccactggtccaagacactacagatccccaaaacccacaaccccaaatcgggcgaaccccgagccatatcctaaaaccatcccgaccatcaaccaccgccatgaaaccttagccaaaaccataccctgagagaacaggccaaaaccatcagcatcctggaagaaacttacaagaaaagagatctagtgagaaaatgcatgatccctcaaatccacccccttgcaccagccatcaaactcgacaaaagccacgacaaaacctaggaagagtcgatgggcctagcaggacaaggagaaacatggaagaaggaaccaggaatgctattgttcctaaaattaatttttttcttaggccttaatatgttaagaccgactattcgcgtacatgtatccgatttgattcaattaggcttcaaaattccatttaatccaatctaatccaattagaaattggatttagaaaatcatcatgtgatccgattcagttagacttcaaaatccaatacaattatattggattagatcaatttttaattgtattttaatttgacacttaatttttaataataacgaaaaaaattaaaaaaaacacataaaaactaaactatacatgtgttcttaaggttttttgtaaggattttttaattaggtgcaatgagatttataaaaattaataaaaataattagtaaaagtaaat

SEQ ID NO: 234889 - DNA, 1029 bp, Cannabis indica
gcggtaataatacttaagtttaatttattttaggatttaagggcaaacatggacgtttaggctgatagattttttaggttttttggacaacgacggtcaattaatggcatcgattttaatgattttgatgttgtcttttagcttgtattgaggtataaattactttaacttgatgtcttttaccttgcattacattttttgtatttttgagtttcttaattcgaaaataatattgtttaaggattttattgttaaagacctattaatataatacataagcataggattaagtgaatttaaagtaaaaaaaaaaattatttgaatttagggttttatgggttttgaggcttggaggtggcggtgttaaacggtggcttcgattgaaggtaaaaatatcaattattttaaagaaaataaatacctatgtctttgattatttgtaataatcgaaggcataggttccaacattttttaaacctatatgtcatcgcctaaaaagttttcgattttgagtttttttaaccgaagatagaccagtacaaaaagcaaagataaatggggtttttctagttgtgactaggctgactaagctatgctgaactactatatttcgagtatcattgtttacattattacttttatttgttgatttacttatttattatttgtaacgcccgcattttatatttactaaacccgaaagttaattttaataatttatagctcaataaccatatgggtcgggatcccgagtatcaaaatacaatttaaaagtattttgctaatatatacatataatatttttaaaaaaaaaaagtcgctaatatgcaacctcaaaatacagactccaaaaatagtaaaagaccgaaaccctccaggcttcaactgaggacagtctttcctgagatgtcccaccgaaccacactgaaagtaggctctccggttacaagtctcggggtgagcttcttgcaacgcggacactcacgataggattaagtctgacgtcctcctttgttctggtttcctcga

SEQ ID NO: 234890 - DNA, 1668 bp, Cannabis indica
ataagctcctgcatcatggttaatgagattaaactattacttaatggttcggtggcgggtcgtttcaaacccgaaagggggctgaggcaaggagatcctctgtccccggctctatttattctcggggcggatgtgttgtctagattaattattgacaaggtggataaggggctgataaaaggttttcgcatgggacgtaatggtgtcgccgtaagccatcttctttttgctgatgacatcattctgcttggacaagcttccactcgtgaagcagcctccttcatggactgcctcgacaaatactgcaagctatctggccaaaccgtcaatattagcaaatcctcggtctatttctctaagaaagtccctgcaacaactaggcactcaatctctcagctgctgggcatgaagaggatgtctaagaaggcatcttacttagggattccattgtttcgctccctcaagcgtacggaagataccaagttccttgctgaacgtgtgctccaccgggttcaaggctggaaagccaagctgttatcttatgttggcaaggcttgcctcattaagtccgttggatcctctctagcgacttacgtagcatcatccgatgtcattccagccgctacgacgaagaaaattgacaaactcctccgagacttctggtggggcgactctgaacagaacagaagactacatacaatcccatgggaaactcttcgccgcccaaaagtcaatggaggccttggatttaagacaagcgatgcaatcaacaaagccttcctctcaaaatgggcttggaaagtcctaacggataaggatagcctttggcgaaaactcatggaggctaagtatatcaaaaatgaaagcttccttgacagagatatgaagccaacggattccattctttggaaggcaattttaagggctagaacaaccttggagaaggggctctgttgcaaaattggagatggtaagctaacctccatctggttcgactcctgggtaccggggggcacgctccaacctttacctaagtttgacgcatcagcaggaatgagcatggttagtaacttcatctcccaaggctgctggaatgaacctctagtccgacaatggttccaggaagatgatgctaaacgcatactcaatatcactcttcctaacacaccttgtgaggacacatggctctggctcccggagaacaatgggcgcttctccattaaatcggcctataagttgatcaagaacttggattctatggcgcatggagacaggaaatggagattaatttggggagctaagatccacgagagattgaagatgttatggtggaaaattcttgccaatggtctcaccaccaaagatagattgagtccttttatcccctcaattgactctagctgctccctttgcagtggcgagatggaaacttcaatgcatctattttggagctgcaatttcgctagagcagtctggtttggttgctgctggcagttccgaactaccacgaaccactttgattgctgggaaagttggctcgattggttctcggtggaatcccatagaccacagcacatccaacttaacctgttcctaggaggggctgctgtaatctttgagagtatatggcgcgagaggaataacatttctcatggaggctctgctact

SEQ ID NO: 234891 - DNA, 4508 bp, Cannabis indica
acaggtgacagactacttcagcatcccaacataacatatttgttgcaaatagagaactatcagtaagtgtgctaagcccaggatgagtagaagatacatatatgttactagttgatggtagccaaggagaacccagaatttattacttgtaccatcaccaataacacgggcagccctaagctgaaccaagtccctagcaccccaaatactacgccacacaaagcttgggttatgtccgagatcagatgaaatgaaatcagaatttggaaagtactttgctttgtagactctaccagcaagagagtcaggcttgcacaataaacgccacccttgtttggcaagcatggcgatattaaaatcatgaagatgcctaaaccccattccaccttcttctttaggagttgctaagcgatcccacgacatctagatgatgcctcgccctttactagagttagtcttccaccagaaactagccattaatttttctatctccttacaagtaccaattggaataagaaaaacactcatagcatatgttggcgaagattgaatgactgttttgagtaagatttcttttccagcacgagaaagaaactttccatcccagctgttaattcgagcaatgactttatttttaataaagccaagcacatcattcttgttgcggcctataatatttggaagacctagataaagactgccttcaagagcttcagacatatagagtgtatcacaaaccagattacgaatggtagtctcagtattgggactgaagaagatcgaagactttgtgtaattgactttctgaccggatgcattttcaaaggtgtgcaggaggttggagatgctatcaacagcttctctagtgggttgacaaaacaagtagctgtcatccgcaaaaaacatgtgtgttatagaaggtgcccgttgagcaacatgacatccttgaataagtctattagcttcaaatttttgaatgagagcggagaggcattcagcacatatgataaaaagataagtagagagcgggtctccctgacggatacctctggatggggagatagagtcaattacatggctgttatgaacgactgtgtagtgaaccgtagaaacgcaacccataataagatcaacccatttgctagcaaagcccatacgagtcataaccgctctgagaaagctccattcaacccgatcgtaagctttgctcatatcaagcttacgagccatgaagccttttttacctcttcttttccatttcagatagtccatgacttcaaaagctaccattacattgtctgagatgagtcggccaggaataaaagcactttgggtttcagagataacacagtcaatcagatccctcatacggttcgccaaaactttcgagatgaccttataaagaacattacacaaagatatcggtctaagatcacccataacagcaagtgtttcttctttggaatcaacacaagattggtggcattaagtctctcgggcataagtttagtgtcaaaatactccttcacggctttaataacatcagagccaacaatatcccaatggtgttgggaaaaaccaggtcccataccaccaggccctggagctttgtcaagatgcatagaaaacactgccaacttaacttcttcatcttgtattggttgtaagagagcttcattgtgtatgccgtttacagaaaatttaacattatcaataacttgagcagaaaaagagtttgttctcaaaatattgctttataagcaattctaaaccagtattccaactctaacagatgtcgttattgtcttggagttgctgactatggtttgatctcttacgagcactagctgtagcatgaaagtatttattatttttgtcgcccgagtgtaaccaatactgcttagacctttgtttccagtaaagttcttgctgtgctaagatttcgaaatagttgtttttttccactgtaaagttttcagcatcaaaatcaaaattagagtttttaaatttagccagcaatttcttacttttagacaaacgggacttgaagttcccagtcaagtgacgaccccaggcagccaattgaaccccacagagttcaatttttcttgttatgcattcagtttggttcgagctccagacatcagacacaatctgtttgcataggggctccctatgccaagcattttcatatcaaaaaggagcagaaaaagttgtaccagtagccatttcagggagtaaaagtattggtgaatgatcagaggatgaaaactcaagattagtaagtgatacctcattgtagatatccagccagctttgtgtaaccatagccctgtcaagccaaatttcaactgtacgagaagaacctctgcttcgttcccaggtatacggataacctctgagttccaaattgataagatgatagtcacgtacagcagattgaaaaccagtaattagggaggaggggtaaggacgacctcccttcttatcttcattactcagaatattgttgaaatcaccgataatgcaccagggtaaattagattcagacaccatgtctcgaagcaaattccatgtacgatgcctgagtttgcgatttggctccccgtacaagcctgagagacgccacgggtccataccagagagatgaataatcatatcaatatgattactggaatagttaagaagatgggcttcagaggagtcacgccatagcatagcaataccaccttttctaccactaacatcaactgaaaaaatccttcaaagcccaatcaaattctgactttctcaacagcatctttattacacaaagtttcacaaaggaaaacaaacttgggtctcttttggacacaaatgtccattaagaattgttgggctcgtgagttcccaagcccacgacaattccaacttattgtactcataatgcttggtgggcttggaaaccaagacccaccttgtgcaagttttttgaattagtcacatctgtagatagatttttattagtctccacttcagcaacaatttcttctgtttgacagtccacgaccccacttaaaaaaaccatatccaatctcttccttttcaaatcagctatctcaattaattcctcattggaatagctggctgtgttgtcattgaccaagataacatggtcattatgaagattttttttagtcccagaatcttgtgattgagtaatcataggatcatgattgacatatgacttgggctgatttttaggcatttcattaatctttgtggatgtggttgcagctggcgaatttgcttcctggtgtacctcacagtggtctgccttgccggatctcagccacggaaaagcagtcaagaaactttgtcttctcaaaggagctttcgtctctagactatatggttttacaatctgattggcgggtatatcctagactttatcacaaaacttctcagcatggcccatgattacacagatgaaacaaaaggtgggcacccgttcatacttaaagtatgcataaaaccagtcaccattcctgctgcgaaacttcattcgtctttttagtggttcagccacattgatattaacacgcacgcgtaagtaatcacgccacattccttgaaaattatttggatcagagataacaaacgtaccaatgtatctggctacttctctaagagcccagtcagttttgaatcccaacctcaattcatggatttgaacccacatatctatagaattcagagctaccattctaggatttttgcctggttttagtctttcaagcagcagctgttttctatcataagtccacggactgccatcgatcactcgttgaacatctatctcatgataaaactggaataaaaatctgttttgatcaaggatttttatcgtaatcccttttcctggtttccataaatctgccataatattttggaaaatctgaaagtctaaaactttccctgataataaccggcctacaaggcaccccctatcatcaaagctggtgtcttcttcccctatacattcattatcaaacaatacttcatgatcttcttcctcctccaaacaaatatcagcccattttttagtgagatattccccattgctagatgaagccatttgaaacgtgcaaagaactaaatagggacagaacaaaacgtgaaaaaagatccaaacaagaacagaacaaaacagaaatcagacactctcaatcatgtgagacagaacactctctaccaggagagacagaccgaccctgattataataattagataaactaaagaagattgatgaactaaagggataaaaatagaaaaaacataataataataacattatgataactattaaacagctaattggcaatcttttagattttgtttaggaaaaataatataaatagaacgcaataaataaatcaaaaggataaataagttagaaaactacaaaatatagaaaataagattttgaaaaatgtaataatatttatgtgatatatatacatataaa

SEQ ID NO: 234892 - DNA, 2860 bp, Cannabis indica
tgtaattttttttccttttttatattttttttccctaataattaatattattaatatattaaaattgataatagttactatctatattaaatttaatgccttttgaaatttcaataataaagtgtaattatattaatagttattgatatatattacattaaattatattgtaatagattcattctcataatttagttaaaattggaaggttgggttccacttatagctaaatagaaaggttgatctataaattattttttattagttagaatgtactaacatatcattttagataaatacatatcatttttttattattttttatgtttcaaaaaaaaaaaaaatatcattttattaataaaatacatattaattatttttagattattagataaattgtagatccttttattattattacataagacaaaaattagagaaaccacaaatttaaaaaattagaatcctaaaagattagactgctaaattattgtacttaacaacagaactatatgtatatatagatataaattttaatgggttaaaaagattaatttcttttgaatacgatctcaattcttaaattaaattagcattttactattattacctgattgaatgttttattaatactgtctcgttattttcaatataatggaaatattacattatagtatgctttattttggtttcagttttttttttatttattttaaaattcttttgctttggttatgaaataaagtaaaaaatcaattagcatcgatgcactactatttgaaacaaaaacttttctttttgcttcggttcataaccaaagtaaaaattaaattaattagtatcggtttataaccgaagcaaaaaatatcactatttgtgtctacgggtataacgtcaattacatcaatcgaaacaatatctttatatgtcactgaagcaaaatatcatttttgtagtagtgcaactagggctcctatattttcacaagatttttccatcatattcttctattgtttcagtaacttgtttaaaacaaacattaagtcgtcagaagattttacttttattttttgtgaattaaaaaattaaaaaataaaaatattacaaacggtaccataattactttttaaaaaacatattaaattttaattacttttgtatgcaaataaattagtgtgtacctacagatatgacttcttcgatgcctcatcgctgtcaacgtctacacacttcttcatatcattccaactaaatccacttttgttaagcatattagagatagtgttgtattgtttgttaaaattttgaatctttgaatgagtatgtggattagctttttaatagaattaggacataaagagttaagcatcttctcaattatgagatttataccaggtttgaaactataattatcacattgctacccctttgtgattatatcttctaagactgacactaatgcttcctcttcttgtttagtccaagttcgcttatttgtacttttttgattattttgggcaaccccttcactttccattcctagcaataaaaatatttatagtaatggaaaatatagcataaaagtttagaaagtagattactattaagaacaacttaagagtatttcactacaacaaactatcaatacagtagcagtactaacaaagtcatgtgagtgataaattactcaatttccaagatacatgctagctcacaaaaagatcagtaaatttcatattctaggcaactaagcatatgtttctcataatgtctcttaaccaaaatatacatcttcgtcaccataatcttttgcctaattaactctctagtaactagtaacaccactattttcttcttttcatgatccatctctcagtagcaaagagaaatacatattaaaaaaaaacaacataatcatagttgttattgctaatactttgttccattagagcaagtactataatgaattctaaattgtttcaaagatttttctaattctacaatacctacacatgagaaagtcccaaaagttatgctcattttttatgtatgaggattgcaatttttttttttttttgaaatagtctgcaatataaatcactcacttaagacattaataaattctaaataaagtgtacacatttcacccttaaataaaagttattcataatgattatgataatctatttagaatgcaaatgtgctaactttctgtagtttacgttcttcaaattttattattcattaatattttcacacattaaaatattctttcaaaagaaaaaaaataatgaaatctattatgagaaaattattaattcttctactgtttgttgaatagtgaaaaataaaaaaatcaattatgtttacacattcatctaaaaattgaagaaataaatttctaaaatggaattccaattattgggtaaatttattgtaaatacgggtacaagtgatcaataaaagaaataaaattgaataaatattgatatttgggttatatatattctatattttttttttattgttctcttttatttttaccctcttttttaaagtatatcatttttacctcttttcttttaaacattgtaccaattttatccctgttactttaagatactctctatgtgattctcttatgttatggtattttaggtataatacacataaaaagaagtatgtttcaattaaatataaaattagaggtaaatttaattaattgattaataaaagtggtatttttttaactcacctcatagaaaaaaatagtccaagcccaatattagaaccttagtataagagactattatatcccaacttgaagttggtgtaaaataaaggggtaagttagaaaata

SEQ ID NO: 234893 - DNA, 1886 bp, Cannabis indica
tcactacgagcagtaacatgtaatgaagctccagaatcaatcacccaactgcaatcttgggttgcaagacgaacacacccatcatcacatacaatgacaacatcaccttcagtggaatctgtattagtctatttctcattttgcttcccttgactctgctctcttttcaatattctacaatcccttattaagtggcatggcttgttacaatgataacacttgatatcttttcgagatttggatcttcttctagagccattttgattttttgtctgacttcatccccgcttgtcatgcttttcagtaacaagaaccccaaaagaagaagattcaccttatgctttccttctggcctcttcattaagcaaactatttttgaccaaatccatagtcaaagtcccttccggcgtggaattagaaaccattatcaccaacgtttcccaactgtcaggtaaaggactgaagagtaatgatgcttgcatctcatcatccttattcatcttcatggcaactaactggattgcaagactctaaaattgacttgtatgctcaaccatactaccaccatccttgtacttcaaatttacaagccttctagagtagagaaattttactaccaactgttcttttggcaaagagatttcttgctttttccaagcgacatcaactttggtttcattagagatatgctcatgtagatttatatccatctatcgtctaatataggcaatggctttcctatgttgaaattaccattcctcatcatctaacttagatagcttctcactacctttaatcggtttgtacggatctttacaatagagcaaatcttccaccaattgcttccaagaggaatagtttgataagttcaatttcatcattccatctaactcatctatttttcaacacacaagaattcaacaccaatcaactttggctctgataccacttgttggaaaaacttattgcaattaatcacaatattttccctctttatatgtcaaaaatgggatacttatcaaacaccacaataaacaatattaaatatcaaccaaagcaccacaaataatataaaatacacaaatcaagcataaaagtgagacaccaagatttttacgtgaaacctaatgcgggaaaaaccacgggaccatagtccgctcaaatcatccactatcaccaaagttcaataatgggattgcaaagttcttctctaataaaactagagtctcacaacaacatcaagattaaaaaatcttggatcaccaatacaatcatcatcatctcaaaagatgaatacacaaataagaaaaagcttaggtctcaccaagtgggtattgtagaacagtaccttagagaggacaatcaccaaatcgaaatcggtagattggtagagcgccttgcaaggattcaccacccaaaatttgagctaaaatggatgagaatcaaccactttatcttcaaagcaaagtaccaaaacccttttctctctctagctttctttctcttctttccctttctttttctttctctcttggctactggtttcacacgacaccaccatcaactttttttttcatttttttctttttgtttccttttaattgtaaatgggcatttagcccttattggtccaagcccaacaaattaagggatggacccaacaatcaaaatacgaaagatatatcatgtgcatgcctgggggctcaacctgaccacaaaatccttatatggattgaaacaaaatcctcatgcttggtatggtaaatttagtcaagctttcgagaaatttggtttgttgaaaagtaaattagatcattctgtattttataaaagataaattgtgggtatctttttgttagtggtgtatgttgatgacatcgttatta

SEQ ID NO: 234894 - DNA, 1079 bp, Cannabis indica
ggagcttgagggtgacctaccccttgtggaggatttacgataccttgctatcctggaatagctaattgtccatgagcgaccccttgtttgtgatatatgatgggaatccggacccattgccccaaatgtcccgctctaactagcatctcgatttcatcttttaggtggttacattcattagtggagtgtcctacttctctgtgatactcgcaccttttacttggatctcttttgaacttccccccttaagctgttcgtgggggcattctgtaatggaccatgttgcaggttgctatatatacattttcttaagtatccaccatactggagtactcgatgtatcttagttcataatctttcttagtcttctttgaagtctcactttgtcccaaacctttcttcctctcttgttcagggactgacttacattttgctctggaacatcctcttttgattaatattgtccaggagcgatactgcatttggcatgtgtctctccatacccagagaaatgggttttcatgggtgcttgtacaaatacggatggttcgtagattgttgcggtatactgtgttccaagaacaagaactggtgggatgaacccagaagcagaagcgattggagttggtgccgaaggtactctgaatgcttgctggtaagcatcttctaagctgataaagtcttgtaccttagccatgaactcggacaatgtttcagccttccttctttgcatttctctccacggcaaggagccaattgcaagctcccgattgtaaggccacaagtttcatatcatctgtcactttatgccgcctatatcatacataagataaaattctttaggctttctcctgcccgttgcttgatgttgatgatggagcccatctctatgtcataatcacaagcggcaataaactatttcctcaaggcagactgtaattccttctaggaattaatcgatccaggagcaacctcttccaatagtcttcagcagatttggtaagggtcagggagaagcataaacacttggcatcctcactgactcttgccactaggatcatcttattgtactcggctaa

SEQ ID NO: 234895 - DNA, 585 bp, Cannabis indica
tggaatgagttattcttagagaacaaagggttgaggttgaagaagtcatggctcaacacggaaataatgagggtgcagtaaatcagaccaatggtcaaaattgtcctgatagaagcctgaaggataatgtgctacccacaatgataatggtccaatcttgtatcagactacccgttgttaatgcggatgattttgagatcaagactgccattctttaaatggttcaattcactgttcaatttgcgggattgcctacaaaggaccccaaacatgcatctttctaacttcatggagctttttcagacatttaaaatgaatggagataatgatgatgccattctcctcatattgttcccattctcactaagggagcaagccaagagttggttggtgtcttgaccatctaactctattgccacatggaatgaatcctgcaatgaagtttttctccaagttctttcctccagctaaagctgctaagttgagagtggagatcaataatttataagaatattattatttaagtaaatatatttctatttaaagaaataaatttctatttaaggaaataaataaataattgat

SEQ ID NO: 234896 - DNA, 835 bp, Cannabis indica
ttggagcttcaaaatataggcccatagtctctaagtcacctttatacaacattgtacaagagaaggtttaatatgatgagaaaattcaagtaagaattaatttctatgagaaataattcttaagggaaaatagtaatttatgaaaattatgattttgaataattataacagttatgaattgtgtaattaaatagtatttaactattttattttctatgataaaactatattaattagttaaatataatattattcttaaatattataattgagaaaaatatattattttactgaatataatatttattttaatccttgtaaaaactaattttggaccttaaaataggacctacacgtgtagggtgtcatataaaggctcatgttaattttgtttgattattttattataaaaataaatcaaatgaaattaagtattatcttttaattatttaattaaatatattataaagtaatgtacttaataaaaagattatgttaaataaaatgatataacaaatttcagttaatcagttatatgatatttatattgaatttgaattaaattaaatattatcttttattttaaaggattaaataaaagttttgtttacaacatctattctatataaaatgtggctatataactgaatttttggtttatgagaaattttatgagaaattagtgggtgaaaactttttttaaatttttattcaaaaataacaatcttttgcctgaggttaaattcaaaaaagatatttttggctgaagttaaattcaaaaaaatatatacgattgacattaccctacatccgattgccaccaatatttagagtc

SEQ ID NO: 234897 - DNA, 825 bp, Cannabis indica
taaaataaattccaacaagaaggtcatgcaacgagttaaaagttggaaaacaaggttgctatccaaggcgggacgcgcttgtctcattcaatcggtaggctcttccattgctacttatgtagcagcctctgatgtaatccccaaaaaaatagcaagaaaagtggacaaagaactgcgggacttttggtggggcgactcggcgacgaaaaaaacttggcatacaattgattggagttcaatctgtcaatcaaagttgcggggaggggctcgggttcagaagaattgaaactattaatacagcctttatccttaaatggggatggaaggcccttacggataaagatagcatgtgggggaccattattcagactaaatacctcaatggaaggagtttcttggatgttgagattaatagtggggactcaagcttttggaaaaccgtactaagagcttgatctctacttgttaatcaagtgtgtagaaagattggcaatgggaaagaaacgtctatttggttcaatccgtgggtgccttcttccaatagaagacctacccctcttttggatgcaactcatggagtggcatgggtgaatcaatttatgtgggatgatcggacctagaatgtggatatggtaaaaagatggttcaaccatagtgatgcaaaggcaattctgaatattcaactaccagaggaagatacaaaggatgattggatgtggctgggggaaccaagtggccttttctcaattagatcggcgtgccgtattgttaagggtgccactactaccactcaggcagatattaaatggaagatgatatggaaat

SEQ ID NO: 234898 - DNA, 1119 bp, Cannabis indica
ttgactttgacttccgttaattggtgtatgtatttgcaccttttcttattagtaatgcgagttcaccaaatatgcgaggtgtgcctttcttactatagcgaggtctctttaagttaatattgcgagatcctttctttccgtactgcgagtactataatattgcgagccaccttcaatacagcgagttctctatagacaagtctttctcgcggggagggtaaatttatgccgataacagtatcaaactccccatcggacacaaaatatatccaccaaccagttactatgcatcagaccaccatcgaatctatatcgaaccactatcggacctcggaccttcctcaaaaacttaaattgtgaaacctcctattgaacctatatcgagcttatatgaaatactattggaccgactcaaaaaaatgaagaaaaacccaaaaaattatagagaacgtcttcgttcgtggtttatgtatgtgatctgcgttagtggcggtagtctctccgttcgcagttgaggaagggattgggcgaggtatcgatcaaattgaaatgaaaccttctcgatcggtcgattgggtggtggtgatggtcgcagtcttggatcctttagtgggatttcggtgggtatttcagtgagaattagtgacaaagaaaaaataagaggggaataaagaaatgttataaaattttgaaataagagagtacattgaggtatacataaaaattagtccattctacgaatattagatagattaaattttggtaattaattttaaaatataatatgtaataaaattaaattttcttttatatagagaccgaaattttagatagacaacctacttgtagtacaccaataatactttaaagagacaccataaataaaattagggctgagcatcggtcggtttggtcggttttttttctatataaaaatcgaaaagttagttttcgatttggattggtgcaattcaaaaattgaccgaccaatccagaacatatcttaaaactgaccgttttgagcctcagtttggtcggtttaaactgcccaagccgaactgtttttttttttttaaaaaaaaataaatccatttattctataaatatattattctacat

SEQ ID NO: 234899 - DNA, 1251 bp, Cannabis indica
ttaaccaaatcagattgtaaagttactagaattgcttatttatttatttttgttttataatgatgttcattatagtcctgtgtcaagttatttcttatcattttgagaaacaaagtctgcaatttgcatgtattaataagatatacatgggaattgttcaatacatattaatatggattgtggaatatgagattttagaatttccaaaaaaatatggaatacaaatacaatatattttttccatacaaatattgaaatttacacttatataaatctaaaacaaaactatatatattacatatatttagaaaaaaagatattggtagtaatagtgtttaaattatacatttagttatgcttaattttacacacttaatttttagtagtaaaattctttgaatctcgttttcgtttttttttattatacatcccataaaaaatctcagttaaaagcaatagtggactattcacgtgtatattgtcaaatttttggtaattcacttataattttaattattaaaaaataattttgaatgtttaaaatttgtttgagagaatttttgaggtttcgagagagagaaatttctttagttattaatatgagagtattattattaaatatttaaaatttttaaaaattaaaaaaaaaagaaaattaaatatgattggatttgatccattttttaatatatcgacgtatacatttgtttttgttgcctaatcacgattattattcaatgaatttgtatgataagcagcatattgtgttgataattaaattcaaggacaaaatgagttctcttatgtttcggttcacaatttgcatgaggaccttggctataaatatatatatatatatatatttatatatatctcagtttaggatttgtttcatggatattctattaattaattaagtttgatataagagaaccaaatctaatcaaagaatgaaattccaaaaaggagtgagctacttgaacattcaacaaagacagttataacacgtcgggaaaaaatcatttgcaattaatcataatattttagaatacttagaaaacatcataactaaaactaaaagtgaaaaaaatattgttagtgtggaagatttctatatatattataggccttctattctcccggccagggcacaccgcccattttcaagggtcgggtgtggctctttctacccctatgtgctgcatgcatgcttgggtcggttctcttgctcatcttctggttggtttttat

SEQ ID NO: 234900 - DNA, 1525 bp, Cannabis indica
aaatcacgtaatacgcctaagttagttagggtgtttcaggtatccatccattacacaccctccaaatgaagtttctgactttgggagggacctccaaattccatatcttgttccaccaagtccttgtaattttatctgttgatgcttcagcttctaattcatttgtgacagccactctatacccactatttactgtgtaaattccatttggtgtgaagtgccacacatgatcatcgttggcattattaaaacaaggagccattcccaaaataagggggatatcgtccaaatggaagctttgttcaattaactccttattccaattaccttgctcatctttcatttgatctagagttgttccttggctaacctttgctggagttcggagggagaaagtggtagggcgaggaagccatttatcttcattaattcgaacctctcttcctgactgaaccctccacctaatgcctttgtcaataatttgtcttccccaaagaatacttctccacataaatgatccatatccacctatttttgcttctaagaagttggagttggtgtagtagcatgcctttagaacccgagccaataaagaatggggattattaattattttccaaccttgttttgctagtaaagattggttgaatttctccaagtttttgaatcccattcctcctttgtcctttggtttgcaaagtttgtcccacttcccccaatgaattttgttctttgaatccgaggatccccaccaaaaccgcgccatgattccatgaatgtcctttattagttccttagggaggcgaaagcaactcatcacgtaagtggggatggcttgaattacggctttcaacaaaacttccctactggcttgagaaaataggcttgctttccaaccttgtagtttgtctcggatcttagagcggatactttcgaagacctcctttttcctttttcctatcaaagccggaagcccaaggtactttgtgtggcattcaacaagttttactccgatttcagctgcgagaatggcgccttgctcttgtttgatcttgctgcctacacatagagaagactttgcaaagttgatttgttgtcctgatagccatgaatattcctctaagactgccttcatacttttgcctttctcaaccgttggatctaagaaaacaaagctgtcatcggcgaaaaataggtgtgataatttaagtccctctttaccaaactttattccatggattctatccgctctttctgcttcgtggatgagacaagataaccctccgagcaaagaagaaacaagtatggtgagagggggtcgccttgtcggaggccgcgttgaggttgaatgtgtccactaacttccccattaattagtactgaaaaagagaccgagttgatacatttcatgactttatccacccaactcttatcataacccaagcatatcattattgcctccagtggcggacccagaatttaaagtgagggggggcgtaaataaatttaaaaagaaaatataaag

SEQ ID NO: 234901 - DNA, 1295 bp, Cannabis indica
aaacacaaaatatatgaaggcattaaaatcaagaaaaataagtgcaacttaaagtactctacacgctggtaggagcattttcccaaacaagcacagatggagcatcatcatcctaagcgtcttcctactcctctagtacatcatttccttttccttctataggagtagatggccgagtaggcatatcgggctccctgatcagtatagaacgttctttaggcctctactcggtcaggagggtcttctttttcttgggcggcccctcctgcttcgaatattcttgagcctccttctcttgctcagaatattcctcagcatactgcttggctccaacatcacacttcaacttaagcatagccccatgcttaagttgaatgagctccttctcttgctcagctccctcaacccggccagacctggacttcttcttcctctccttcacaggctgggggtacaaagcttgtcggataaagcttttactccacaaagttgtcctctgaggtaaaaaaagtgatgtcccaagcagcagtcggcagctgcagaattttttgggccctttccctatgtgccaatgtgaagggtggatggaaatacacagggatctgttaaaactaattataggtggtatccatgacttccacaaaaaccaaaatcttgctaacctctatgtccatggtgcctgttagccacttgtagtctagctgagagaaatagaagtaccccgccctactctacttaggggtagacttcaaatcaaaaagctagttgatgtcgtgcggggacgacacgccccatctctgagaggcgtagagaacgaacagggcaaatcaatacatgatgcccttgggcgtgaactgggtcagacagaggtaaaaataatctgcaaccctcttgaagtacgagtgcaaaggtagcatcgccccttgcttagtatgtgcacccgaccaggcacagaaccctttctttgggttagttgccttttgatttggagaagggagataacacttaagttcgcccaagtacccagccttgtccaactctctcatacggccttcggttatgttggaccgaggacacacccagataaggaactttgcctcctatgagggaccgcctcggtaaactcctcggtgacatagtctgctccctctaccaagacgtcaccctgctcgaatactggcttcccaccctcattatatcctccaaagtgtacaggccctaccactccttcctcctcagctttggaaggattatcaagacggacatcttcctgctcctctatctcctggacctca

SEQ ID NO: 234902 - DNA, 1301 bp, Cannabis indica
tttttttttatttattttatttaatgtgctgcttaaaattgtggtgagagaaaaaatgtaagcgtaatttttgaagcatattggcttacggtttttcttgcattgcatatctaaagttttttagtccatttttcttgttttgggttggtacattttagctttagatttttgctaatctttgaataataaaagatggagtttctaaacatttacttatgtttttcagatctgaaatattttttctttagaagtgttttaaacgctataggtatttattgcttgatgactgacttgtaccaaaatcaaaatcaaaataaataaagggctctcactcctgatatcttctctctaatcctatagctagggttctatcttctggctagggttgctgtttccggctaggctgtgtgattggcctggccaggccgagaggaaccctcttctatgctttgtgtggctggtgttttagggctattctcgctatgggttgcttgcgatgtgctttggagtgcagtaggaagtaggaacccttcgatgttgggaggtggtgttttagggctattctcgattcactcgttttggctttgtaatggtggggtatgggttgcttgccgagtgctttggattgtagtagggactcatggccttttcggtggtggttgtttcgtttcgttcatagtttttcatctaggttgtttgttcgatctaatgatttagtaagttctaattttgtttgtgtagatttgaataatagtgtttgtacaccattggatgtcatagactttgggttttagtcaattttggttcgatatttgctctctcattttggataggtattggttttagatctttagtgacatcgttacttatttagattcatagcaaattaaccatagatatcagattttcactgtcatgtgattgtgagcactctcaccttgtgatgaattcattgacagaataattctcctaaccatgtgtgttataatagatttttagaggattcttaagaatatcatatttggtatttgacaaattttaactattacaaagaacaagtcatatggttattaagggtgtatcacaacttaatttgaagctaattaaataaaatcatgttatattaatgtagttttttattcttttaaaactattaccattaccaaatcttacactcagaagattttttcgacatattcaaaattcattctaactattcataaaattgaaatataaaaacttttagatgtaaaataaaataccttctacatgtgtaaaagtactgtagcattctctatatt

SEQ ID NO: 234903 - DNA, 725 bp, Cannabis indica
gtattaaaattttctaaatagtcaatgggattacaggcacctttgtattttagggattcggataaccagaatcccttggggagtcgagcttgtcgcacttctacagtgaaaggagaggtcccatgcagcttgtatatgggctttctctgctgctcgagcatttttaaggcctgcagaagcataccttgatcgatattcccagctaggggagtattgacttgtgttgctgcaggcgttatcactactgcggcgatgtttgctgggatattaaccccagtcgtcgcagctggtgcgctaggcggattgatacgattatttacaccctgatcgtccattccgggatcacggggctctttgacatcacgaggtgtctaggagcgcaccttgaagacaacgttaaggtgatcgcgtagatcgcccctgtgaacctgatatcatcctccttgcggtgtttccaccgaacccgatctagtgtacctgctgggtgtgcgaccatgcgaggatgaggaggcagattcaatgtcgttgtctcgcgactgaggtctgctgcgaggattgagtcattcaaggtcttcctcagtctgtgcctccggattgaggtgttccctcgatgttggttggttcaaatcgagtccctccgggttggccctctgttccctgtgagtacggttattacggcgtctggaattagttacctgatggttttccgtgcgagtagcgggtac

SEQ ID NO: 234904 - DNA, 1277 bp, Cannabis indica
tttacttttctttatgccaagctgaagtatgcttgcaccttacttaaagttaggtttagtagctaaaactaagcattaaaatttttctacataagttttctatgctagtttgatgcattgtactgtgtgggtgcctcccaagtgagcacgtaaacttacggcctcttggtcacttataattcactaagttttatagaccttgcatgggaattttcttaaggtgctgcctattgtacgcatgtcaaactaaaaaagaataactttaaaaataataaatttaaacataaacattattttttattcattaattgacctttattgatgtgcaacttacataaatttaatatataagcttacataacaaaattttacttctagatgtcaaatggctatccttgcttgacttgcatagcagaggccactgttatagaacgatgagcggccacgccaaaaaggtcgtgggtactagctctttttcagtctaatgttgagttggtaaaactactattgcaaagtagcattctgtaagctagttactgatagtatatgcgaaggtgctctccatttcagtatcttggtaggagaataagctccatgttctcgttgtaccttcccagcctgaaggctctcttactagttatctctataacttgataaggaccttcccagttgggtctgaacactcctgctattggatctttggtattttagaaaactcttcaaagcactaggtcttctatgaagaatttcatgtcattgacttgtttgttgaagtgccttgcgaccttttcttggtaggcctatagctttaggttggcttgatctcttcattcttctattttgtcaagtgattctgtcagcatgatgttatttttatcttggtcataggttgtcctcctgtgagatggtggcaccaattttacaagcaacatcgccttatagccataagctagagcgaatggagtttgcccaatagtcgtcttctcggtagtcctttgtgaccataggacctctgggagcaattcaggccagttgcctttttcttcctcaaggcgcttcttcaggttgtccttgagggtcttgttgtcagcttctacctgcccatttacttgaggatgggccacagcaaaaaagcttctaatgatgccatgtttgttgtagaaatcagtgaatatgtcactgtcaaactgctttccatggtctaacacaatcttctgtggaagtccaaatcgacatatgattttcttgacaacaaagtcaaggactttcttggaggt

SEQ ID NO: 234905 - DNA, 834 bp, Cannabis indica
ccaacttcctgcagattagaattcagagcagaggttgcatttgatgaatcactctgaaaaatcatcttcgcatacccttgctttaaagcttcttcggcttccttacaaagaaccatgatctctctgataaggggctcactcacagtcaaccggagtgtgaagcaattgatgaatctccccgtttcatttctgaagaccacagcccctgccgcctggtgtttcccaatagatacatccgtattacacatcacccatccggaagggggggagccattcaatgataccaacttgctgtgttcgcacatcttccgtaatttcaagaatccttgtattaatatgttggaggatggtgtggagaggggtaggcgttcccccatgagacaagttgtttctttctcgccatatgctttcaaatattatggcagccccaccaagaaaaagatgcagatgaagcccaacgagacgattagaatctatagaaaaccagtctagccacgcttcccagcagtctatgtaaatgaattcgttcttatctgccaccggtagccaaaccacactgccctcgcaaaattgcagtgccagagcaaatggagtgaggatttgacttcactatggcataatgaacactttgggtccacgatagagaaaatggaattcagcttatccttggtgaggagacaattggccacaattttccaccatagaattttaagtctctcatagatttttgaaccccaaataattctccacttgttgtcacagtcagccatgacatccacattcttgatcaccttgtaagccaatttgactaagaagttgtcgttgcattctggg

SEQ ID NO: 234906 - DNA, 1047 bp, Cannabis indica
ctaagttttaagttaaacactaaaatgtctaaactttaaataccaaatagtttaactaataaatgtaatttatgtaatatattatatacacttttattaaaaaaaatatataaattagtttaatttagttcattctagttaattgggcaatttagaataattcataaaccacccaatatattcattgggcgatttaaatttttattgtattatttcgggttgtatttttcatcgggttaatcggtttggcttgggcggtttattcgggttgggcggtttgtaaattttgttgaacacccctactaccactattactcttgttcctaagactgtgtgccctgagtcaatgaatgcttatagaccaattgcttgctgaaatgtgatctataaagtggcgacagaaataatttgcatcagattgagagaagtgcttcctgacattatttccaaaaaccagagtggttttatcaaaggaaggcaattgtgcacaacatcatggtgtgtcaagatatggttagaggctatgagaggaaagtggctaaatttgcttgtcttttcaaaattgatttgtagaaggcttatgatacagtggattgggagtttctcaaggaaatgctttaagttcttatgttcccaaagaagtttgtggagcttattatggtttgtgtcactacccctcgcttctcttttatggtgaatggtgctttagatgggtatttccagtttaagaggggtcttcgtcaaggggacccaatgtcgccgctccactttgggataggcatgtagtacttatcaagaatcatagctaaaattgccaagatttgtgattttgcttttcacccgagatgtaagagcttgaaacttaaccatttatgttttacagataacttgcttctcttttgcaagggtgatttcaagtctactctcctactacttagaggctttcagttattttcgaacacatatgggcttaaagctaatgaagggaaatttgttgtttacgaagcaggtttggccctttctttggataggattattgatatgtct

SEQ ID NO: 234907 - DNA, 1084 bp, Cannabis indica
gtactattactttccatgatattgcttacacgatttatgttacctcacccaaggaagatgtagaatgctttctttgtgttgcttggcttatttggcataacaggaacagagctctcagaggaaaatcacaggaccagtctcatgctatagtgaacctagcgcaatgttttctgacgaattacaaatcatcagtatcagctcaaaaacctcatgtgaaccggaccccctcggtctcatcctggatacctccggatcccggtcgcctaaagctgaatgttgatgctgcaattccaaagggtacgtcaaaagttggctttggtggagtcatccaaaacagtgacagtttggtggtaactgcagtagcttctccttatatagggggaggagacgttcccacacttgaagccaagtctctcctcgcctccttgcattgctgtattgaagaaagcttccccattcactgtgtggaaacagattgtaaagctatctcggatgctttagagcgtctcaaagaagatctttcgtgctttggtgacctaattaatcaaattagggcagctttgtctctcctccccgacacctatgtctcacatgtcaaccggacagcaaatactttcgcacataagttggcaacttgggctacggggttagacaaagtagcgatttggattggtgatgacccctgtaatctcaaagtttttctttttgtttaatgggcaccttcacctcaaaaaaaaaaaatacagcatgttaatgctattaaatatggcattttataactaaaataattaatatgggtatttaaatagaaaatgccttaaaaaaacattaaaaagataatcaatttttcaaaataggatcacgctctctcccgccacataagattttttctctctcctgcgattcaaattgcttagtttcccatgcgatcaaaatcaatcaccaaggatccttcatcaagaaactgatttttttcatcaagaaattggtttcttcatcaagaaactagtttcttcattcagaaactggttttgattatataaaagtaaaatttataataaaaaaaaacctataaatccaattt

SEQ ID NO: 234908 - DNA, 907 bp, Cannabis indica
ttgattatcaacttgggcgttggcccaacactaggtcaacctaggcgttgggccgtatttctaggggctcgggtttgtggttttctccccgaatttgcttgaatcttcattatttttgatgatggaaaaaaatgctcgaaatacttttttgagatagcccaggttaacaatatgtaccaacctgggcgtcaggtcctagtcatggcccttcgaaagttctgtttcgtcgccagaaatagctgaatcttaatctttctaaaaattgagaagggcccagcttgacaaaatgtcaacctaggcgctgcgccagcctcaagtgtacacgtgggggctggaccttgcttttggcacccaagaagtgttgtttctttcttgaaagtacctattttcctattttgatgaagatgaaaaagatacaaaaggtggatcgtcaatctgatacttggaaggcgcccagattgataaattatcaatttgggcactagggtgcccgggcatcgagtggtcaaaaattaaatttcttcgaatctaattctaatgcctcaaatatatctgtggtatatctagttcatgtccaaatgcaaattttgacccatttgcactaagatagtcttaaaaaatgaaaccctaattgaggatatccacttagacgctgggtgaaatcctaaatgcctaggtggtttctgggggtgtaggttcgtttaattttagctcctgggacatggatttgattgctccatatcttcatggtatagaatactaagagatagtgagttggaatcaagttgttgaagtctgaactttcatcctagagttttcaaagtcaatttgggtgcaaggctgagcccctccctagtcgacttgctatcactcgaactactcaactctaagatgtcatctttcttgc

SEQ ID NO: 234909 - DNA, 1318 bp, Cannabis indica
agaaaaaaaaaacaaaaaatcaagtcaaattattaccattcaaaagcacaaaatacgtttactctccagttttcctgaaacgtccctatttcatggtcgttgtgtatttaaggtgaatatggtaaactagtttggttagattttttccaccattttgatgttctcaactttgattattatcaatgaaatattgttcaagaaaaataacaatggcatggaagttcaagcataaaccctagctagctaagctacaaatcaaaaccaattagtcttaaaaatgagtgtgtacctgaaaaactagaccaacaatggtagtaccagtctttcgaaaaggcggtggctctaaacctttctccgaaagcatagcatttcttctgcaaagatcataactgaacccacccttggggttggatgtgacaatactcttcgacattatgagctaagagagaaaaagagagagttggaaatgtataaaccctaatcgatttgagaagaagaaaccgatttgagaagaagatgagttgggttgttcctcttaaaagaaccaccagtctctcctccttttgcttcgaggacaagaaaaggaaatcatcatttttaggaaataagttttagggaatgtttcttggacaagaattaaaacaaaccttaatgtttttaaaatttatattttatttaataagataatttaggaacgttatttttttttaaaaaaaaaaagctacattttttaatgagcaatgaaaatggaaacttgctaatttttctttcaaaataagaaaccttattgcaaatatttttcttagaaatagagatggagaaattataattcaactataggaattaattattaataaataataaataaatatagattttttaaactgttatattttaaaaattgccacttaaaccaatttacttcaatttttgaataaaggtaaaactttcattaaaaattgcatactacaatattcttaatacaaaaaaaaaaaaaaaaaaactgcaaaactagaaagcaaaatatagttattgaataagttgacaatgcctgctatagtgatttatgatagatcgtttttagttgtaggcaaattattatgataatatttgttcccaaaaaataagactgctaacaaaacagaataataataattaatcctaaatatatactactctgggtgactattcaatggttacatttttattgtaaccatatggttacatttttctttaacctgtaatagcaggttactaataggtagactttccttttttagatttaattaattataattaactattttcttaaaataat

SEQ ID NO: 234910 - DNA, 2158 bp, Cannabis indica
ctctttagtgagatccattttcagaatggatcctctctttcctgccaaaatgtcccttctgaattcaaaagtttgtcctcccaaactcataacatccagacacaccaacccatttccatttgtttccaaggacttcaagcctcaatcggagccagaaatgatgaattccaaggcggaggagcttccgactaatcaaactaggaaaacctcgtagcccgccatgggcaatcctcacaagtgatccttgagggtatagatcttgtgagtgatcttaaagttcctcctcaggctgataaagaatttcagagaaaggttggcatggttgcagatgaagttgagaagggaattggagtggtttctatcaaagaatccagccaacccaagatcccaacctgtgccataagatcttggtgccaacctctttctagtatcgaggaatttcttgaggctaggaaaaagatctcggcttcaagaaatgggatctgatgatgaggagaatgaggtctgtgtagagatcaaggctctctacatgtagccagtctttctcaagctatgtgtagacggtctttttctgagctacgtgtagatggtctttctcatgctatatgaagacggtctttttcgagttcatcagcttcccctctcatcctctatttaggaagatgacttaatggtttgcccctagtggcatttttgtaaagacaagtttgtaacaagttttaggttttttcttatcgtaaatgccttgtaatattttcattcaaacttattacaattgtgtttgcttgcatttttattcacaatgtaatcaattatattttgatcaaatgttcagtacttttgggtttttccattgctcataatcttcatgtttaagtagttggtaatctactagactttttgattttcgagcagttgtcaattctgcctcgctataacagttataatctgccttaagcaaacttaaatatactttaaggattttatcactttgtatatttttaattttctcatatgaaaagttatattatctatcctttttctaggtttaagtacttttatcaaggcatcgtgacgcctcgttttgtactttcctagctcacgagaaccgttagtattcagttttttacgcgagttataacttttgattttcctttcccgtcggatatgttttaaataaaaaattatagttgtttgatcccctcttcgtcaaaaaggtttgatgaaggtgttatgacgattcgaaccctctttcgtcaaaaaggtttagtcagggagttataacggtttgaatccactttcgtcaaagaggtttagttgagaacctttgaatttcaaaaaaaattgaaatgacgggtttgcattatacaaagtatttccagatgaatttcagttaatcatacataaatgccccttaagtaatttttaaagaacaaaactttgtaattacttaatataaatgattttctttattcgtaactgaagtcaaaagtttacattagtaatgtgacatcatttatttattggtagtagggtcacaaatgttctatgttctagtagttctttattagcaagccatcaagtcgatccaatttatagactccgactccaactactgcttcgatgacatatggaccctcccaatttgggttgaacactcctgttgatgcatctataatattttcaaagactcgtcttagcaccaagtctccaacattgaatactcttttgttgacttttttgttgaagtatcttgtaacttggtgttggtgtgctgggttggtgatttgcgactcagttcatttttcctcaagtagatccaaggaaaattttaaaagttcatggttttcttcatgattataaaactctcttctgtgagtccatatggactagatttaattcatccaggtcattctgcgaggtcagtttgtctaaggcgtcgacattggagttttgttctctcagaatttttttgattttaaagtaatctaatctttccaagttcttttgaactttctctaaatacttcaccattttttaagcccttggcctagtattccccgaggacctggtcacgattagctgtgaatcactataacaaatgagatttttgactttcaatgcctctactatctttaagccagcgatcaaggtttca

SEQ ID NO: 234911 - DNA, 1092 bp, Cannabis indica
gccctaggtttacaggacctttcgagattctcgagaaagttatactagtggcatatcgtctagctttgcctccagctctttcaacatttcacaatgtatttcatgttttcatgttacgatagtacatttcagatcctgctcatgtgctgagttatgagaatcttgaactgcaaccagacctatcatacgaataacaaccagctcagatcttagacagaaaatataaagttcttcagaataagaccatagctttggtcaaggtgctttggagaaacagtaaggtggaggaagccacctaggagttagagtccgacatgaggactcagtatccagagttgttcaggttagagttcgaggatgaaatccttttaacaggtggataattgtaatgaccgcttagctttgttttagaaattagcagataattagggtttaattatgaaattggaatattaattatgaattaccattttatgaagatttattttaattcagaatgcattatatttgtcatatatgaaattttatatttttacatgttttgtgcccgacaacattagaacgcggcatttggccattagaatcacattttagtatttttgtagttacgaggcaacctaattagacattgggaatgtcgggagttatctgagatttagaattgaccaaattacctctaagtgacttagaagctttttagttttagcggggacaaaatggtctttttgaacaattagttctttatcctctagtgaactttaattaagctttattgatctaatatgaatttagataaattagaaaaaacaattagatttattcatttatccaagaatagaaaaaacaagaaaatagctttcctttctctttctcgagctccatagaagccagctagggcttgtgattcttcagcctaattctggaactttagcaaatttcttagtgatttaatccaaggtaaatatcctagcaccttttctttgtaaattccttaagtttcaagcaaggtttatgcatgattgtagaattagggtagctgtagttgtgttttgtttttattgaagtattatggagttattttgatgttagatg

SEQ ID NO: 234912 - DNA, 768 bp, Cannabis indica
atgaaggggattaaatgttttcggaaaaagggcaggttatgccgtaggtttacaaggcctttcgagattctcgaaaagattggattggtaatttaccatctagccttgcctctagcaccttcaacaatccataacgtatttcatgtttctatgttacggaaataagttccagttcccactcatgtgctgggttatgaaaatctagaacttcagtctgacttatcatatgaggggcaaccacttcagattttagacagaaaagataaagtccttcaaaataaggccatagctttggtgaaggtgctgtagagaaacagtaaggtggaggaagccacctcggagttggagtccaacatgaaggctcaatattcagagttgttaacgttagattaagaggacgaaatccttttaatgggggataattgtaacaaccgcttgattttagtatgagaattagacgataattagggtttaatttggaattagaattttaattatgatttgtgaatttatggtaatatatttgaattgtaggtgtgttatatatattatatataaaatttcatgtttttcatattttatgctcggtaacagtggaacgcgacgtttggccgatagagttacattttcttatgatttaatattttagtaataggaggaaaaattagatagacattgggaattttgagaatatttattgttttggatttgaccaaaatgcccctaggtggcaagggtgctctttgactaaggtaagggcaaattggt

SEQ ID NO: 234913 - DNA, 643 bp, Cannabis indica
gacacatcattggctggccagctccatgcaaaaatcactatggtcggccaaccgtataatgctagaaaaattagcaaagttaagtgtgcaacttatcgtagataaatctcaaaggcctaaagaatagaacctatcaggctcgctatcatcaagctcgtgaagctcatcatccatagaaggaagagccctctctaaatgcctgcaagccgcctccatggctctctgccccatggctgagcatgctccccaactaggcctctgggcacctctgctcgaaggccgttccctcctagcgggagggtcatccatcaaaggctgcccggttggcacaggccctagaggaggaagaggaagagatgatccagcgacatctttggcacgggtggtctaatttaccttggtcttggaacgacccgaaggctcctcagaaggtccactagcaagacctctcaacttggaagacatacttgcaaaaacaaagtagcaaagtcagaaatgcaaattacaaatactcaatgcaagacaagaatattaaagatagtgttgggttttatgccctaaataaaactccaattcaatgtaatccattttattcaatatcaataaataaacagaagtattttccattcatttgtgtatgttt

SEQ ID NO: 234914 - DNA, 1123 bp, Cannabis indica
tcctaagttgtcgacctattacaggatgttcgtatatgtgactcgaacaggacgcagacatcttagactcgattagtcttatacgcatcttaagcctatgagcttcacaagaatatgaatagataactcataccatggaaatcgcatactttattgtatttagtgaattaggccgaaactgttcttcatttattgtgtttatgtttttattgatttaaattttatattcaatgtacaaacggattgataataaaatcaatctttgtgtaatcaaagggcacttactttgtatataaaggagtgatccaacatgaaatggacagaacagaaaacccttgcaatagtggactaagcagaccgtgatctgactgaaccgctatactctctttgtgtcatttatatttccagtacatctgtgtatacataatttgaatattcgccattctaggttgagtactcgcataatcttgtttatatttttaaatatattactttattttggcgttgtctaaattcctccaacaacagaaggcaagaagtattacttgagatatacttaggcgctgataatcctcttcagaataaagcgttttcaggagattgcttgtattgcgagaagaataagacatagttagcataaccactcacagattaagctaaagagcggttataagcagttatttgtcattattccatgtgatgtaaatataaaacgtgggcattgtccacgtttcatgaacggttacaaagataaggtcccaaggaaataattgctatcctgaattcctataaatagagacagaattcaaagaataagagacgacaaattagagaaaaagagagaattatactgatctttcattgtattctgtatatcatttataaaatctcataataagatagacttgtggactataaagaattaacttcaaaatcacgttaaaaatcctcttgttgtttattattattatttatttaatttttgagttcatttattacaaaaatgttatttattggttaatgaaaatccacgttaacactatcattaactcaaaaagaaagagaaaaaaaaagaagttgaaagtataaagttgtaagaaacaaatttcatgaagaaaaaaaa

SEQ ID NO: 234915 - DNA, 1575 bp, Cannabis indica
gcaatatttcgtgctatcattgaaaaaagtaataaaatgcttattgcctccccttctttgaataaatttcaaataacatatatactatggattaaattaaggggttcattattcctttcaatattttgaaggatgaccttattagttttgcctcaacaaaggtttcacatttatgatttaaattaatgtggaaatcaggtttgtgattcaagttaattaatctccatagagtattataattaacatgtcctagtctaccatgccatagattggaagacttaagtaaataagtagaaatgttattaacttcattgataattggtttaacaaccattacattgagtttaaacaacccaccagttacataaccccttcctacatgcattttactcttggaaagcacaaccttttttgactcaattaccaaacgaaatccatgtatactcaaaagtgaaccagatacaagattcttacagatttctggtacatataacacgttgttaagagtcggttcctttcaagaagtaattttcaagatcgctttaccttgacccattatcttagatgtggtagagttttccataaagagtttctctccattattcatttcttcaaaatatttgaacatactcttgtctgagcatatatggccagtagaaccagtgtcaatcaaccattatcttagattagacttcactaggtttacctctgagaccattgtcgatagatgtatatcatcatctttagacttgtcttttaccatattggcttcaggattgttattcctttttggcagtctacagtctacatacttgtgacccagcttattgcagttacagcacttaccaaggaatttggactgctttttggtgataccaccttttgctcccaactttacccctttattatgtttaaagtttttcttccttttggagttttgaccttactccattagattggctttagccacctcccaactataacttttcttctccgagttcttgttgccttcttcgatacgaagtctaacaatcaactctttaatagtcatctatttttgcttacgtttaagataacttttgtactccttccacgaagggtagcttctcaatcatcacaggcactttgaaggtctcaataagaatcattccctcagaatgtatctcgtgtaagatcacttggaattccaagacttgactaatcatagttttggaatcgaccattttaaaaccaatgaatcgaccaacaacaaaatactttgagctatcatcctcagttttatatttttgatctaaagactcccatatttccttagttgtattctttgtaagatatacttcatatagattatttctaagctattaataatataattacaacatagaaaatcagctttcttccaaggtttaacatcgttgatgatgttagtgtctttttcatcttctttgaagacttgttcatcatcagtgactaattttgcaagattcatgttagtaagatagaagagcatcttctactgcaaccttttgaaatttggtctagtaaattatttcgatttttccccgacactcagta

SEQ ID NO: 234916 - DNA, 1330 bp, Cannabis indica
caaatctatgttaagcaacacaaacaagttactgttgaatgcaccgaaaaattcattgtcccattcaataaccaaagatctaggccgtgtctaaaatccaaatcaatatgaactatctaaagtacttgtatgagacgctcattggataccttgatcggtaaccatacctgtaaatttcatactccaaaaagtacttgactacttgttccctcaagaaaagtgggagaaaatgataccaccgtctccccgacaagtaaatctggtagctaagcaacaatggcaacataacaatacaatcctatatcaactctaacttcaggactatcaaattaacaatcaaattctggtggaatctgtatatcttaataattgcttgaaaatcataatagacagatagtgcaaactacagaaatagtaaaacaaggtcgatgggttcttacaagagaatggatacttccgatatgacgagcagtatcaatatacaaatgtctccccaatatattgacctgaactctgatatataagcttaataatgtcattgtccataatgagagcaccattcttgtgaagcctggagatcaaaagaagaacagtccgaaactcaatcgttaagttattaaaacctcgaaaattttaaagtaaaaacaaaaaggactaaagatccatactcaaatatttaagtttatcccataactcaagtttctctgaagatgtcaaattatttggctgacccttcccttgcattagcctatcagtaaggtgagaaagccgcaactcttcttctattcgactgcttagaaattgtatcgcgtgtggtaatgtagtcgtatcagctattctctggatgttctcaaaatgagattgcaatctataaatatcaaacatataaaaaaaacacacacaccccaattatcaaattagtaaattatacaagtcaatcacaactcaagaaacaaaagaaagaaaagttatgaagattaagaagtgtcattactggtctttgacaaattcatcaactcttttcctttcattggcaagttctctttccagatcatcaagcctttgtctatgagcattatatagcttatacaaaacatacccacttcctaaaaccccagctgaaacaaaaaccttcttcttatgtcttctccaaaagtccctattttcacagtggtcaaccatagtcaatggacagtctattcacaaatagaaccaagaaatcaaacaaaataaaacaatacatgaaaccccatcaagcagtgaagcttagaaaattcatagccttaagagaaaactaccaatcattaacaagacatatatatatatatat

SEQ ID NO: 234917 - DNA, 837 bp, Cannabis indica
catccttgagtagagttaaatcttttgttcaagttggttggcaagtaaggtctgccgtgaactgagttgaattctcttgttttacacttttttgttgtggattgttgttgggacccacatatgtggatttgtatatgtccacttgtcaaggattgcctattagttaggactaacaagtctttctcacatctttggaactttttaagtatatataacttaatttattctgtatcttggcgactttggaacttaagtttaatatattttttggtgctcattttatttgatgcttattatctttgtaacatgtgattctaaagataacattaattgttgccaatggtggcttgcatttttactagttcgagcaagttgtcggcatgagacttaactctttgggtactcaattttagcacgcgacctacttgtcaaagtctcaaatataggtcattcaagatgtctttgttaagcaaaattttttaagttatggctccttggatcgccctcacttgtcttttatctcgtctatatactgactttgccccctgttcgaggagaaattttgaaaaaatattcatggcaaaaattttaaaatcccacacacttaaagtgacgtatcagtaatgactctgagatttgtattttttttgttacaagcacagttttatgtaggctcttttacccccaagtgtttataggttaagcattatcatattttactctttggtgggtttggcataataagaaaagatctggttactataacactcttatagatgtgagtttagctacttacattatagaaaaaaaaagctaatagtttaataactaaaagtt

SEQ ID NO: 234918 - DNA, 1001 bp, Cannabis indica
tttcaaataattatgttcaagaaaactacgtatttgtgatttggaaaacatacaaacaaatattggaactattttgtgcaagttataaactattttcccaccaactttctttgacataatagttctcgttgttatgcatctccctaaataagccatactaggtggattgatgaattgcttaccggagcacagaaaaagaacatatacgtaatggaattattaatcttgtaatactttatgttctagtcaacaataaataattaattgtaacacaaatatgttaatttcaagcaagatcaacaagaaattaacaaagtcggggtaagatgaaatttcaaggtggatagggatcaaagcctattgtaacacatgttgtcaattggggtaaatttttatttatttatgattggtaagtattctttttggaaaaaaataataatcacacttacctttacttaaatataggctaatctcgagacaagagaacttctaactgctgtggacactcttcgaaagtttcaccataaagacaacacttggcgcaatgaatacgtgtaacaagcttatgtaagcttacattgatatttattaatttttgaacatttctttcaattttctttgtattaaaattaactcacacccactaaggatcaccctactcagaatgatatagatcccacccagtccccaggtgacttgcctgttatgatgcaagtactggatgagcaatctcgaaacctaagaggctttggccatctcacgatatttaaggcagttgggaccaaaagagcaacttccacgtcttctgctactggctcgcatattgttactatggaataataagatgtcttacaaagataggtgtaggaggtacagcaggaaactcagtattcgatacttgaagtgattccattatcaatttaaatatctctatcggattatgcttggtttcaacttgcttgctatggattcaacgtgctattagtagttttttttttttt

SEQ ID NO: 234919 - DNA, 1817 bp, Cannabis indica
ctcctgcaccccgcctcccatcaaagtgtactccaggcgtacacctcctccacctcttgtttcatgtcgtgcacctgcatcttcgtcattagattcagaactcaatgatgatcttttcattacactacgtaaaggtaaacgcaagtgtacctatcctatttcttcttttgtttgttataatctttttcctttttctcttgcccttttattgctttttttgattctatcactatttttaaaactgttcgtgaagttatgtctcatcctggttggcttgctgtaatgatagaagagatcaatgcttgcgaatgttatttggacttggttaatttacctttaggaaaacagaccatattgtgcaaatgggtgtttatggttaaagtcaatctagatggaacaggagctcacttaaaggtcggtcttgttgccaagggttatgctaaaacctctagagtggactgttgtgatactttttcttttgtttctaaactgacatctgttcgaatgttcattttcatgacaattattcattattggcctttgcatcaacttgatattaaaattatttttcttcatggagatcttgaggaagaagtgtatatggagcaatctcttcggtttgttaaaaagtaagtcagattattatgtgttttataaaagatcaattgctagtatcattttgttagttgagtatgtggatgacatcattattactaaaaatgatactagaggcatctcatcccttaaatctttcattcatactcggtttcatacgaaggatttaggggatgctcaagtattttttgggagttgaagtcactcagagtaaacaaggtatttttctatctcaaaggaaatatgtacttgatttgttaagtgagacaggaaaattgagaatcaaaccttgcagtacttcaatgaataaaagattgacacaagaatcatggacacacctagattgagtttttctatattgcagatcgggtaggttcctaggtggatagaagatccacttcaggttattgtgtatttgttgggggcaattttatctcttggaagagtaagaagcaaaatgttttatctagattcagtgcaaaatcagaatatagagctatgacgcagtctgtgtgtgagatagtgtggatttatcagcttttgactgaagttaggtttaagacttcaattccagcaaaattgttgtgtgataatcaagttatttttcaaattgcctcaaatctcgtattccatgagcgaactaagcacattgagattgattgttattttattcgcgagaaaattcaacaagaatttccttaggatatgtgaagactagagaacacttaggaggtattttaactaaggctttgaatagggtgctggttgaagctgtgcataattaatatttatgttccagcttgagggaagtgttaaaatatatattagatgtatattaatggtagaattataattacttagtttccaattcttcctagtttcctatttagtcttcctaattttgtatataaatacttgttattctattgaataaaatactctttttgattcactatttacaactaggggtgcacatttagacccgcaaacccgaaaaacccgactacccgacccgacccgccgccaaaaaaaaccgatcacccaaaaactcgtgtggtcggtcgggttcaacccgaaaaagactccaacagatttcaggttcggatttaattatttgatttttttctggtcgggttaaaacccgtaacctgaaattataaatttttattaattaaaaattaatacttaattaatatacttaa

SEQ ID NO: 234920 - DNA, 2120 bp, Cannabis indica
tttaccgagctcccattatctattaacactctcttgatccttttattggtgagttgaatggttatcaccaatgcatcgacatgaggatacctcacgtttttctcatcttcccccgtgaatacaatgggagaaatccgtaggttgacccgctaatacctcatctcgaattttaattaacataggatcttccaattgtgtctttttgatcctttccaacaaattttattgaagtgtcaggttatgtaacttccgaaccataaattgaatttcagccttaaccatttctgaggctaaaacctgcttggaaccttttatgctcaaagcgtccgccacgatattggctttctcgggatgatacaaatctcacaatcataatcgttgactaatgccagcctctacctcatattcaaatccttctgatagaagaaatacttgaggctcttgtggtctatgtagatctcgtatttttctccatacaaataatgtcgccatatctttagaaaaaacagaatagtagcaagttctaaatcatgcattagataacgttgttcatattctttcaacttctgggaagcatatgctataaccctatcagcttgcattagaacatatcccaaactcagtctggatgcatcacagtaaacgacaaacttttcttggtctaatggcaaggctaacaccagtgctgtgatcaaccattgcttcaattcttgaaaatttgcttcacacttgtcaagagtaattactcgtaacggtattaactatttccaaccctaggtcataacctaggctcaacaaatatctaatcaaagtctagataataatcaaggtcataaccattcaaccattaatacttagccacatatggtgcttacaacgtttcttaccttagttcagaactcaagcgtacaggccgacctgagtggaaaacaagctagacgatcccggtcctatgtcatgacaaccaaaactcaataaaaaccttaatcaaatttctgataatagactcgaattctcataatcggacacaccctactttccctcagatcaaagtagcttaaacatctcaaatacaccctgaatttcactccgaaagaaaccccgaatcagatcggacttgaggagaaaaacccaaaatcccccttgcttgccaaaccaatcgaccggtttgctaggtgcctgaaaaaccggtcgaccagttttccctgggcagccaaggtgatttctagttttcaccccaaaaacctatccaacctccacaaaatctgctcaaacctttcagatcagtttaatatagcaaatataacataaccaaacaactaattcatcacaatttatcaatttgctcaaaatcacaatttaaagtgaagaaaacttaactttggcttcaacaaacaaaatccaatccaagcagccatagagaccacttaaaacaattcctaacatgctcaaaaacctaccctaaatacaccccacacctggtttaactcacacagccacagaattataaaaccctacatgaaaaccaactcaaaaactaatattttcaatccaaaaaggttaagaacctaccttcaagctcttctaggttgacttgggacaagatttagctctaaaatgagggtagaagctgaagaaaaaatcctcaaggtgggcatgttttggcttgcacgaagaagacgaagagaagaggaagtttggtttcttgccttggaagctattcccttaaataggttttcttttcttattttatttatttttttaaaagtcagcccataataatataaaatacctatcctaaataatgaccaacttaccctccaagaaacttaaattctaaaaatatcctagtggcattttggtaattttactaatccattaaaacgacattctaaatattctaacctagtacagaataccctcaaaataattcttccatcaatgtcgtgatatttttgaccgtaatggtaaatgtccacagcacctgggcccgataaaatattttatttcaaaaatggtatcttcgatacacacatatcccaatataatctctgtaattaataaattacgttttatgatcattcattgaacccttattaattaccctaagtaagatcata

SEQ ID NO: 234921 - DNA, 1103 bp, Cannabis indica
tatttttgttacattgaaacaaatagtatatttgaaaaatttagtaaaaatagacctaataatactcatattttacttaaaatacacacttaataaatttattgaactcattattactcagggtcgaacctgacagtgataaaagaaactaatcataaatgcaccacaaataaaattaaccacattacactgcatggttcagtgtagtgtaatgtagattttgcgagttttgcaattaagactatgaataaaattaagagataattattatttgtaaaaaaaatgacatttttacgtttaaagaattattttacatttaaaaagttttttataaaaacaatacgaaaataacaagaaaactacataaaagtaacatgaaaataacatcaaaacaacattaaaaattaacgtacaattaacaaaaaattaataagagtacaatttaaaaagtgtattttctgtaaattaaattaaaaaaattataaaaaatatttaaaatgatgtgaaatcatatttttgtaattttatttgtttttgtgtatttgtgaaataatttctaaaattaataatgacacagaatgtagtgcagattttacgggttaagcggtcaagtggctattcatgctcaccccaaacaagtatataaaatgtttatatagaagcccaaagcaacttttaaaagcttagccagcgctatatacattatatagcttgatatcattaattagcctaattttataaccacaacaatgaaacctcgtaagttgatttttttctaaaaagaaaaaaaaaaaacaaatcgtatgttgtaaatgtcctcgaataataaagtagttttgaaaaatgccataaaagagtcttattccacaacaagcccaatccataggcctggcccagctgcttttggtcaagagccaagccttgagtagcttacaaccacctggcccagctcaagtgttaacttttttaggaaattacatttatacctactttactttacttgttttaattttacctctatttttcatatttttttagatatacctacttttatggatgatgtttccattagaccccttaggttatgcaaattatatgctaaa

SEQ ID NO: 234922 - DNA, 684 bp, Cannabis indica
ttgcatcgtataaacaggcaaagcaaggcctgcagatttgatcaacgtggcatgacctgctttagaaagcgattttaatttccacccatgcaacttcttaacaagattatcaagaataaagttgaagtcgacatccttttggcgagatctaaatgatgggagtcccagataatttatgttccccatcccacagttgagccccagagcctgtttgatacccctcttcattttgttacttgtattaccggagaagaagatggatgttttgagcttattaattctttgaccagaccaatcgcagaatttctcgaaacactgccacatctccttagcttcattcagatttgccctgcccaccagaatcagatcatctgcaaagaaaaggtgggacaaacttgggccatctttgctcaacttgatacctttaatggttccacaactcaaggcattctcaagaatacgtgaaagaatttttgcgggccagataaaaatgtaaggggaaagggggtccccttgtcgaatgccacactcagtgataaaactactaatctttctaccattgaggaaaacgttgaaatatgtcgtcgtaaggcactgtcgaacccagaggtgaaacgtctcaggggccctgaagctgcaaagaacgtgatcgataaaaaaccagcttaacttatcatacgcttt

SEQ ID NO: 234923 - DNA, 824 bp, Cannabis indica
aaaaactactcgttgagcctggcataacctaaatccaaacgtttgattcttgagtaagttctcgatttctcttatgtttactttgcacatttatcttctgaatacaattttaatttcactgtagaagatatgtaggaaaccctaagttttgaaactctgtaattttcctctgtaacgatccgtgctacttcatcattcataattcttgttttttgaactgcataattcctgcttttcattttgcttattctaagcttcatgaaatttttctcctaactggtgaaaattccaaacttctgagttttcacttttcattgaatattcttattctttaatccgttgagtactcttggttggcatatttgcttgttttaatgttcgatatcctgaccaaacactcatcttgtgtgttctcttttgtagatgaacctaggtcagttttggggaagcgaacactaaatcgaccaggatctgcttcaactcttgcacgaggatcttcctcgtcatcgttctagtccaacctcttcgagtgacggaaattttagcttaagtcttccgtccagccataggatgatggcttgttcaaaaaagacaaagcgtagaatcgacgcatccgaccctcaagtggcccagcatgccaccttaccaagtgacgaacaagatccctccgtccaggaggaggaagatcatgatggggacaccaaagtccaggagattgaggaaaaggacgatgttcttcctggcagtccttccaaggtggaggaagaaaaggaggttggacctccaaactctgaggcatataatgaggctggggagccaattga

SEQ ID NO: 234924 - DNA, 1322 bp, Cannabis indica
ggtgttaaacccctcgctttatcttccttccagctcactttgtcttcttcattcctaaactagagccaaaacgcccaaaccccaaccctcaccaactaccaccattccacccccacccccccgatttcaccatttttaactattttaactcaatttttttaaatcttttattttacatactgtaatgctgcatacttagaatatagatttgtaaggtaatcaccattaagtatttatattttatgattatacatgattatatatgttgttggccctattttttaaaaaataggcattagggttatagtttcttaatttcagagattttactaaactctaagtgtattatatatgctataagtgaaaattattatttttataatttttgttcggtaacgataaaaatgcaacgaatggttgttatatagtcacatgagatattttagaatcttttatctagtgggacaatcatatgtgatattttaaatatcaagtttagacaaagttgtggtgtttgatcattttacccttaaatcttgagttaacttaaatgggaagtgaggggaaattttagaaattatccttgtggttaattttatctttagtggaatcttagggttttctaagtgtcttgagttgaataatgctttattaaaattaatcaattattgattaatgttttattttgcaagttaattaaaaaaccataaatcatctcttctcgtagtctctttctcctttggccaaaagaaccagcaaaaaagaaggttattcttcatcaatttcttatgatttccagcagaaattaagggtggagatcaaaggtaagctctaaaaactatttcttttttaattatgaaagttcaagtttagttcaaccatgcaaagtttgaaatttagttctgtccgaaccctaactaataggggatcgtttcttggattatttttgagttcattgaagtttatttgagctggttttggtagctagtttagtgattgagcaagtttgagttcaagaactcaaacttggctcaaccatggcatttttcaattttgtgtgttctagctgctactattgcttggattatgtttattatgatgtaattaggtgatctagagctttgtttgaagtttaggattattttgagcttgaattaacactttgtgtttctctgcagccgaaaacgacagaatatttctagggaaatggtctaccgtttttattgccagactacccaaaaaacagtatgccgtttttacaaattgccagccctttttcaggtagttttgccattagtctttttttttcgtgtttccttgta

SEQ ID NO: 234925 - DNA, 1078 bp, Cannabis indica
gtttcatcatttcgtataatataaacgctgcttggttgctttttagttttgttttcttttgcttatctaatttttcttcactaagattgttgacgttatgcttacatttgcttcagcttacacgccctacctgttagttattttacagttttgtagttttggctaattatggcgaaacatgtcaaactagctattttttttttaaaaaaaaatagtcaaactaactatctaaagtactagaatttacaaaatgattttatttaatttactttatgagactatcataattttggtggtttctagtctttaaaaattaattttataaaatactctttctagtctttttctgatattgttacaaacaattgagatttctttagatgttgctttgcaatacagcctagagcactgtccatcccatgcttgaattttctcaccctaatccataagaaagagagggatggggactggggagaggagaataataaaatttcaaagaaacacgtctacggtctaccactaaagaagggacatttaaaagacatgatctcgtgtgagaataatttggaaaacgatcagttttttattaagaagacaacgtaatagtaaaagatcaccacgtagggagaaggttttttggttatttaattttattttattaaaattaagattagtttaaaaatgggaattactccatatactattttttttttttttttttaaatttacggtttgtgtttctaaagtggtttcagcgctagttgcaatatggatttctgtacgattttttgttgtaatttaggttgcagcgctagttgcaataggggtttctatgttgattccataaaaatgcaaaaaaaacttttttgaattgtaaaaatgaaaaaaccccttaaaaaaaatcctgtatccataatttaattttttaaacattaatctcaattttttgatacaagccgaaaacgtgcaatgttactaatcttttatttgttaactaggtaatatagtcgctcttcgcacgactaatttaattttttaagtgttatagtaaaaataattatttattaatataataaat

SEQ ID NO: 234926 - DNA, 728 bp, Cannabis indica
ttcctctaaagtaggtagtttgtgacaaatggtagtactacctctccatccctgatccatgcctccagtaggatacagattctttctttgttacaaaggaactctgtcggtttatcattccgtcgacctttttgatgagcttcaaaatttcatttttcttgtgccatttctatgtcagcaccacgttttgaacccttccatggccgattttgatcattttggttagatggcttagccagtcgacagacagtagcttcagtattccttgatttggcgatgagctctcactacaagaaaaaaggtctattgcgacaacaatattcgtcgcaacaggatttaaattcgttgcaatagagtcattgcaactataatcacctcaattaaggctccaacagttcaagcctccaagcagcctccaacaagccaacgtacaagcctatttagtgaaacaactaaatgagacatcaaaacaagtaatatatattaacaaacttgttaatgaatatatattgaagtttaaatcactctgaactttacttcttttgttttcaatttactgcattttgatagactctcaattgaaatttaatatcaatctttaatgtataaccatacattgatatttctaatattatttaccaactaacacaactatatatatatatcaatcgagcaacaaagcacagatagcaatccaaccaagctaactaagaaaccaaaaaaaaaaa

SEQ ID NO: 234927 - DNA, 1113 bp, Cannabis indica
aatatttatttaaattttaatttgttgatgctaaaaaatagccaacttcgtattgtttgataagtaatagcgataaacagaaaaaataataactaaagagagaacaccacaatttagaatagttcacttttcatatcgcgatggtaatggagctactctactttgagcttttattatcgaaaagctaatttccttacaagagaactagagaaaaataaagtctaatgttatactcatatttcgagcaagtaatatgattatgacgcatgtaaggaagctggaaaatcaaccaactcggactataaagaaattgttacatgagagcatgagtaactcgcagagtttttagtttgaaagtctctatgcgacaagatcagttagtagttatgaccagacggatgaaaggcaacatcatcctgctctttgtgaacatttgaatcgctgataacccaacttatgcgagtagctgaatgtaatgtttcagatctctgagattggttaaattagaacacaacaaatgagcagcaataagtcgagcatcctatcatggatcccatccaactaagagttatacagttggaggataagttcaggcaatatcaggatgaagaatatgagaaattatcaagatatgattatgaggaggaaacagaaccttttcaccccgacatactcaactcccgatttccacaaggatttaagaatcctcatgtcacataatacgatagaacaactgacctagttgtgcatcttaataattttaacattataatgcaagcaagtaataattttaaattattctattacttcatgggagcaattatccaaggagttcaaaaaacaattctaggtcgcaaaggacagaaggctagaagcatcctcactaacaaatatcaaacaatagccaagacttttcaaaaaaaaaaaaacaaatagccaggagagtcgctaaagacttatctaagtttttttagcacgacaacaataaaaataagaaacctaaatgacagcattcagttaacaacactccaagctggtataactacggacttgtcaatcgtaggaggcaagttgtggaatgatttatagtgtcacccagtcaggtcaataaat

SEQ ID NO: 234928 - DNA, 996 bp, Cannabis indica
ataaaatagattacattgaaatggagttttatttagggcataaaacccaacatcatgaccctctcaatagcatgtcaatgctctacactaggtctactagtaaacctgcataatagtcccagccgatgtcaggtctagtgcaatcagtggcataccaaagattgccaatgatgctcgcatatttaaattgtgttacaccatcatcaatgttcttaaataattttacactgggatcatatggtgtacgaccaggtttacagttaaagtaattatatttctttaagatcttgtcaatttagtgagattaatccaaagaaattctattttcagacctagtgacctatataccaagaattacagttgcttcacctagatctttcatgtcaaaattttcacataatactgatttcatattattcacaacatgaatatttgatccaaaaatcagtaagtcatccacatataaacatataatagtgcaaacactattttcatatttataataaatgtatttgtcactttattgactttaaaaccatgtgataagacaagattatcaaatttctcaagacattgcttagatgcctatttcaaaccatacaatgatttacctaatttatacactttatgtttttgaccaagaacaacaaaacctttaggttggtccatataaatctcttctcttaattcaccattcaaaaatacagttttaacatctattttggtgcacaataagattatgaatagcaaaaagagcaataagcacacgaatatatgtaattctagtatcaagtgaatatgtatcaaagaaatctacattttttctttgtctaaatcctttggcaacaagatgtgccttgtacttttcaacagtaccaccggatctcaatttcattttaagaatccacttagtggtaacataactaaatgctaagtttcgtttgactcaagagagtccattgcatcattaatatcttcatttcataaatcaacatc

SEQ ID NO: 234929 - DNA, 932 bp, Cannabis indica
aatattactagaaatataagataaaatactcccgtttaacattcgggaacaaaagtaattcctgtctccgccccgttcctcatttagacggggaattcccgccccaacccgccccagccccgtgaggaaaatatgcatccctagtttagtcctgcagctatttataatggggatcccttatcatgttacaacaacgtttttgccttttgtaacgaaatcatatgtaagttctacaattacatacatacataaatagcttctatgttacacacgtgatttatatatatttttttttctttcaaggaaaaaatatattctatcaaaaaagaggtggattccactgctctactccacctgcatattatagtagagattcaatgaaatgataggttgaattgaaacgacaccctctcctctcctcacacattcctattatatattaaatatatagctttcatgtttggactcattgtcataaaaccctattctttttcttcctcagaaaaaagagagagattgtaaaaatggccactgaacaaagaggcttaagatgtaaactgaagaaggtggttctggcttatagtggtggcttggacacttctgtcattgttccatggctaaggtactatgtttaatttggaagaaacaaagaaagaatcgtattttacaataatgggatattttcattaacaaaactatggaataaaatatcttaaagttttgaactttgaatttgtattaatatatgcagggaaaactatggttgtgaagttgtttgcttcactgctgatgttggtcaagtatgtgtttctaatttgtatttttttttttgttgggaatgttgtttagatggtattaattaacaattagatgggtttgattctctgtattgctttcctgtacttgaacatggaatttttatagggtataaa

SEQ ID NO: 234930 - DNA, 2993 bp, Cannabis indica
ttattcttacacaaattgtataacaaataaaatttaaaatatatgtatatttttaccgggtattacacataagcaccaatggtttcttaccgttgtacatattttataactactttttttttttatgacaaaattatgaattaattagttaaacaaaatatccatagataacatataagtcaaaagttaagccgtagtggctaattatgaatgttatacatgtagaaaaatgtcgatcgatatcttttaaagagatactatcaaggaattctagaatgtcatttgataaaaactagccaaatattacgactatttttccaaatattcaagatgttatgttgtaaacagatattaaggcgagtataaaaacaaatttaagaagcgagtaaggggtggggagcaatccccatctctccccgtttacatcattaatagcaatgctctaaatctaattatacacgtacctcactttcttctattattattattattattattattattattattagcattagcatgcattaattgtattatattaattgtatattgaaaaatgggatcacatggtacgtagaatcaaattcaagggacatatttacatcccccaagcatattgatatcctgaatttatcgtttctagaaattggatcgagaattaattattaattatataatccttattaattatttctaatttccatctctctcacacacatgcatactatgatatttttattaatttatgtggttacataatttgttcgcattctaactactaataattaattaagtcaagcttaattaatttgatcaaatatatatataatcctcattcattcgtgctctattacgtactttagatatcatcattagttcattacaactttatcaaattattattttatatacatatattgtcgcttccttgttttatggaaggatatataaaacaattttgtagtttacgttttaattacttcattttgtccaaaaattaaatccttaaaacgatcatatatataaatattttattattctaattgctatagcatctaatgcttttttgtaatttatttattcgattttcaagctaattatatatatatatatattaattgctgaatgtgtgaactatatgcactaactagctatatataaaatatatcaaacttttaatttattcttcctttttactattatatgtacgtacgtgtgtgttaaaaaagtataatatgttaactaattaaatataattttgattttattcaatggcatgtagaagtattagtactagtcccctcatataatttagtggtttcacatctccacttataaaaaaaatcccctaaatattttttttataatttttagtttatctttcattaaaattttatttaatgccccctcaaattatttttccttacactttggcccctcttacaaatattttctgcatttcctccctgattagtactaattatatatatatatagctaattgtatacatgctctaatataccatcaaacttccagatatggatgtaagtttaaaacaaatcacataattaagataattgtatacatgatatattatatatatatataaaccatcatataagttttgatggtttatatatatatataaattaattagtgatgatcatgtctaaacataatccaacattaagtcaaatcactcaaaatgaatacttgtcgctgttgggtagatgttgtctctcttgatcttatatgttaccgacaaaaagctaaaatgattaattaaaaaaacactaaaatattagacacacaactattaattatctcccaattaattatatttttatatctaatattcacactttgcagcttgcttccgctttaatcaatttaattaggcaagagagaaagagagagagattaattataattaatatatactacttctcaatatatagattgtgccctttttttcttatatatattaattaattattatattgatcatcacatgtactaattattaaagaaattatataccatagagagctaaaaggctatacctagatatataggacgcgttgtaatattacacatatatatacaaataaagtgttgctattgggtaccactcggtaccaatcgtgctacacaacttctaagcgtgttgtcttgcaattagttagcgatactttctaaatgttattataattaataaattatatgaaatctaaatacttaattaaatcaataacaatattaacttgttattatagagactgttagacacgacttcagcatttctcatataaataatattatcttcatatatatgagggatttgctagatagtgcaagtacccttttttcttattagtacaaaatatgaaataacctcgtaataatggatgatagggtacattaatatccccaaaacatttaaatacatataattaattaataaaacctaagccaaacaataaataacaaagagatcatctaaatataaacattaaaaaacacattatatatataaattataagatgataaggtagtagtgcatggcgtggtatgttgatgatgatgatctcttgtttgattattaattaatataataatttctattgggaaactaggcttctaataattgaggcctctgcactatcagcatcaatggtagccaagagctgggagagacggtcacttaggtcgtccacttctctgtttaagttccttatgtaattacaggtctcttgtaggaccttcgatgctgatacctgtaatatacatatatacatattgtacaacaacaacaaataaattaaactcatttcataactatatatatatatcatcatcatctttaaaatatcatttatatgtcgctttctaattccttctaataactaactttaaacattatatttttgcatcattttcatatactacaaattattcccaaaatatttttgtctcatcaacatatcatcaa

SEQ ID NO: 234931 - DNA, 1218 bp, Cannabis indica
gcggttaaacctacctaattgttctgcatctggacctatcagcacaatatgtaattaagcttgtgctcctcttcgaactaggtggtaaacacttagacgcacaatataatttatgtaaatttgagtttaatctattagatcttattgtagagataaaatgatggtattatttttttaaatttatttattgtattgatattataaaaaattacactaataaaaaaatagtattattttttggtcttatttataaaatatatttaaatatatatatgatattataagattttttatttattaatacttttagggcgacaaaagtcaaaaattaatttctaacacgcctttgtaagggcaacttttaggggttttaagggtgacaatattgcccctaaaagtgaacgtcagaaatctatggattatttttaggggcaactctttgaataaagattatggtgatgatggtgatgtggcttttgataaggcaaaggataagagagtgtccttgctggcagaaaatttgaatggaaaattagctgggcagagtgtcattgacaatgctaggcagagtgtcattgacaatgctaggcattctaggtgggccaaaaaatttcacaaattaataactctttttgtgggcaagaaaagaatgatcaacatgatgagaatagggccttggctgattttttccaggcctaagaaacttttttacaagaactaaaaatttttggagagttggacttacatgaaatcaaagctattgggggtgatattggcgtccaacctacttcggaacaaaatgagagaaccaccccacaaaagaaaagaaaaatgcttggtggctctttctctcatttctcacgtcctaagaaaattcttcgtcaacacctgggagtggtctgtgattttccttgggataatagtgagctgaaagtaactgtgagagtggatggatcacatgagcgcgtggatgatgtagatggatccggtaataatgtgtcctctggtgagcgtaaccaatgttcattggagattatacttagaaaaagcctcaatgatttatattctcaaagggtcagtttgacccaggtggatgatgatggttcctgtctttttgctcagtctgatacccatgtggagtgttaggttataattagcctatgtttcgggtctttaaagttagcattatctcgtctattggtgtcttttggagcagtt

SEQ ID NO: 234932 - DNA, 1073 bp, Cannabis indica
tctcgagcagccaagaaaaaaaagaaaaagaaagggaaagaaagaaagaaagctagagagagaaagggttttggtattttgcattgaagatcaagtggttgattctcatccattttagctcaaatgttgggttttgaatccttgcaaggcgctctaccaatctgttggttccgatttggcgattgtcctctctaaggtgctcttctacaatacccacttggtgagacccaacctttttctatttgtgtatctatcttttgagatgatgatgatgatgatgatgattgtataggtgatccaagaatgtttaatcttgatgttgttgtgagcctctagttttagtagagaagaactttgtaatcccattattaaactttggtaatagtagatgatttgagcggactacgatcctgtggttttttttccgcattgggtttctacgtaaaaatcttggtgtctcacttttatgcttgatttgcgtattttatattgtttgtggtgctttggttgatatttgataattgtttattgtggtatttgataagtatcctatttttgacatacaaagagtgaatatattgtggttaattgcaataggttttcccaacagttctctaccctccaaaccttcaaggtctgttctcgagtcgagtagaagaatgcatcccacatcaacctcaaacaagaaatggtggtgggggtggagagaatttcagagagagagagagcgtgggaaggaaaggcgattaggatttttaggttgtttttgtttttttttctttcacttttttattttaggaaattagggtttaaaaaagaaaaagaagaaggaaaaaagagaaaagaaaaagaaattgtttttattttttatttaaactaggaaacaggccgcgcttcacgtgcggcggttaaataattatacatataaatatttattgaacaataaaattgaaatcaaataattaaacttatttttatgtataatttttttgaaatatatatgcttataaaaaataataaatctatgtagagaactctaaagaattttaaaaaaaaattatcatgcaatttct

SEQ ID NO: 234933 - DNA, 1349 bp, Cannabis indica
gaaagttaaatttcgatcttttttagttgaagatctagtgcttactgtggaaagatcaattgtcataactagaaggatgaaaggtgaatttgaggcaaaatgggaaggaccttatgttattactaaggtcatcctaagaggggcatatgaacttttagattcagaaggtcggggcatttatccgtgtgttaatgggaagttcatcaaaaagttctacacttaaacgaaaaggtatttacccatggtgtagacaccgcacttaaaaagacgagtgtataatgaaatacgtaaggcttgatcccgtttcgagtatgtaggcaatctagtttataactaggtccagccacataaaataagaaaaaaattgatctcctaaacaaattgtgtaaaaaaaatgcaaagaattatgaacgacttgatcccttaaaagcaatatgtctgcagtctaaacaaaattggatgcagccacaaaataaaaaaaaaagtatattatttattccttctaataaaggagtcaaaattttaaaaggtctaaataactaaatactattagtcctcaaggctaataaacaaaaaaagctaacaaaaactaaatttaaaataaaaatattttagaagcaaattcataagatcttcagtccatctgaagaagtaaactcaaagcgccgagccttctctggattttttcttcttgaatcttgagtgttgcttttgctctctcagcttcatggaatttttctacactagcttagtcctttgaccgacttatctcctcagagagatgtcgttgctccttcaaggaatcatagagactagaatgatctacctcaaatgatgctttttttgcttcgaatttagcttgtcgttgttgtatggctagttttgttgcaataatctctgcttcctctcccttaaaatcttcaaaatcctttgtcttgttagtgacagatatgttgaaacgatctatagctgtcaaattatcctcaacacgacgaagaatgtccatgataagagattcatcaagactaagggcattctcaacaacttgagcagaagcgagacacttttcttgagctttgagcaaatcattgacagagtcagtgaaccatgcaacctctgctaagccacatttataatgcctacaaatggtactcaacacgtcaagttgcatacccacattagcacgatgttttgaaatgtctgctgttgtcaaaggagaagataacaaatgaagaatgtctttcatgcattcaatcacaaaccttttggtatactcattcaagtcagaattagtgattgttgaagctgacattgtcaacattgggtctagtaaaggaataagtaaattt

SEQ ID NO: 234934 - DNA, 810 bp, Cannabis indica
tatccaccgccacgtagtgactagtgagtgtattatatgtttgatcggagagaagtgagttatatatattataagtatgatatatatataatgtgaataaaaataaaaatatattatattatatgctataaaaaatccgagatatatttacattttaataaatatcataatatttatcagtccatattataaggtatataataagatattagagaacttattattaaggatgaaaattaatagattatcactccaataattgatattctctctcatatttgaggtttattgatagatatgatttatgaaagtgacagtctttcaaatctttaatttttgtacttgaatatatatgtaggacttaaaataataattttactaattgaagtaaatatatttaatatttgatatgtacatatgtaaaatttaattaattattacattttgtagactggtaaatattttaatcattgattttgtttaataattatgaagtacttttggtaagaaaataaaagcttaaaagagaatatatatttttttgaacaaatcatgaattggtaattcattattaataataatggcatgctattcaattgggacatttcttcagatacgaccaaaattagaatttgagaaacgagctaaataatcattcgcctaattctcaaatcatttcaccgaaaaaattatagaataaaatcagatgaaaaagattgcagctttacaattaaacttaagaatacttatattctatttcatccaccgcttagaagacaaaatagtaaaaactgttgcagtaagttcatt

SEQ ID NO: 234935 - DNA, 1599 bp, Cannabis indica
tagtcacaacaaaacttgtaaacgaaaagaaaaaaaaatgtgactaattataaatcattatttttatgttgtgactaaaaggtccgtgactaagtattagtcacaaaaattttaatttattgtgactaaatgtgcttttagttacaatactggttgtgactataagtatattagtgacaacttgtatctaaaaattatgttttagtcacaaataattttttattgtgattaaaagtcacatttagttataaagaattatattgtgaataaaaattcatcactaaaagtaactattttctctaatgaatattgtattatagacatcccaagtctacaacggttaaaaattgtcaactttttaggtaatattaggggtttatacatttcatactaaaatttgtaactttttcattttttttactgtggagtggttttttttaaaaaaaatattgtataagttttatattgtgtactatgttaagttttcacggtaattttaattgttcgattttgttattttacggttgttttataaaaggataatatttttgtaaaaaaaattgtgtgatagtaaaattgtaaacttttacctaaaatctaatatttttgtaaaaattcctaaatattatgcatggttaataaaaacatatctacccatgtatgtttcctatatcatcattatcatgggcgttttctgatgattttgagggtattttcaagttttaagtactattaacaccaccatgatttttgggttcaaaaatagtatcatcacaacactttttgatagattcattttggtatgatttgaatgagatgattttgtatttgaaaagtaactttgtaatcgtgacattaagagttaccaaaagttattgaagttaggagtcatttgaattagtttttgtgaatttattgttggtagaaattataataaataaatgtttaattttgttttaagttgaatgtagaaaaaaaaaaaatataagaataaaatatatattttattaagttttaaaatataattgtattatatatatatatatatattagatttttaagttattattttctttacattaaaatgttatttgtataataaattttttaattttttttataaatatgtgtggattagattggatcggttactttacatgtcaatcaacattcaatccgcataagtgggaattttaaattttccaatccaataatctacccaagtacaaatatttgtactttatgaattggattgcagattgaattagatcgactattttatgtacacctctagttactatgtaaatttttgtaaaaatacaaaaaaaataaattattgaagtgtaaaaataaaataaaaaaatccaatttttaaattattttttttacattaaaatattaattgtatatataatttttttaaaatttatgttaatatttataaattaaattgaatctgttacttttatattccaatcaacattgagttttctaatcaaattcaatccgcataagtacaaatatctacactttacagattaaatgaaatgaaatctgagtgaattaactattttatgaacataatatcctaactcactc

SEQ ID NO: 234936 - DNA, 1238 bp, Cannabis indica
acgaacaccccgtgaaaaaaaaattgaaaaaaaatttgccgacatatgctttcgggcgtagaagttgactaagaggttgtaacaggaggttgacatcttggctatggttctgccgaaaccccacatccccgaaatctccgacaatatgcgaaatacataaatcccaaaataaaaataatccaacaatctctgaaattatccatccactacttccataaattggacaaacatctttggttccatgctctttataaaataagtagcaatcatgctctcacacatgaattgactcatagcccaaccctaatttttttagtcacttttttgtcctgtagtacgttgatggaattttatttcccttcgggaaagcaagattcaacaatttcaataattcatcaaatacgctgatagaaattttttcttgaattttcaaatgcagtaactttgctagaaaattaagtgaagaaattcaatggcatccaggatacaattcaacttcaatctcttcaaataactcgtcgtaatactaaaagagtcagggttgttttgaacttctcgagttgttggtcgaatgaaatcttcaaccatgggaatcatctcgtcatcttcttcatctaaaattggctcaacaatttctgtttgtgcaacaactcctgtttccagcttcccgtggtaaatctacttttgataaccactatcaaaactccaattaaatatatgcgctttcacaatatgtaaaggctcaaatcgagtatttaagcatctaacacacagacacctactttttccgtcagaatctttataagctaaagccatcgtcaaaaaggcttgtagacactcccattattcattaccacgttttctccaagatatccaagacttatcaatcgtcatcttaaagtgttttaaaattttatgaattgtagcaacgtgaataaaataattaaaatcttatgctattttatgaaattgtatttataaattaaattactaatttattatttaatgatgaatttcttggtttatttgggtccactgctcaaggtaaatccatagctgcggtatattacaaataaagtgtagaccaaccttgttctaaattttatttggttctagactttatttgcaagtataccaaagttacagtatatttgatgccaaagctatggtatattatttttaacatattttttattaattatatttgtaaaatattatgaatattttataaaatatga

SEQ ID NO: 234937 - DNA, 1705 bp, Cannabis indica
atgaattatgaatgcataataaatatttgtgagaatattggtttaatttatttttttcaattattttaaattaattttttttttcattttaccttaatggataccctgggttccccataaccgatgggtattcccctaccccgaatccgttggttattagacggggatggggcgcgaatggggggtataaataggtagcagagattgcattccccgtacattaatcgcccaatttccatctttaatctgatttacactaagtgtagattttatattttggatctaatctaatatgcacaatagctcaaatccaattcaattcaattcgtaaaagtgtggattggattagttattttgaattggttacttgtcaatattaaattatttaatatttattaaaaaatattttttttcacataactaacaacaaaataaaataaattattgttgttttatgtcattaacaacaaattaaaataaataaaataaaaaatatcaaatttaaaaaagaaaagatgattgtatgtacaaaaaaaatatttaattttgtttaaattgtatgtaaatacatatatatatatactagttgatgttatgtgcaatgcatgtataattagatttatttttaattaggtttaattagatgatgttaagtgcaatacatgtatgttaaatttttttaattaggtaatgaatttttttttggggaattacccaatatattgttttttaactttttttttttttttatttttttttactaaatttacggtttgtagtttctaaagtagttgcagcgctatagcaagttaggggtttctatatgtattttttgttgactaatttaagttgcagtgctagttgtaatatgtgtttctatgtaaaattacgtaaaatgacaaaaaaaatgttttaaagtgtaaaaatatatattatttttttaaatttcaagtgagatatcgtggtgaatcgttgtgtgcccgattgagcgaaattgtctcttattttaattcaaagttaaactaacaaagttatgtggttaaaaatatttacaagtattttaaatttaaatttaaattttcttgtatagaatatctacataatttttatttttaaatatatataataatattataaaattaataataaatattctgttaagtaatagtatattctgttaaaattaacatagaaataaaaaattaaaaaatacccttaaacaaatattttttatacatagtcatattttatataaaatagatataaatggaataaatatatgatctattgagttataactatatttgtattatatttgttagatttttaattacctatttttttttatataaaatattagttatatatatataatttttttaaaatttatatatacgtggattaaattgtatcgattattttacatgttaattaacatttaatccgcacaattacgaagttcaaattttctagtccaatccgcacaagtttaaatattcacactttacagattagatttgattggatcgtgtaaattggaatggattgaattaattattttataaacacccataattaaaattaagagcatgtttgctttgatgtaatcaagattggaatcgaatggagattacaattacaatgtttgattgatcctattaacttttgtaatccctttacattataatgagtattacactacttg

SEQ ID NO: 234938 - DNA, 1480 bp, Cannabis indica
ttcaagtatgaacgagtgcctacattttgttttatctgtggagttattggccacttaattagagaagttcttccatagattatttgatgaatcactggaaaccattgtaaagtcgtatatgttgtttatgaaagctcctgatcgtagacaaaacagaaaaattggtgcaaggtggctatgggatagccaatggaaggaccttccgatggttcatcgctggcaataatacaccagaaaagtgttcgggcagacccaagaatcatggaggttgatataggggatagcacaaatcatgggggcgttaattttggagatagaagagaatatgggatggataaaattcagggagagaattgtaggattgctgttactgaacctatattaggaaaaaaatttgaatttcaaaaagaaaggttaattataaatgattccaaaagaaggcgtgtagagaaaatgggtaaggagtgtcagctggacgatttagaatcgggccaaagaggggagtaggaggtaatgggccaatttaatataatggaagaaggtgatcaagctaataatccattacattaggctgggaatgagaaggatgttgttatggacccaaatgaaaagcatgtggagactcaattgggtcagttgggagagttagacaaagataatggtaaaagtggtaatttaaaaaaaaaacgtgttattggtcgattctcgtattggggccgcaaggagttatgaacctgttaagttggaattatcgcgggcttgggaacccccgggttgttcaattccttaaagaaatagtttttcaaaagagacccaatttaatttttttttttttttttgttgaaacaatttgtaagaaagacaaagttgagtgtgttaaagctttattgggctttgagggtagttttattgtagaagcccgtggtcatactgggggacttgctatgttgtggaagaatcaagatgatggtaaacttctcagttttagtaataatcgcattgatttggagttgaagttagaaggctacccattgtttcgtgcgtctggcttctatggtgaacctcaaaggagtttgtgtggaaattcatggagacttattcgacagttggctggggaatcgaatcttccttggtgcttaatgggagacttgaacaatgtccttcacctcagtgataaaagaggaggacggtcttatccaggttggttgattcagggatttcaagacatggtttcagagtgcaatcttattgatatggagttggtgagttacctattcacttgggagaagggaaagggtacgacgacatgggtagaagttagattagacagagctcttatcaatcatggttggaacaggctttttcatgatgcaaaattagagaacttagaaatttttgcttctgatcattgtcccatttgtttgaatcttaatttgtttaaaagggtggttagtataaggatatttttgttcaaaaatgc

SEQ ID NO: 234939 - DNA, 734 bp, Cannabis indica
tacaaaaaaatagaataggtgcagcaaatgtggacaacaaggtcacaaccgaaagacatgccactaccaagcaattaaatagatacgacacatttatttgaattgtttaaatttctatgtgaactcttacagcttgaaaagttagtttgatagattgatattactttcttcaatggaaatagtttattcaaggttgtagaacagcagttgctaataaattgagatctattttaaaaatatattgacaattagattgcaactacattagtttttgaagaattggataatagttttgttaaagttgtatgcctaagtaaatatgctaaaaatatttattataagttcataacacatttgctattaagatgaaaaagaatggacatactagaatgttcaattttaaatttcataacagttgctaagcagttgccataatatcaaaagtattaagaactaaaatacaaaaaagaccgacaattgtctgaaaagaaaagtttacaataacttatatagaacttaaagtagagcataaaactagggaaaaaaatagcatccattaaaaagtataatcatttgacatataaaaatcaaacaacgaggataaaatagttctccagagatgaccctacttcttccctttagaagccttcaaagacttgctctacttctcatcctcactatcaatatgtttctcattttttctttgacaatagggcagcaaaacaagtgcggta

SEQ ID NO: 234940 - DNA, 780 bp, Cannabis indica
aatatgttgggctattagaataaagtgtataaagctcttgataaatcgatattttatctgataaatataaccgatttatgtattaatattcctaaatagattctttaaaatattgattactgtgattgtaattgtttcagctattttaaagactaattgcatttgaagtcttttggagggatgttagcacatttttgtggaaaatagtggaagtcagcgagctcgatttgaaaagaaaaaattcaactgcacattttgatgactttaaaggcaaaattgggcttggagctcaatataaaagttgtacatctcgttctcagattttcgaaacatcttgaattgtctaattctaagttttattgaagaagttacgaccaaaatactaatctgaatatgcaatagaattttttggcaggaagctgtcgctgtggcgagggaacacgtggccgcggcaagaatgtgatttcaaccactttttaaattttttatcttgttttaaactaagatatttttaggggtatttataggatttttagggttcgtttctagcaacttttgaactacattttgaaggagagaactcaagagaagaggagaatctacatatatatctagtttttttttttcttgtaactcttttaatttttttttacaattatgtttgagtttatggagtagtcttcttttaaattaagaattattttaaaactcgagacatgaatatttaatttctatgatgaatgttaatttctagtttctattatatcaaattgcttctat

SEQ ID NO: 234941 - DNA, 1916 bp, Cannabis indica
ttttttattttttttaaataaatcttttgttgtaatactaatttattgctgaatagtgaattttgtagtagtgttactttattttttattattgctgagttatgtttttggcactctattttcataattctcacttcttcttcttctcttatgagttctttgtagagtttcttatttgctttttctctcttgctgttgggtatcaaagactttgattggaacctattttcttcttttctcttgatgttgggtgcccaagcctttattggaagattagcttggagagacttaagagaatcctcgagttccttgattttctactggtcagcttgatgctactttcttgcttcctcttttgggcgagagacctcagcttcaaaatcgctccacttcttcgccacgacatccctatgttccctaactttacgaagcttagtctcgagcattttaacctgctaagacgaccggtgatgtgcggcatggacgagaaaccaagcatgcgaggaaagggaaaactaaagttagtaaagagggaaaaatacggaagagtaggaacgagaaggttagaaaattgacctgatgcagtttctcataacttcttttggctaggtcctcagtactacgtggaatagtgagatcccagtcgctggatccaagtgtcaagaggttgcaccaactattggtggtatgttgcgagctcaaatatgacccttcagtcccaacctcaaggagtagaggataggaaggctcgaggagaatcacgtccagacgagaaccagagaacttcacttggagcatcgacccagtaggttattccttgacattccctgcagtagagacctcaatccctgcagcagagacctcattccttgcctcaagagacttagcagcctcgggacgtagtaagctggctcaaggatttttatcttattggccttggtcttagttcttttgggttctttgatggaattcgaggcctcatcagcttgggctaccctcttcttggatctcttgtcggcttggggaggacttttgaacatattctccaagtctacgtccatatctgtgaggcaagaagaattcattaacacttagctaaaatgaataagaatgtcgaagaactcccacttaggagggttaccatattcttcagtggatggcgatgaaggattataatattcactaaactccctagatcttgtgatcttaaatatgtcataagagtttagtggatctaagtcctagcttgattctatgagccctgctctatccaacatggttccatactgttttgcaatcccatagaatgagctatgacagctaatttgaacgtgaaactgtgggtaccaactatcaaacctatggggaatgcgatctatgagaagaaggttccaaatgaaaaaattataccgactatctcgaaaagagactaatgtattacgtttggcccttagcattgtgggtgaccagccacattaatcacctcgggatcttccatctacccgaggagggactctctcgagatagtatgcacgagccacaaagtcatcactttcctcttcctctgggacggggaccttttgccatgaggtatacttgggtattttataatcaaaagtatattcgtcagaggcaaggaggccaacattcttcaggttctgctcgtttagcaagaaatctaaagctcgcaacccaaaaggcaggctcagcaaggtcttgtgatgctcagctatctctggggtagggattggtcttcgaggaactgttgcaaaaagataaaagtttagtaagaaactttgaaaactacaagttaatataattgatttcacgaggaaagaaacttatgtatgattcgaaaggcagtagcgtttattagagataaacatgtcgtcgagaataagtcttctttaaaatct

SEQ ID NO: 234942 - DNA, 2868 bp, Cannabis indica
cgaggaagcccgaactccaatactgaagctatcgcagggattgaagctcaaagatcaatggctggaggtacatcgatcctttcattgcatatattatagatatgattacagtttattttccgcatttcatatcattatatatgctatattacatacactatatatatagtctaacaagcaaggcatacttggctgaccatttcacccacattatcctaaaatctctaaaaaaataaagcatgatatttatctggtctcgaagctttagtggcggcaatgaccataacagcctagtaaatatccttctgagtgaatgttgtcataggacgctcattatcagccaccgaaacatgtgagtacattcgtattttaaaaaagtatattgtagaatttctaacaaaaaaaattcttaatttcataataaaataaaataaaatatattaatattaattaaatatatataaaaaaaatattgtgactacaatacacgtacacggtatatctgccgtgcactataaaaaagaactgatgcatcatttactgtcaccttagaacattaattacagtacttattctgttttgtcaactcattgcacttgctctaacacatatgttgtagctcattattaatttaataattattattgaaaattgctaattatttgcaagttgcaagcagtctatcttaagatagtatttgataccactagcatcgattaacaacgctcttgtctgtaaaacctcgaaataccatattataaatgctccaagaatatcttaattcataaccaaatcctttggatgccatggtatgcactattgaaataaagtttacttatttggaaacagaagatgaactttagattgaggaagagctttcacaaattttgtttcatttaaccacgaacaatgttttacttacctaatatctgttttgaatttcgatgcatctaaaaagtgaatggtttaaagtggttcaactcaaactaacctatataggctacaacaaacttttttgcttagcagttagaatttctagaaaaaaaaaaataaaatttgtattaacgtggcagcagttgatgatcatcactattgtaaaattagaattatgaaaatggctcttgtgattgtgattaggaacttggacaattttcttctacaggaaatgactttcggctttagagttaggtaggttatggttatggagcaagtgaactatacataattattaacacatttatgttgctatcattatgaacattgttttttttttttatttttttattttttattttggagtgaaaatgagccttcattgagaagaggaaataacataatactctatcattatgtacattgtacacctcatctcaagtttacgagaaggcattgttgtatgtaacaataacaataataatttttttttttctcaagaaaagaaaaataaataaagcagactaattaatgttgtccaagccgcaacgcatgttatggtggtatgggaaaaaatgttttttttttaatgatattccaaaacaactaatggtcacatgatatatttggacaacactaatggaggcactctattttggtgcttcctgaacctcataaattaatttaaaaacaattagtttgacattggtgagtaggcattttttcttatttcctttctataaaatattattttatgaaccaactcacttactaataagtaataaattattatttggaatggtaatccatgcgagttaagtacttttctcctcctattgttctttggctgtaatggaattatggaagcttgtcttcttttttatgagtgtattattaatgtagaaatactgtattaatgtattaggtagcctatttactacaatcatatagataacagaattggcatgtgacttgttcatttatacatgtttaatagctagttagagagtttgaaaactaataaataaaagaagatttaattagtagtgcaactttatttaataatcttctttctctccttggtatgtgattgtcacagcgcgtaaaacacattcatttaaatcttatcttaaatactataagctattttattcgatttttttttaaaagtatggtagaatttctaatataactaatgtaaatgtttatataaagaattaaattaaaaaaaattctacataaaaaaaaaatgtttggggaagtgcctcaaaataggaataatacaattttagtcccctgtgatttatctaaatactattttgaactttctattcccataaaattctaaaaagaactttctaattattaaatagtaaaaaaatgtactcgaattatgattttgatcaaatatatttttttaaagaccgaaataccctcattttattcatttattcaatttctaatttaactatttttaattcctttttaaataattgaaatattaatataattatttatcaagattttaagatattaattaaaatagaacttaagaaataataaatgcagtaagtaaaatagatagagagttttacgttgttcaagcattaatgaaccctagtccacgagtcagtgtattagcctttaaaggcttgtatgatattttacagtggtgtttacaagaaaactctaaccatgctctcttggtttctcttgaagaagaagaaagattagaaaatttttagcagaacttcaactatcttttttctgatcccccttctgtgaaaatgaagggatatttataggctaaaggataggtatgggtgtacccatgacccatttagggtttctgcaaaagaggttgctattgggataaaatgttggaattattttaccaggatctagattcactaacaagtatgtttcattaacatc

SEQ ID NO: 234943 - DNA, 2004 bp, Cannabis indica
ttgctacactgataatctttctctctttgcaattttttcttttgtaaaagatctgatatggctgaagtagttggtggagcgcttctctctgctttccttaatcctttggtgaacaagttaactacagagatgaaggacttcttcaaaggaaaagatgtgattctcaagctgttgaaggagctcaaaacattgttgtccacagctgatttgctgctcattgatgctgaggagaagctcatcaaagaagaggctgtgaagaagtggcttgatgatctcaaggacatcatttatgatgcagacgatttggtttacatgatcgagactgaatcatggcgaaatcaacaggaaggcgaatctcatgatggtcgcggctgcagttgtactagtagtaaggtactcatgaaactcatcttatcaacaagtactcctttaacttcttttgataaagacataaaatctgagatagaagagactctaaggaaattgaaacttcttttagagaataaagatgttagtttagagcgtttgaaaaagtataagcttccagttagagcatgtgctcctttgttagagaatctagtgttattggaagggatgctgataaagaagagattatgaagttgattctttcggatgataagattggggatggtggtaacaagctatctgtgatccccattgtggggatgggcgggattggtaagactactcttgctcaacttgcatacagggatgatagggtcgacgagaagtttgataccaaagtatggattactgttggagatgataaacttgattgcatgaaagtgatgagattaattgttgagaaactcacttctaagaaatgtgaaattgaggaaccgtacgatcttcaagatgaagtacagaaggctctgagtatgaagaaatttctatttgttgttgatgatgtttgggatgaggatccaaccaagtgggatgttctaaacaattctttcaaatcaggattgcatggaagtaagatcattgtgactacacgtagcacgattgttgcatcaattgtgagaacacagtcaatttatcagttaaaggggatatctaaggttgttggatggcaattatttgctaaacatgcctcaattgatgtagactcaaaggaaaatgatattgttgatcttcaagaaattggaagaagaattgttgataagtgcaatggtcttcctctcgcaataaagtcaattgccaatctcttaagagggaaacataataaggaggaatgggagagcattcttagtgatgatatatggggattgtatgaaagaaaaaatgatggtgttcttccagctttgtggttgagttacttttatctaccttctaatttaaagccttgtttcgcttattgtgctcggtttcctaaagattatgaattcaaaaaaaaggagataatcttgttatggatggctgaaggtcttttacattctcgaaacaaaaagagtgttgaagaagttggagacgggtacttccaagatctaatttcaaggtcattttttcagcaatcaagtgcgaatgaatcgatttttttcatgcacgatcttatacatgatctagcaatgtttgtgtccggtgaggtttctcctaaagttcgccatcttttggactcatcacaacatggtgaagaagctaatgagcataagaactttgaggagttatttaaagccaactgcttcttgcgcaccttattattacaccgatatgtatcagaaattgctgagcaagattggttgtccaaattagagcatttgcatgaatcattcccacgcttaagagtactatctataaagatgaattttatcaccaagcttcctgattcaataggaaatttgaagtacttaagatacttgaagttagattgttatggtattaaagagatacctaatacaatttgtaatctgtacaatttggagacattatgttgaaagggtgtcgtcatattactcgattaccaactgatataggaaatttaac

SEQ ID NO: 234944 - DNA, 1349 bp, Cannabis indica
tctttatttcacaaaatgaataacttaattcattttgctgaaaaataactaagtggccagctgccacttcctaaaacaaccacctaagcccccttgacaaaatgactaaaatacccttggtgccttaaataaagccaattcaagcctaggggtaaaatggtaaataactctaacttcgctcaaactcggtattctatttctctccaacatatatccctctaagaaacaggttctagacttacccatgtgattaaaatagacatccattgcattttctgttatcgccgagcaaaaattataaaaacaacataattcacatataattcaattaatactcctagagtttaataaaatctctgaaattaaaaaattataactctaatgcccactttttataatgggacccacaattaaataaattcacaaataattataaaaataccaataattagtgctaattccctttactaatccatattataaatgtggtcattacaattattcccccgttaaaagagtttcgtcctcaaaatctaacctgaaaaactctggatagtgagtcctcatgtcagactctaactcccaggtggcttcctccaccttgctgttcctccagagcactttgaccaagtttcgaagaactttttcctttttcatcaaggatctgaactgactatagttcaggggcatcgtaactcaagacatgagtcaggtctgaaacatatttcctcaacattgaaatataaaatacattatgaacaaccgataatgctggggataaggctagtcgatacgctaccttcctgactttctcgagtatctgaaatggcccaatgaacctagcgcttaacttacccctattctcgaagagtcttatacctttcactggagaaacccccaggaaaacacgtttcccctgcctggaatgtaatgtctctgtgctttgatcatcataacttttttgcctgctttgggaagcaagcatgtgagccttgatcttgtctataacttcattggtcgcaatgaataggggaacgacatttcctaccatacaacatctcatagggagtcatccctattgtactttggtaactgttattgtaggagaattcaattaaaggcaagtacttactccatgaaccttcaaagtccatgacacaggctcgcagtaaatcctctattatttgaatagttctctctgattgccgatcagtctgagggtgaatagttgtactaaacttcaactttgtacccatagccttctgaagattcacccaaaattttgatgtaaactttcaatttctatctaaaacaatagatttaggagctccacggagacgaactatctc

SEQ ID NO: 234945 - DNA, 824 bp, Cannabis indica
agaaattacatatggaaggattaactatcgaccagctttctagtgcgggaatcgctctcatcacacctagggagcaacccctgcatggagcaatcaaatttggattcaaaagcctccaataacgaagcaggatatgaagcaattatggctgggctgaagcttactcgcgaggtacacgctgagtatattaaagtctgcagtgattcatagctagtgataaatcaagtctcatgagagtacctagcttgtggagaaaagatgatggcttatctaagcaagatccaagacctgcttgcacaattcaagggttacaccctcaggcaaattccaagggaagaaaacacaactaccgatgccttggcatgacttgcgagcaacatagtgatagataaggacaacttagttccaatccaattcttggaagaacccaacatcaattgcacagaagaagtcaaaatgatagatacagtgccaaactggatgacacccatagcaacttacctcaatacaagaaaactcctaagtgatagaaacgaggctcggaagatgatgagaaaagctacgcgatacatcatagtacaaggtgtgatataaagaagaggcttctccatgccattgcttagatgtgtaacaaaagaagaggctacacagctcatgtctgaagtacatggagaattatgtggtaattatgtgacaagccagagtttatcaaagaaaatactaaggcaaggatatttctagccaaccatgatggaagattcaaaggcccacgtaaagaagtgtgacaaatgccaaagattttcaaagatcccccgtgcaccccc

SEQ ID NO: 234946 - DNA, 558 bp, Cannabis indica
acaaaagagagacttcacaggtttggaattattgatgaccccatgtgtgtactaagtaaaaatcatgctgaaacttgtgagcatctcttcttttcttgctctttttcaagccagggacttcaaagaatcaaagaatggttagggtggaatgcatcctctttggatttcacaaggctcatccggtggatagaaagaagcaaaggcagcaagttcaggaaacaagtgctctcggctgctttgtcaagcctagtgtaacaatctctcaaaaaaaaaaaaaagcctagtgtaccatgtttggaaggctaggaatgatcaaatatggaactcaaaagtaggtaatgtagacagagttgtatgtacagttgaagatatggtaaaacaaagaatatatagctttttgcctaagaaaattgggcagcaagagttggattggtttagatcattgtaagtttgtagagttatactcatattgtgtattacatacgaagttttgaggtccttcaactgggatgctcttaggttgtaaaattggttgattggagtaatgaaaacactgct

SEQ ID NO: 234947 - DNA, 1139 bp, Cannabis indica
tgactcctttcatgtagtttgtttgttttgaaactcagtgcagctttcgccttggtgttgtaaaactcaaatatagtaaggaattcttatatacttcaaaggaaaaaaaaatcgttctcagattaataaacaagttggtctagggattttgtggtgcatcatacttgctttgtgagcacctgtggtgttaccaagggttcaatgtatattgtatcttaataaaatttgtgatgtgtgaactattactgttgaattttgcaatcttttgctaaagtcaggacaaggttatgcttagagtacataaaatgttcaatatggaagctgtgtgctgttttcatattaaaaaaattgatggaatagtattttagattccaaatagaaactgtactagttagtagatttgtttaaagaacgaagaaaaaaattaaaatatgtttgaacaaaattggggcattccgagaatcgaactcgggacctctcgcacccaaagcgagaatcataccactagaccaaatgcccgctgatgtttatcttgcatccaataggctaacatagattgatagattgatttctttagttcattaatatctttttgttgctatgcataattgacttctttcatgtagtttgttagttttgaaactcagtgcagctttcgccttgttgtaaaactcaagtatagtaaggaattcttatatactccaaaggaaaaagaaattgttctcagattaataaacaagttggtctaggaattttgtggtgcatcatacttgctttttgagcctctgtggtgttaccaaggattcaatgtttattgtatcttacacgggttaggtttcttttgtatggcttttcaattctggtctggatgaaagcgtggtctcttttcattttcagatcctaataaaaatttgggatatgtgaactattactgttgaaatatgcaatcttttgctaagtcaggacaaggttatgcttagagtacctaaaatatcaaatatggaagctgtatgcagtcttcatattaaaaaattggtgtagtgttttagatccaaaatggaaaactgtactagtaagtagatttgttttcaatgactgatcaaataaaattaaaacatgtttgaacaaaattggggcat

SEQ ID NO: 234948 - DNA, 1564 bp, Cannabis indica
gtgcaaagtcttatgtgttgtttctgtaatactgagattgagtcatctctgcatatattctgtcaatgtccgttcactaggggtctgcggtttcgaaagggagttagacttgactctttccattgggataatatcctggagtttggttcctggtggtgcaacctctacgactttgaatttcaactgtttatggcatgtacttgtgagatgctctggaaatggcgaaatgatatcgttttcaacgggagacaatgcaatttggagatggttttcaaagacagcctccgaagaacgattgaatttctgcaaaacaagttgtggcatgatcagttggatcctctggcaactgatattactctgcactaccccctgtcaacaatgtgttctggcgagttcaagtggatgcatctgtggttggtaatgatgttggttttgctgttgttcacccgcaaatgcagactatggattcgttagtctcggttggctatgcagaggttgatggtgttcttgaaggagaattgttaggcatcgcttgtgctctacagatggcaatttcaaggaagatccctaaggtttggattgagactgattccaaatatgctgctctagcttttgagtctagagagcttccttatggttggagtacctaccctctttttaacttttacctttatctgtgtaagtccttggtggatgttaaagttacttatattcctaggcaggagaatgagtgtgcttatgccttagctcgttgggcaaggatctctaaagttaagaactctggttttctaagggaagtggcccccttttgcggctactagtttgctttgtttaaataaaagacttaatataaaaaaaaaaaaagtagaaacctaaataattaataataatgagatattgctataaaacattagacattcaaatagttagctaaagttattgtaagaattatatatattgtttactgaaaattgaatcaagaaaaaattaagttaaagaaagtggattttaaaagtaaatgagacaaaaattttatgtaatttaggtgttaacgagttttaatttacgaatcaatattattaatcttaaaactgtggagtatttactatttttagcatgagtttccgactctaaaaatttcaaccatttgcatgaaggatttatgccatattaataggtcaggcacttggtttttgggctgagacagatctatttatagttgttttcatattccaagctcattgatagggcaaatacaataaaacattgatttttggatctaataggtgaggcccaggcaatgtataactatcattcgtatggctacagtggcattcgtacgaggccaaaggcctcgtgaaaaagaatgtcagaggaaattggtgttgacaaaaatgtgctttctttatgtgtcgtgattagcctcttcgtggtctgacgcaggggacaagtcccttgttttctcaggattttgtcagacatgtgccacgtgggttggcttccacgacccatgttattgtcagacgtctcttcgtatcccgtaaatggtggtcgtctacaggta

SEQ ID NO: 234949 - DNA, 1104 bp, Cannabis indica
aagtccaaggaaaaaaggaaagaatttttttttcattgaaagaatgaaatcataaaaatatgtattgtagaatgtacattttattatgttatttcatggggattgtagttcagttggtcaaagcatcgcctgttaaggcagaaactgcgggttcgagccccgtcaatcctgatagatccaaatccaataaaaaatagagcaataattccttccatttttttttgtgaaagggactctaaaaggagtactaattgtctagcattcaaaatgtgctctaagtgccactagtgcaatgtaaggggtcgagcgctgcctaagagggcacaagttcccccaataaaattataaaatcttaaaaaaggttaagcgctacctaaggggccacaagctcccttatatctgataagtaaccgataagaggtcgagactgctcaaagagtctatactccctccataataagattacactataaaagaggttgagaaagcccaaagttgaaaaaagatccctcaaacaaaataaaaattgagaagaggtcgagactgctctaaagagtcaatactccctcattggaaaggttacataagtgaaaagattaagaaatcctaagtggcaaaaggcccccacaaaaaaataatgacaactcataaacgaggttgagaaagctcaatgagtaatgatccctcattaagtacccaaaaaaatcaagtcgtaaatagccataacaccaaccaagagaataagtgatggagacgaagcttaccaaacttagtctacaagaatccttgaatgaattctcatagattaggggcaagaattgacccccaaaatttactaagtataaattttggagaccacgtgattaaatggaggaaagatctcacaatgcaattaaataaaaatgtatgggcaagaaaatggaaggtcaactagcaaggtgagacaccacaagagaggaagagctagcacgaggaagagcgaaggcacaggttaagctccccgtgtgaggagctcttcgtgcccaagatccctgctccctctctctcccccttgctccccgctcgtccaagggagctccccactcccatcactcccccaccatg

SEQ ID NO: 234950 - DNA, 913 bp, Cannabis indica
ccaattggatcaacagcaaaacagattcaaagtgaaaaatgtgtgtgactgtgttaaagcaaacttttcatatgccagttatttgggatttgatgggatatcccatctttttgggccagcctaacaattccattaaacttcaaaccgaaatgggccttagaattggtctctaaataataagattatttacaccctcaaatttctaacttttgtttttttttttatgcggggcggaatttttttcaaaaatactgtgtatattttatactgtgtattgtgttaagtttttactgttattctacggttgttttttagtcttttaaatgttgtttttagttattctgttttgtgtttcattgttgttttataaaaatacagtatttttttaaaaaaattcgtatgacagtatttttgtaaaaattaactaaaaatttcaatatttttataaatttttcaatgaaaatcggtcatttttttaaaaaaatcatacacaattaactatgtaataattcacaatcgatagtacttccaaataaaaatcggtcattttagtcgtagctaatatatcacgtgtacatgtaatcgaaaatatatcactttatcaaatatatgttttgaaccacttgaggctagctcaagtggccataggtgggtgtgtgcgtcttggaggtcttgggttcgagtccccaggtaaaacatggttgtaatatacaaacgtttaaataaaaaaaaaaatatatatatatgttttggttatgtatttagacgaagtttgcaaactaataaagtgtacatgtaatggtaaataataggagagaccttatatttgataacgtttccttacaagagtatagccaaaaaaaaaaaaacaaaagaattctgtgtaagaactttaagcaaaaaaaaaaataaa

SEQ ID NO: 234951 - DNA, 1570 bp, Cannabis indica
cataaattgatcttggagaaagtagccttaccttgaagctgatcgaacaagtcatcaattctgggcaatggatacttatttttaatcgtcagcttgttcaattctcggtaatccatacacattcaaagggatccatatttatttttcacaaacaaaacccaagctcctagggcaacacactgggtcgggtaaaccctagatccagcatcccttgaagttgtatttttagttccttgagttctgctagggccattcgatacggtgcctttggaacgagctcatcctaggtgccaagtcaatgatgaaatctatttctcattgtggcagtaatcctaataactatttgggaaatacatccaagaactcttttaaaactctgacatactcaagcccaaatatttaaagtctgttggagtcaatcacaactactaaaaatcctacacatccaatgtgcagtaaatctttagctttcaaaactgaaatgattggaatctgagaaccctaaacagtctcgacataaatgaatggttcctcaccctctggctaaaaaattaccatctttcgttcgcaatcaatgctagttgaatacttggatagaaagtccatcccaagtataatatcaaactctgttgattccaactccacaacacttaactccctattctcaattataattggcatagacctaatctaccttttggagataaccaattctctgctaggtagtagagttccaaaccctatctcaataacatcattaggcctacccaattcattaactactgttaatgctacaaatgaatgtgtagctccagagtcaaatagtacaatataataggattcattgataggaagttaacctattaccatagaaggacttgctgcaacatcttcttgcgtaatggaaaacatccgagctgggatgggttttcccttttatttcggttcttctttctttatttgaagagagtctttcttgaagtgtccaaccaagctacattggaaacatgtcttcagattacatttcctgggatgatgtttcttacaatggggacactcaaaataagaataaggttgatgaccacctcttccttggttcccacagaaccttttgctctatcttgaaccacctaatgtcaggaaagtattcctctttcaatcaatgttggtatcaccaccatctctaccatagtcagaagtaggaagggtggtggtctcgtaaacacttagagtccctcaaggctcttgaagaaattccactgcaccctcggctggaagagccttctcaaccatctcaacataggttgttgtatcatttgtagtaatcaccagatcatgcctaatctcggcattcaaacttgccaagtatttttccttcttgttgaagtgtgtaggcactattctcgaagccaacttggctaatctatcaaagtttgttgtatatttcattactgacatattctcaccctggaccaaatcagtaaattcttttctcttagtactgtggactgcttcattataatatttagcattaaaacagatctcgaaacttttcccaagtcattgtagt

SEQ ID NO: 234952 - DNA, 674 bp, Cannabis indica
ttagcattcctataaaagagacccatgacttttcttattgctagacaaggcacaatgaccgtgtctttcactttcattcagaaaagctaaattataatactgctacaaacttaaaaatcaaccaatgaaaggagaaagttaataataactataacaactatcttattaagaaaaaataataaccttagcaaaataataataataataataataattggaattttttgatagacataatctcacgtttcagaaaaaaaatagatatatattcatactaaatataattttttatattgttaccaaaaaaaaatagaaaagaatttgtggctgtgaataatttgcaaaatatatattatacttaatagtttccgataaataaaattttaataattagatgaagatatatttagtgtgattttatttattttgttttattttggatgaaagtgtgattttattattaataataataataataatcaaattttgcacagcataaatttctaagttttaatattaaacagcatcgttctaatataaagataagatgtgtcatttttatgattttatgattggtactaatcacaaatattttttaatattattttttattatacgagctaggaaaatcacgaagtaacaatcacacatattgcttttcaaaaaaaaaaaaa

SEQ ID NO: 234953 - DNA, 702 bp, Cannabis indica
tttcctttgaattttatggttcttgagattaggttttcatgcaattttgagttaggttactgtaggaattaatttagtttgtatctatttcctgagattgatttgaagttatttgagctgtttaagcttgtgtttgttgtttgtgttgagtttggacaaagtttgagctttagagctcaaactttcctcttcaatggtgaattctgtttctaaggtttatacctgtgtttattacttggaatatgttcattgtggcttaattagctattctgaaagggttgattcgatttgggttagaattaagttgttagtggggtttttagggtttcgtgcagggaactggttagccggtttaggggatcctgtagaatcgactagccgttttccaaggtagaatcttaagaaccagttttccaaattaggaatccggtttatcggttatagcagttttggaaccctagtttttcatgttttagcgatacgtaggatattgccatgcaatccatcgataaggaaacttttagttttaatttaagtccccaaaaagtgatttagcgtgtcacttatcaactttatgaatgttatgacttagaggcctgtaaattatcaagcagcagttccactcaggttgatcgacacacctgaatttcggatcgaggtaagatcaatataataatgcaatatcccgaaaacctaattatg

SEQ ID NO: 234954 - DNA, 1693 bp, Cannabis indica
ttaatggtgagtctattatagtcaaatgtttaactttagactcaacatggtttggatcctataaggaactctgtctttttattttatgttttgaagattgaagaactggtgaaagttctgaatgaatttaaaaatccctcttatagacccaccaaaggctagtatcagtatgcacttgaaattaggtttttctcccaaaaaaaagtgcaaagaagtatactcattaaaggagtggaggtgtgcaaccatcaaaatacgtttcctcagttctcaattttttaatagcattaaatgctaggatttgaaaagactaaagaagtacactcacctcattcagggcaaacgacactgcctaaatgacacatgaaccctagcacatgttacatgtcttagcaatgcgcagaacgtatatgttcccatgtgactaggagttcccacgcagacttggggaaaaatattattccaaattttgcataagatgacatggcacttcacaaggtaacacgtgacaagtatgttaagagctgattggagtatatcccccaaataggctaactaaatccctcttaaattcggattcatctaagtgagctatcctacaactattatttagacggagcgagtatctcatggtatgccgttcaaatgatcatgtcgtgcagaatgaactgtccgcacaactaaatacgatgggaagtagatgttttccagattctttcctaaattttgtccacaaaaatagcaaataggatccctattcattcgagattaactcgccatatggagatttgtgggattgccaacttggagcaaatcttcaaccaattccacaaaataaagaatttaatttgctgctcctattttttaggacttaaatgtattacctttcttctatcaatagtaaggacattcattgagaaagggaccacttttcttacactttgaagagcaattactttgaaaaaatacttgtaagctttcccgagaatattaaaaaactcacttggttagaccttgtgatcttaataattctctaagtaatacaatttaaaagaagtatgctattaccattattacgagttgaacctccataaatctatggtgttcttattgcttcactttactattattttattattaattgatcattcaattcaatcactttaaagactcagcgtcgttggttaaaaacgaggtcaacagtttgttacacgtgtaactcttttattttatatacaggtaaaataaattatttgaatactgctttctatattatcaagtattctgaatttcttagaaatttagaaaatattttaaataattataatatacatgactaaaaaaattaaacaaaaaaaatcctcctaaataccgaaacaaataaaggggtatcgagggtacattataaaaacaccttatatgtttatctataaaacctttgtagatgtgcatttactatcttgtctttggaactaggccaatgtgacattactattttattgtgaggatcaaactaatgtaataataaagtcatagctctaatgctctatatataatcgttgcttaccaaagcatgtcagggtttgggctacctttcaccttggttcggtcttgggcataagcgggttaggtctgtgccttaggcttacctagctcacaagcctaaaaaaatctttcccttttaaaattacat

SEQ ID NO: 234955 - DNA, 883 bp, Cannabis indica
taacttgaatactcgccattctaggttgagtactcgcataaactccccattataccgttattatattttattttggtgctgtaaaaattccttcaataacatttggcgtcgtctgtgggaacgaaatacttcgttgattttgaaggaaaatcactatggctggaaatcagacaactagagataacaacaatggatcaatcaacatcgggacgatgaatgtcccacttccaagaaacaggacacctcccatcgacacatcaacggaggagtgggacgaacaaatataacacctctcaatttgttaccagaaactactgctcatgtcggagaaacatccacaccggcagccagggtggggcagtttccacctatcacacatgtcgtggttttgaaggcatcttcagcttaggggtgttcacggattggtttggtccagattttcatatttttcgaaccaaaccaacatagcggttttttgaatgttggaaaccaaaccgaaccaataaatcgctcaaaccagaccaaaccaaaccattaaagccggattggtttggttcaaaaccatggttttgagtttataattattctttaaaaaataaataaaaataatactatactatataaaaatattttctaaacataatataataccaataattcaattttaggactccaaattctaaatttaatacttgaaagtgtgaatagtctgtgtaatagaaaactaaaaataaatattgatagattagacttagaggctttgagtttgatagattagagagaatggacgatcactaccaatatatatataaaatattattgtttttccttctcactccaatttaatttattaatatatatgcatatatatagtagttactta

SEQ ID NO: 234956 - DNA, 1479 bp, Cannabis indica
tatgttgagtcgtgccctctcatggatttgcttcacaaattctgctttctttttgccatctaaattcaaatgctcaagaacaggtaaaggtgatagatctaaaagagtcaaaggattaaaaccataaacaatttcaaatggtgaaaatttagtagcagaattcatagaacgattataagcaaattcaacatgtggtaaacaatcctcccaagctttttcaaggctgtatgttcaaaagtttttacttgttacaggagatcttggtaatgcttcagtttcctctcaaagttggcaactgctacaatcttcttattgatgacctctgtctggatgttataatctcgagaagcagaggtcaactattgttccagatccttaatcttctccttggcttcaaataccttgtcctctagagtggaaatgcaagaattaacttgattataagattccttatatctttcagcatgctccctctcctccttggcataagttttttacctggacatagaatcatttagagaagcctcaaccctctgtttgatcacggccttagactgagatttcacatcatgtatagctttgatagcttcttccctttgttgtacatcttggtcacattatgccagcttgttaaccaaggaagagcatctcttcgctgtcaaacttgcttgaaaaataaggtaaatgagattaggtatatttaaaaaatggaaaaagagatgtaattcaataaagagtcaatgaacttactgtagccacttcattcttgagactatcagccacgaagactagatccatactctccattatggcaaacttatcagaacataatatgctacatgtaacaacatttaggtccaataagtttgctacaaacagagctaggtctgagtctactctaggttggagcctctcagcaatctcttggcgatgaagatcccagggaatggttcattaaactttccaacatcaggaaatttagtgccttgcctagtcaagatctaggcctccttgttcctcatctcttcatattaagagttaattctcttgtggaaaagtttttcagcaaactccagttaggcacgaacctcctcaggcaacgaagaagggcggattggaaaagaaatgtcataagggggaagtggaggcaaacttatcttatccctaggtaattgagtggaagaacttggaactggaagaacaggtagagcaaacaaaggttaagtgctgatgatggctttgctagaacgtgtgttctgcctagttgaactttcacttccatgagcatcaacatcccttcatccataggacttttaactttacttctaggaagcaagaagttgttgaagtttatccttagcttcagccctcaatctcttgctatctccacccaactcaaagccagccctcttcctcaaagaaaagacgtatccttctccatcatattcttcatcatcttccctgtaatatctcaaaaaa

SEQ ID NO: 234957 - DNA, 606 bp, Cannabis indica
tgggtatttttgaagattgcagttgacgattctcagaattctctggtttgcgtgatctgatgcacgtaagtgactggtctaaggcgttatctactggtatagatcatatgactgaggttgttgaggatctctccattgatgttagtggcgatgacgtgtggtacttccaagttaattgtggatgggtcttcggctggttttgcagcagtacaaaaagggtgcaatgctatggaagatgcaattatggctgtggatttcgacactgttgataatgtgcttgaaggggaattaaagaccattggtctagctatgaaaaatactcagttttatggattctactttggcagttaaaggtttcatggttggaactttgcccttggagtagggctcttatcctacttttatggactgccttagtcttagtaagttttttaaggtgtttaaggttatgttcaatcctcactcttccaatcgtgtggttgatttcttcgctcggtgggctaggttgaaaaagttgtgtcccatggttttttaatagaagtgtccccctttgtggccactactttgttatagctgtgttttcttgtgtttaataaagtttgttac

SEQ ID NO: 234958 - DNA, 910 bp, Cannabis indica
ttaacttgtatatgtatgatattatacatggaagaaaaattataccttgtggaactttcaacccatttggcctagatatagcatctcgcaacactctagagtctgcagctgttccttacgatccaggtaagacatgaataaattccatatcttgtgaaactacacttaatacattagtagcaatttcaccctttctagtctaatacctaggcttatctacggaggcacattaactttttaaagtgtgttccacctagtgctcccaaataattattgaatcatttccaccttgcatcagttgaaccattaagaattggttcaagttttttcaataatttcccatgaagacacaacaaagtatttaaaaatacattaaaatgtctactcactgtttcacccctatcatatgcgagtggctccaggagaactgatcctggtttgccctaaaaatacttattagttgttattttagtttttcatctaagtttttcccaatgaatacatactttgtgggattttttggatctaaaataacttcttctaattcctcaattggtttcaattgattccgttcatcttgaatccgaggatcaagatccttatcctgcttcttacccccttcagtcgtgattaccattagcatatgaccagtttttctattttgtagctctatgcggtagcattctcaagccggaagatggtcacctcgcaccactcctacacctgtcggtgtctgaaacttcaaggataggtgcctaattgaactaattgcccctagtccaattaatgcttgtcgacccagtagtatgttgtaggctgatggcaggtcaacaattagaaagtcttacattatggtagttgataaaggcacttcgtgttggaatatcttttaccaggatctatatttact

SEQ ID NO: 234959 - DNA, 1473 bp, Cannabis indica
actaggctgggtcttggggtctgcctgccactaggacctagaaccctggctggccaaggccaaggctctaagcgggcaaagtttttctccctcttttgacttcagctagggtctcgtgatggcctggaggcatatataactgtggccttatgcgtggttttgcttggaaactctatataaggctagataacaagtccattatggttaattgtacaacacagaacttgttgattgtcttagtaattgtgtctaagatggtatttggtcgttggtcgatcttgtaccctttattttacctggaagacacacttgggtatcgttgacttgaatatatttgtagctttgtcaggttgctcacctcctcttatttcttccatgcagacagtgtcgggtgttggtttagggaggtgacaactatgtaggttttctgtttgcctcatatttatggcaaggacaaaacagactctgtgtaaggcaccccgtatgatcttcatgtggccatggtagccacaaggggtcaaattagagtggaggaaaagactgcccagcctcttgtcgaggctgagctagagatggattcgcagacagggagttttgatgcagaatctgagctggatgaggttgctcctatgaggaggaggaggtataggacatggttccatcctccttgaccgtactttgggccattatgatgcccaacgcaatccgctgaatgggctcagcgtgccttcagtactatagctagattatgtcctggagttgtctcctgtgctagagatattggatgcaaaaccacctaattcatgtttatagaaagtatttctcggctatgtttgtgttgtatagggagctaggttggccttcacctaccccttacgagattaggtactattttgagttgaagtctgggccgaagtagagcagaaccaactatttttatttaagccagcttggtcaccaatggctaggtggcaccaaatgtgcaaccatgtcaatggttggcaggtacgccaaaaaatattttattgcacaagtttgtagaattttgcaccacaaattttagtttgtgctgctctttagacgtcccatccctactttggaaatgacagatagagcgaatcacatcctttctttgttagttgaacagaaatacatcatccggttgaccagtgtggacaacttttggatgtatggcttgtacctcctactcctggggctacgaagtgccagctactgatgtggcctgctttggagatgggaaaggccctgacttgcatgatgaagaagtacttttgttttgtatcgtacagaatctggagaggagagagagagctttccgtaggcccctgccgcgggggtccagtaggtgacgcttgcctttatatcaggcctagaagcccattttttaatagacctacacgccccgtgcctatagctaggggtaagggcaaggctgtagttgtgaactctgat

SEQ ID NO: 234960 - DNA, 930 bp, Cannabis indica
aattattggcagaaatcatggttcctcattatcaaggatggtacacatacttggatgttgcacggagatgattgatcatccgttcataaaacgatggttcccccatttcatataactgtacaccaatctcagtcctgcgtgaattatcctcttgttataaatcattaaaccccacattagttggcaagtgttgctaatttcagaaaatagattataacacacacacacacacattacactactcctaatattaaccaaacatctttatctcgagcttgggagtaaaacctacaccgccccagaaagattgaggggtagagcgggtcagttttagtacagttctagcttctagagaaccttgtgcttctcaggtaccagctcagaatattgtttcacttagtaaaaaattggtttcatcactaccaaaagtgtctcgctattggaaaggtggttcaaaagatacccaattgcattgaagccttttcaatcactctgcctacatcctttcgaaatcgcaacatcattgtttaaaataaaattgttacattgaacttgttgtgaacgaagacagagaaagataaatgtagctaatatgtgtatcattttatcaaaaacttgcagggcatcaaccattaattcgaggttccacaaacctacactaccttgaagctcaagtctaacaaagatccaataaaaataacatataaccaaaactaacccagaaattcttcagagaaacaaacaacaaaaaacaatatcataaaagaaaagagagcaaaaagtaacaaaactcgcctttggaacaagggtagtggagttggctgagctttaggacttccaagcgggtatacgtccgaaacgagatgggcttctgagattaaagtcaggaataaaatttgttaatggcgggtgggtttcatttattcaaag

SEQ ID NO: 234961 - DNA, 1535 bp, Cannabis indica
gatggagggagttaagaagcaatatggaatgactaaaaccaaagttcttccattagcatccacaactttaccagtacgtagtccatcaaggtctcctcgagacccccgattcagcacagtgaaggccaggtccgagaacatgtggactaggaagagcaagtctccgaaaatccgtcattctaaaaggctggcatcaagtaacaagtagtgaaacactgttgtagcatattcagtacaactgttataaaagttttgttttaggtcataaattatatttagttatgttatatatttgcatcttactactgtattgttagcgttaggtgatatgaaattgcactaatggttgtgattttagcatttactatatagggtaagacttgtggtagtttttggaatttggtggaaccaattattattactaagtggtgattattattactgttgttatcttttaccattactattagtttttagaaatttttttaccataacaagatacattattaagaaaatgaaattaaccaattttaccttttttgttggcaatatgtgttttacgccaattatgtccatagctaaaattattaaaatacctatactttgtactttcccattgtagtgagatgaaggcatcacttctgacgttgcttataaatttggatcataaagtgtaagtacagtataataatgagaaataagaattaattattgaaccaattaggttgacacaatttctttcataataatctgactatttctaaatcatgtaatttaagtgtatgagaagaaacacttaatgtacttttaaaattgaatatattgaacatcaaggcttataacaattataggcaccataccgtaagcaatagtacaaatctattaaacattaaactcatgtctaagtaaatcatgtaatttaaaattatgggaaaaatgttgaagtgtgttttaaaatgcagtatagtgaagcacaacactattcacgaacttactatgaaggtttgtggattatattctcaaaattaatgatacttatctttaaaaatcctcactacaagaattatggtcaataccaacgccactattaccaacgcctaaaagtcctcattaaaaatgaaggtattaataacgacatttgaatgtcgttgggaaagctattcagttttttttttaaaaaaaaaaaaataattaaaaacgactttttcttttcaataacgacaatgtcgttattgaaaaactattcaataacgacattgtcgttgggaatgtgggagaggtttttgaaaaggagccgttaatttgggcggcaattttccccccaaaattgtccccaacgacatgccccaacgacatagtcgttgggacatgtcgttggggacaattctgtaaaaaaaaaatgcagctagaaaccctcatttcatctcgcctcatctcgcctctctccccaaatttcagtcagcctctccatttcctcacctcctcctctgatcaggcccttcaaaactcagcccagcaccgcctgaagttacgtc

SEQ ID NO: 234962 - DNA, 1964 bp, Cannabis indica
tctcatgtaattaagaaaaaaggacatcgggatcatttgtgaaaattatagggtgatttgattagagaaacttatggtataggcgagcctaaatgactattccatccacttatgcctgagcctatcgctacaagcctagaaatgtcttttgattcttgattatgcatctatttatattagtagagaataatgagtattgcaagcatatgaaatatatttggttagtggattaaaggtggtatttggcatgcataaattgtttcacttgtaagttaagtgctaattattgttttatgaactgaatgaaaaaaaaattgaggtgagtcaagggtgtgattgagttgaaattcttgattaaaacacataggtagaatttttgtacaaaaccatgttatttggcttacttgaaagattgtgactcatgtttcagttgattgacttgtagtgttagttgttagttctttactcaaagacgagtaaatgtttagtttagggaaattttccaagtttttattagtacagtttttagagtgtttaacccttgttttgtgcaattttactcttttggtaattacaattttccaggtttggtttagaagaaaaagggagaagtttggaaaaaatatgacaacgaaggtaaaataataaactctcaatgcttgagcactaagaaattcatccaaggaaaaatccaaaagttctagtgcatttggagctcctaaggcaaacaaatttgaaataatggagtagtgcctcaacaccaaaattccatgtcaaagcattaaaaggcaaaaaattggcagagaagattgtttttgaccaagacatgggcgcgcctcaacactggggtttattattgagatagagagtgcgtagggaaatcacagcctaaaatccaccattgaggggcatgaccatccctttgcgtgtcgaggcccgtgtgctaaaaaatttgggaaatattgtggccaagacacaggccgcgacactacaagcccggtgtcgtggcccgtccatgtagaattccaaaaattgattttttttttatatcttttttagctttgtttcgctatttaaaagaggggattttcacactttttggcaggcaattagagagtacctaaattagaggaacaaagtgacctagaagacttttcaacagagcttttcaacgattcttcttttctattttcttcttatgttcttaattgatttgtatcgaattgttgtaatgaacaagagtagctaagcaattattatggtattaatggagattgtttgacatcttttaatggttttaatatgatttgattcttccccaaattcattattaattattttaattgcctggtcatcaattaaatatttatgatttcgatacgagatctgacaagtaagtgtcgattatgctatagtgaaatagggatacattttgatataggacgagagtacctatgtagtttggataacaaataggatttttgtgtttaatgccttttacatatttcaatttttcatgagtataaaatttacttgtaattaagatttatatatcttaggcgactataaattacttgagtaaacatgctattgcataaaattgataaatagaaattaaattatattatgccatattagatagatacaattgaaattaataaccttaattctaatcattgtcaatttttattgtaatttacttattttatgcttttattacttttagttgtaatttctctttaaaattttaattttttagtacttaacgacaattcttgggttcgacctcaatcgtatgagtaattacttacaatcgatatgtacacttgtttgttaaaaatcaacaacaacaaggcattaaatatataaagaatttttctgtagtttcatcgaaaggctctttcaggattataatggaacttgttgctcactttgatcttcagttacatcagatggatgttaaa

SEQ ID NO: 234963 - DNA, 723 bp, Cannabis indica
tttagctataggttaaggcctttatataaaaggcataaaccctaggtttacaacttaaatcccttgaaaataggataattagctagatatttacataagatcaaaatgcccctagattccagatacttctgagcctgtctgttgggcttttgggccccaatttgcagcccacttatgatgcccacatgtaggtgtgtcctgagggacccactgagcaatccttggctggccatggccttgtgctaggcgcccatgaagttgcttcctggcctggccagccatgaggccggccaaaggtggctggccaactcccgagagcgagctagattgtcacccgatccctgtttgagtgtcggggtcttcgttggttcggatgttgacttgaccttccttttagtgagttgtactgccacgtggcataggttctgtccatgtaagcatgccacatcatgaggacaaaaattgggataacatttgcccccaagtccctgtgcagacgtgtgtacggatatagactttacgagcaagatagacattgttgggactgcagttacttttgagtaaagtgcatgttgaagcattttgtcttgattatttggtcttgttgtaatagagaaataacttatttatgtgcctttatgaggagttggtgaagtaagtgagaaagaggagggcccacatgtaaataagtaagttttgaggggaaaccctttttttcacttt

SEQ ID NO: 234964 - DNA, 738 bp, Cannabis indica
gatctgtatttcttgcttcttcattgttatattcctcttgtatatgaaagttatctctactgatgctaacagaaataccatcaggtgtcacagatccatgatcgagtgaatcaaagttcatcagtggtgagtttgaggaatttacctgacctggtgaagatgctgctgtaggagtggaatatgtggaggcttgagatggtgcagaaccatttttgttttgagaattagagctgaactgtctgaagtgaatatttggaagctgagaccatgactcattgtgtataacaagttgtttctctggagcaagagtgtttagaaaaccagattggaaagggaacatgctttcattaaatacaacattttgagagatatagactcgccctgttgtgctcaagcatttgttgcctctgtaagcgtcattataacccaaattgacacacctaagtgaatggaattgaaacttatggttctgatagggtcttatgcaagggtaacaagcagctccaaatgttttcaactgcttgtaatctggttttctacataatagagtttcaaaaggtgttttattgtgcaaaactggagttggaagccgattgattaggtacacagaattttgaaaagcatcaacccaatacttaagtggcatactagcttgagcaaggagggttaatcccatctcaactatatgcctatgcttcctttcagctctctcattttgggcagaggtgtgaggacatg

SEQ ID NO: 234965 - DNA, 1476 bp, Cannabis indica
cactactgcatcttaccacgaataaacatcagatacaaatatttaggtaatacaaaattattataccaatataaaaattcatactcattttaattatattaaaattatatatatttacctcatagagtaaccatacttcacaacatcacgttgcctaatcaggcaagttgatgctttaatctgataatcttctattgtattgcctaatcaatcaagcctgcgccatagcctggcacctatgtatcacataactgcatcacctaatcaggtgagcttgtaccaaaaacctgcacccatatatcatataattgcatcccctaatcaggtgagaccgtgccacaatctggcaccaatatattgcatcgtctaatcaaactagcccgtacctatgctcgggacttatcatatgtcactgacgcccgtacttacgcccagtacgttgcaaaaaaaaattgcatcacctaattaggtgagctcgtacctacacccagtattcatcatatatcactaacgtccgtgcttacacttagtacgttgccaggaaaatcgcatcacctaatcaggtgcgtccatacctacgctcgatactcatcatatattactgacgcccgtacttatgcctagtacgtcaccggggaaaattgcatcacctaatcaagttagcccatgtatcacatgcatattatcatcacattatcgatactcaactaatcaatcttttcattatatatcaatattaaccaattcataacaattctaattgtattacatacaacatactatgcagtacaatatacttttcttacctttaatccagattcatacattttggccaacccaattggagaactatccctgatgatctcgaccctatgtaacaacaatggtaaactaataagtgtttatcccaaaaaactgcttaatattcacgtaagataatctaggattttctaccaaatcctgtagtataaatacactaaaataaaaattatatgttggttctaaacatacatcatattgttgggatggatgccactttcctcagttgggttgggtggcatagctcattgcagaagtccccttcccttttttttgatccatttctttacccccttctggaggtattgcagcggtctgaaaagtcgcgaagaatagaaaaaactcatcgcaagcttcaaaacggtatatataatgtccaaaacagacacccgagtcaaaagttatgacaaaaatacgatttctgatctcctagaaatttctaaaaactatgaaacacaaaaatctcaaatttcgcactcaccgaaacactaccaaaacttattcaaatcactccaaacttcacaggacgcatatataccataaatattaccatccctacgtaatagaaattaaaatcgagcccttaaatgaaaaatgccattaacgtttggactaagctttaaaaagttctaaactcaatttctaacccaaaatcac

SEQ ID NO: 234966 - DNA, 1174 bp, Cannabis indica
ttataataagaagttgtaattaagactcctcgtaaatctaacttatacaataattaatattaaatattatataatgaggttttgtaactccaaagcaaattaaattcttgttatgtcaaagataacttaagtacttgcaacgttcataactcaattaatggtaaatgggagaaatgcgaaaatgccacctaataaaagagaaatgtaatttttttttaaagataaagtgtcatatcattatattaatataattaagtattaaattctatataacataatataataatttatgtaaaatatcccttcgaagggattaaaggagaagaagtcaaagcttggatccgatcccccacctcctatgtctttggggatatttataggtcgattccctcgcaaggatcgtcgtacattgatagatcttcatgagggtgaacccccactattggattggtaggtgacatattttccatatgtgatctttactgatgtcagattgtactggctgtactgacggtgctttggacgtgtgtcactccacgaccttcctcattcgaattacccctaatcctagtcgttggatccttttgcatggtacacaaggacatgcatactttatgtggcatgagggacaacctctgacattgtacataggaaaagagcgagtcgtggccccttaggttggcacatgcagaccgaaccttcgtggagtcaaaggagtgccccagcccaattcatcttgatggaagaatcatgatttttgcgggagcaaaaagtctcgccttccagaggagagggttgctgactcacggagacctccttgtggtctccattcgtgcagacctcgctcacggaggtctatgaagactggtctacagggttggagccttaacctttcgggatcacagagtgaggccctcgggcagcttaatgactcctcgtttttccttaattgtttcccgcgggttaggcaggtgaaaatacagataacatttacccactaagctttcgggacatgccatggtccgggagcttgcaatatcttcctctgaaattttttcacgcacgtggcatttatgatgagccctttaatgcatggcgtcattattgggatttttgtcctaaataaacctattttaatataatcagatttactaattaataaaatatgataaat

SEQ ID NO: 234967 - DNA, 808 bp, Cannabis indica
gtaaaaaagccttaagattattaatgttttctttgttgataatctaatcattttttgcaaagctaatcgagcctctgattcatgtatcaaaaggatttttgacagcttctgcagtagcacggatctaaaggctaaccatagaaaatcccaggtctttttttggaggtgcaccaaaggtagacaaggtgactctggtttagattttatagtttgaagaaggtattttccctttgaaatatcttggggtccccatgagaccaacaaaataaaaagtgaaggattgtgaagttattattaaaaagatcaaagtaagactctattcttgggcaagcagacatctttcttatgcaggaagatcccaactcataacatctattcttttagggcttcagaattattggatgaatatcttcttgcttctgtagagcattgtcaaagagattgataaaatttgcttatagtttctgtggagaaataatgttgtagaagcaatctccaccttacctccttgtcaaatgtgttcttaccaaatatctatgggggattggagttcggtgatggaatcaattagaacaaggcaatgcctggtaaatatatttgggctataaatcaccagcaagaaactttatgagtgaaatggatcaattcggtctatttaaaaggccaaaatttctagagctaccaacttaaatccgtaacaagttggtactggtgcaagttgtgccaaatttgagatgagtgttatcattaggcaattgataatgcatgtcatggtggaagttcaaagtatgcatgttctataaaaaat

SEQ ID NO: 234968 - DNA, 2402 bp, Cannabis indica
accaaattttagaattgggggttagttgtaaaaacctgaccacttaaggaggttatgccgcaaattattctataaaatatgatatataatccaattcaatataatacaatataatacaatacgacctaatacgacattttaaattacatgagaatcgatatctaattatactaataatttaagtgtgttagacaccactactagtatctatatatctattctatataaagtgtctatataactgaaattcttggtttatgagaaattcatgggtgactttatatttttatttaatgaaataataaaatattatttatatataataaaatattatttatatattaaatattcgccaatgtgtttctaggtatatattaacatttttgaagattatggttgttctatcgataattataatttgactggttttggtattttaggcttgtttttaactacaataaggagggcattctaggtcgacatgatgcacctgtaactcagtcggactcggagcatctccgttcctcttcgtcacttggaatctgccgagatttagtcgatttcgatgaccgccaagataaaccgttacttgatcgtgttgtgagtgaacccgtagccacaaggaatttcaaccaccaaaggcaccgccatgtcagtgcaaagcctaccgccttggatcggccgcgaaggcaacagtcgttaagtatcattgttattacacaatgaaataaaaattgatatttttgtgatgaaggttgcaaatttgagctattatgaaaattactatcattaaaatgaaaagtatcatctcatttgtaagatagaacccattaaaatagaaaactatttttacttatcaaatagaaaccactaaataatgatttaaacaaaaattacattgatattactacgtatattgtgtttaaataaattgtgtatgtagatatttctttcaagaagttggtgaagttggtgtgtcgtaaatgtgtaaaaatatattattagaaaaaaaaaatcaatttaccgtaaaattgaataaaacatttgttataaatgtattaatgaaaaaaattcctaatctatatatataaaggagatgtatgaggcggtgacatgtcattctaaaatcactttaaaactatatttttctcttctctccttaattctctcaattttttttttttgacataaaattgcaacttcattaatttagcattctgaatacaaaataatctgaagatcacgggggatagaagagctcagaatactacgaccagttagcgatcttgcatgcctagcaacatagtgggccacacgatttgttgatcgtctaacaaaacgtaaataaacatcagaaagagaggataataaagttctagaatcattaacaactgaaccaaacacagaagtcattaactgagtagaatgaatagcctgaacggcgagcatgctgtcactgtcaatcgtaacacctttccagtggtctgccttgatccaactaagtgcttctttgatacccatggcttcaatcgcttcagatggaaagtagcctccatgatacttagcataaatgtgaagaggggagccaagatggtcacgagccaccatcctgaacccgtaggaattttcctgctcaaatgaagcggcatcaacattaatcttgatggtttccaacaccggtttgacccaaagctcatttctatcacctaaatcgttaaaaaatatagatgagagagaagtaatatcctgagcttttctccaatgatcaagagaagtatttgccgataccataacctcattcaaagaggaagtttgattcttccacacctttttattccgctctttccacaatgcccaacaaaccatagcaattttacacatatcttcggttgcagaagaagtaaatgtgagttcaaaccaagatgcaaatgtacctgggggagtcgggcgatgaacaccaaggtgctgccaacatgcagtagccaaagaacactcaaccaaggcatgagagaggtgttttcgggttgtgtagcacacatggggcaaaggatagaaacatttacatgtttggtgacaagatttaggcaagttgggaggcaattagtcaagccacgccacaacatattttaacttttggtggtattttcagctgccacaactctttccagaacccgaagttgttaggtacaggtctagaggacttgctttgttgcagcagagagtacgacactacttacactgaaactcccacttgattcaccattccagtaccacagtcatcatcaagagtatgactcaacgggaggccaaggatgagagcatcatctttgggattgaacatatcaatgactaaatcatgatcccaacatagcgaatcagtcgagaacaatgccgaaacattc

SEQ ID NO: 234969 - DNA, 795 bp, Cannabis indica
tatgtcttatttatgaattttcactaagctagggcttaattatgaagaaaagagattttagggtttatttattaattaagagactttattaagttttatcaatagataaattaaatggtaattttatttgataattaattataattattaactagatagttttgacatttaagtgattcaattagaaaataggacatttgtgaaagaaaatgataaataattgagtaaaatggtaaaattgtaatttagtgagccccacatcttatggccggccacttaagctctttttatccatttatttatcaattttttaatgtcatataattcaaacttaaacttagaaggattcctataaatagatagtgatagacttaaattgacagatgatagacagttgatacacttaagcctttcagtcaaaatttgagccttctccattctctctttattttgaatccttctctctctttctcttcaattttttgccccttatagtgattgagtacatgcccagaagaatccaacaacaaatgaaggagaatcgggctcagatcttgataatactctacgatagaaaatatacaaaggttagagatctcattggaatgagatttaattctaatgcaatcaatgtaaggttacttgaactttatatgtgtttaaattctattgttttacaaaattcatatttaggatgtgaaacattatagatggtagtaaatctagatcctactaaaataatccccaacaatacttacacttccagttctactgctaccacagaatgatattttt

SEQ ID NO: 234970 - DNA, 512 bp, Cannabis indica
aaaaaaaaaaaaagaaatagattgtgtttttttttgggaagtatcaaaagaaatagaattaatagtactaaaaaatacaaatttgaataacaaataaacctcacgtttcttgaaattaaagaaatagtaattgaatagataataagcagctgaaaaggagaaaatgcttaatataaagatactagtagactctagagtcatttactacaagaaaaaacaatcttgattaatgattttaagagggaaaatgaaaaataagatataagggttgaagcggaattaaattttaaaacccttatataaattattgtacttagagcatctttaatggtgcatttttttatgaaattggtatggaatcttcacattattttactctaataacatactaaattatacactaaattggtgtacaccaaattctacattattaatgatgttagtttttaagtatacaccaatttggtgttaaacttttttttttcattctagtccttattttaatttatttt

SEQ ID NO: 234971 - DNA, 1045 bp, Cannabis indica
aaaaatagggtaggagacctcattcgcaacatggaatgccataaaagtatcaaagcgagcctcaagaaatccccgaggagcacccaacgcccagattggcatatagcctagtgtactgggttctgattattcgattctaatttcgtctcaagcatctaactattttttcgtagtaaacgagagctacgacttatgacaagtcaaattcacactttgatatttaacattttcggcaaggtggaatataaacaataatttacaattaaataaaaaatttcctcttaatgaaatctcttcctctgtctctctcactcatcttctatttcttcaactaaagcctttatgaaaatagtgttgcttctcaaatcatccgtacccaaatcactgtccacatctgttatcaaaactaaaggaatcgctgaaggaatagaagaagaaactgaaggaatcgctggaaggagaggttcagtttggagaggccatgatttagatgaggaagaaggagctttctttgtgatgcaatgagaataaaataaagggaaggttgtctttattttatacttgttggagataaaattctttggtgggtttgacgtggttttttggcttcttgatcagagtctaatgattgagtagaagcagaccaatattaaagagatttgtaaattttaaaaaaaaaaaagagagagagagagaagtgattgaagatgatgatgagattgtgcctctgcttacagcaaacaagattaagaagaaggattataatggttctttttaactttcatttattggtgtattcatctcttttgtcttgtggcatcaaacacaaggaagcaaataccaataatattacattatttcgattatactctgtgctgagataaaaaacaggttttagttattcatttttcttttgtcatagtttattaatttcatgtctcctgtttgttgattatttttgttagtcttcagtgggaataagcacaccaaatgtttattcatgcaagtgattaaagtgagagaagttaaatataatgaaagcaaa

SEQ ID NO: 234972 - DNA, 1174 bp, Cannabis indica
gtaacagagtcggtgatagtctgataaagttcgacatgcgtttgactggtgctgtttttctttttggagcattgatatattgagctgttgcaccagtcgcaacttcattgtgagtattatcaatttggccctgagagaataaacaggattatagatgaacagaaaataatatttattgacaaaccaaacgcaaaaggcaacagacataacattaaaaggacaggaacattctcaacctatgtttgtggtgagatactgcaagtaaaagtatgttcgtggttcaaattttagagattcagagctgcagatgacttgtggaagagtgaatttagcaagaggtagagttcgcaacacatcaacacaagtttttcatcattatattccacaaattctgaaaaaatccaactagtaaaaaccataaaactattgtagagaattgagatggtgctaagaaactaggtaaagtgtgaagaagattcttctgcctggtgtttacatattcctatatttcaacattctatacaatttttagttaataaaatacccatcaatactattactaaaaaacgtttcattgatcctatttatgacttttgttattattgtttcttatcagaattaatcaatcttctaggccctaagtcatgaaggttcctcactgattgaacatagtaatattggtttattattttcccattctgtttcataataagataacacacaaatttatcaccatcaaaggggttaaaacattctcctgatttatttcaccttgagtaaggacacaacctatcactaagttttataaggctacctagataaagaggaacatctcatacctaatcttcttcctaccataaaggttagaacaaataaagagtagttaggttaggtaatccaaattcagtcaagcaattcacagtaccaaggttttcattcacatccacttagtatatcttaaaaaaacaacaacaactgtatttcccatcatgttaactctgtaattcttttttttatctgctgctgctgctactactagttaaatatatgtatatatatatatatgtaaagtttaaaggtgttacattacagcacaaactaatgtgctttcaccaaaatcaaaatcaaaatgattcactccactccaccaacaattaaccataaaagaaacaga

SEQ ID NO: 234973 - DNA, 868 bp, Cannabis indica
tttttgttgttttcatgtattttttggaaaatcgtaaaaatgtaaaaaaatattctttaaatgtaaaaatataaatattttacaaaaaatggtgtcttatgtaattattccataataaaactttgcactcttgcacaataagactaaatataaatggcatatccaccgatgcaaagcttgaataacaataaggcaatctgtctctataataatattcgagagattagaagcctttacccaactcaacgcctctttgatgttgatcagttcagcaatgggagcacttgaggagccagccaagaaattgatatcgatgaggtggctctctacttttgctctaaactattttttttcttaaagaagttttttttattatttaatttttattttataatgtgtattgaagattatggatgcaacaaacagcttcacgtcgcttcagaatttttacagatacagccactgattcatataatcgaaaacacagtattggagtggtggttatggatgcttgtaatagggttacagcaggttttacaaccccttgtgctggtttagtgccgcctgctgttgctgaagctaaggccatttatcaggccatccaatgggctcagttgattaatcttcctgtagatgtgcttctgaatctatagtggataaacttgcttcttgtaattggaataatagtgttttagatgatgtcctaattcatgttaaaaacttattatctttcagtccaaggctagctatttgtcatattcctagggattgtaatgtgattactcataagattgttaagctaggtcttggattagataatgagttagtttggaatggttctttaccttccttgtaacttgttgctttg

SEQ ID NO: 234974 - DNA, 1220 bp, Cannabis indica
acacaccaatcttgtattctcagatccaaatgtcagaggttgactggtatccaccgcagtgactaggaatctcagacaacctctgcacattagatctttagcttttaaaagtgttatccttggtatgcgccccctgaaccttacccataaacactacaggattagaactatcgggctcaaacaccaccatcttccacttgcagtcgatcgttgccccatactcagacagaaaatgcattcccaggattatatcaaaatcaaacagttgtaattcaattagattggcggttaattcacaactgttaatccaaaaggacaaggaccgaatccacctaatggatactataaggtctcccgaaggtaacagggtactaaaccccgaagcatacacatcacatggtttatgaaaactttcaattactctactcgacacgtaggaatgagaagctcgtgaatcaaacaacacagtctaagaaaaaccaccgatagataattgacctgtcaccactaacggactagcatccgtgttagcctgagtcatggtaaatagtcatcccgggttctgatttgcattcttctttggctcttctttcttggcctgaagacaatctctaataaagtggcccaccatgccacactagaaacaagtcttggcccaacattcaccctgtggtgtttcttgcatttcagacactcaaggtatgatcggaatgaagattcgcgtaaaggccacctctgtttccccgaaactttatgttaccccctgatgttttggaagcatcagccttccgtttgtgatcagggttaccaccattggtccctttactgatattaccacttgcatgaggattcgatgtcgtggcggcatcctttgcagtctgttcctttcttacatgttgcttaacctcctcagtaattaaggttagttcaaccactttcttatacaaagtgtcatgagcagcggtaatctttaagtctcgactgattgtggcattcaaccctctcatatatttttgtttcctggtgaaatctgtaggcaccaaatcaccagcaaatttggacagccgatcaaattccagagtgtattcgaccacagtcatttttccctgagtcagtttcacaaagtcctccatatgagacgttctcacgacaatgttataaaaattttcctcaaacagactcttgaactcatcccaagtcatcacactaacatctcgagt

SEQ ID NO: 234975 - DNA, 1190 bp, Cannabis indica
ggaagaggccccctccggatgaacaacaaaaagaatctcacgacccacattaacaaacattgggtgcaaaacatccaagaaatacagagaaattaaaagaaaaacaaaggggaatgtacgaagacaattcaatcttccaaaaaccctaaatctatcaaatgcttgcacgaagaaaataaaagacgaggggttatctcctttcgtcccaaaaaataaggaaagacaaagatatcatcattactcatttcaagaaaaggcttcccagggaaaatttccatggccattacccaagaagaacatgcgcacaatctcctttttaaaaaagaaattaactacaatccattacacttcgcttaatcataccaaatagctaagagaaagaagaacttgcacgatgaaggcaatgtagaggtggaagtcaccgtacgacagtagtagttttcctagcaacgacagaggaaaagtaggaggaaatcaagatagtccagaattttgtcgaaaagggttctagagcatagaaatggaaatgcagtatgtgaaaaacctagtcataagaggtataagcttttatacgcccttcaggataaatgccagaacaaatcaagtgccatcagatggtgagggttcaaactaattcgaattctagtgattcaatggtcaggataaaattgcaagatgaagagaaaagggcagttgaattgcttgagtacctctctgacaactccattaatgaaggggtctaacaaacaggcgggaatcgaatcgttgcctgccaaacaaggcggaatgattaaaaatattaaatggcctacgtacacgcaagatattttccatgtcactcttaaacactagaagcaagatacaagtctcatttataaaattttaaataagacttggggagtaaatgttgctctatttttctctgaacatacatgactactccatgtcgcgacatgtggtagataaaaattaaggatctggaggtgtttaaacaaatcttaattaggcaacatttccttcgacaatctaccggttcctcctggagctatgactaggtccggagggaccaaccttttgttcatctctgggagctaggtagcatccagctcgaccagaccctctaatggatgacaatccattagggatttgtcccattaaaacaacaagccaagttagacaaacaatgaaga

SEQ ID NO: 234976 - DNA, 2077 bp, Cannabis indica
ttttttaaaataaactttattaataatattaatattaatattaataagttctttattattaatagatatctttttattttttagccactaagaaatctctacttctagggcactaggtcaaattctacatacacctaatcatccaatacttaaactatcaactcataatattctcatcaaatctattaattaatcctgttatgatattttttgccctcgatcaagtctctaaagtcgccaacttgaaaatatttttattccacaaatagctcatattacattcacacatgctatataattcttcgtaattcataaattatgcttatttatccacttataacaaatttaaaatttatgttgaaatagattagtaagatcataatcccacttattacatgattagcccatgataaaaatataaatcctaattatttaccattaggcttattgggatattacatgtgctgtattgtagactctggccaaccactcccaggtaagggtgctggctttggccgactaggcttgcactaggcagctgtccatggccggccagacctgcattgggtacgttctagccacccgtgactcctccatggctggccaggcctttataaggtacgttttggccgcccgagactccttagttgattgatgttagaagtgtgttaatagaaggtagatcacactagttgctagattttggtgaatctagatgtctgaagtgattagtttcacttctcaaatcgtcgttttggatgtttccactcgctctcggtcctttttggttgaaaattagcctttgggtgtctcactcccctcggggaggaagtgctcccctctggccggctaagggaactcctacagatggctggccggccaaaggctgaatgatgggggttgttcctgagcttgagatccctagtcggcccccatgacgctagttgctgggatctggttgttttcactgttagacccttatggaaaggtctgtcttccctctggtaagggaagatctatcctagtccttgaggaaccaggttgtccagcttgtcgattgaccctcccaaatctatcaactagtcttcattggagtggatctctgatgagatcctggcctcatccatcggttctctgcttgaaccgccttatctagtcgctggcctctttgttgcggcgatccaagtctacttggtgagatcgaaggataaactcttggttatccatccacctcaagaatttgcgtctttactgagtgaatacatcgcaatcagtagcgcgtggttctttagttaggccagcttggccaacggcttctataagtctggctaacttgatatcttctcctaatgtcacatggggctcgccaattgcaggctcgccacctcctggtcctgtctctccagtgtagtactggagatgagatccgattgtcgttccttaggattgtcgcccacgagtccttccttcaatgggaggtgccagtgaagggtcctccgttggaggcaaggacctcctattcagatccactgggatgtttgtgtcagtttggccagctgtagtggccagatttgtgacacctgttgtggtaacaagattgaccacatctgcagtgttcataggaattccaactatggcaggaacatgaacatcatgatctatagtctgtggatcttgagggagactcgaagatgtagatagtgcaataccagttcttctcatgttaaccatggtgtttgattagatatgatatccactcgctatcaatgaaagcaccaaagtgttaacctcgaaaagtggtcaaccgacagcgggatcgtatgaatctgatgtttgccacgtgttacacaattagaattagaaagtaaaggacacacaaaatttttatagaggttcaacccccttagatagcaggtaatgacctactccccttttagttgtattgatactgaaggaaaatattattcagatcactataggtgggatctgatatagctcccttaaggatacaaaataggaatcaagatggcaaatctcaagcattaagaatgctatatggggcgagagagagagagag

SEQ ID NO: 234977 - DNA, 1760 bp, Cannabis indica
tatatccttttgatctacacttttagcattacacaagtaattctattttttactaaccacttgaattcttgcactaatatactcggttcagtatcctcattacaccagaattttttgtttcttgcattccatattttgtacacagcagcagctacacaagcagtatagcaatttttcttgaatttgctttgtctttctcgattaattcccctcaagatactcggcagaattgtgttcactgacctccatcccagccaggttttcagttcttgaaggcagtattgtgcaaatctgcactcaaaaaacaagtgcaacatactttctgctgcaatgttacacagcaggcagcatgagtcagctgcgatattaaatctttgcagcctatcccgagtcctcaacttgttttggacagcaatccataatataaaattatgctttggtacatttagtctacaccagacctgcttgctaaggtgaaagtctctttcttcctgcatcatgagttgatatacaccagatattcaaaaatctgatgccacaaattggctgggaggaaggatttgctttaccaggtcctttatgctcacaagtcttctccaataccagctgctatggatgggagcctcatacccccaccaatcttcatcttcaatatacacattatgcacccacttcacccaaagattgtccttcttagtagcaatcgcccacacatgttttgcaattgcagcttgattccatttggcaatgtcttgaaaaccaattccaccagcttttttggacttgcatagctgctcccaagctatattccctggaccattcatagtgcttctccctgaccagagaaaacttctacaaatactctcaatctctttaatcaccttcttgggaagaataagaacttggctccagtacatatgaatggataagagtactgagttgattaacacagttcgaccagcaaaagaaagatttttggagctccacactttgattcttgcagtcatcttctcaactaggatagagcattcagctgatgaaatttttttagcacatatgggtactccgagatacttgaaaggcagggtacttttctgaaatcccgaggcatctaccagtctttttgtttcactctcatgcatgccactacaataaattgcagtcttcttcttattaggctgtaaccccgaggtcatagaaaataatttgaggccccttagcaataagtagacacttttgaagtcacccctacaaaataacaatacatcatccgcaaagctcaaatgatttagtcttaaagccccacatctttcatgaaactggaagccttctgtatcacctattttcttcattatcctgctgagatactccattcccagtacaaaaagtagaggtgacataggatctccctgtctaagtcctctctttgcttcaaagaatccatgtaaagatccattaaagagaagagagaacctaggagtagtgatgcaagtcattactagctttatgaatgaatcagggaactgaaaggcctgtaacatttcttctaaaaagctccactccattgtatcgtaggccttctgcagatctagtttaatcatacaatttggcctagcatttttcctcccatagtgccttattaagtcttggcaaaccatgatattgtgagcaatgaaccgccctttgacaaaccctccttgattttgagctacaagatctggcaatatgagtttcaacctgctacaaatcattttagttgc

SEQ ID NO: 234978 - DNA, 2931 bp, Cannabis indica
aaaattgaaaatggaaatagtttaccaaaaaaaaaaaaaacgaaatgatttgtttttttgaacaatgccaaatgacacttttatatcaattattaatacatttttttttaacaaatcagccaaattatcgtttcaaatatatatacaaatttataatttagtaacatttttgttaaatgtcactaatattttagtaacaattttaaaatgtcaataaaattattttaaatataaaaaataaatatataaattcattattagtgacatttgcaaatgtaattaattattattttagtcacatttgaaatgttattaaagtaaactatttagtaacactttatctatcctcacattgctatatcttacattttttataaatgttacaaaagctataaatgttactaaaattatataattgtgacattttgaagtgttattatacataatttttggtgtagtgagaaagatgattgcaaccaaggtgttcaattgtgagaataatatgattgatgcgatcaatggtttatggaagatcaagggacaattaaaattaagaatgttggaaaccataactttttttttatttggtcaatagacgcaattaaagtctttggtggtggtccgtggcttataaaaaacaactgttggttttggaagttccaatgagtatcagcgactacactaaactcaatttcgatcgagttaaattatggattcagtttcatctgcaacccatatgttatatgacggaagatatggatagagaactaggcagtttaatcgagccagtaactgagattgatatcaattcttcgagtgattgtttagggaagtttctacgtagcattgatatcaccaaagcttttgaaagtggaatttatcaacggtgaacaaaaattgcaaatctcgttgaaatatgaaagtctcctattattattgtaaaattattagtgagactatcctttcttcctcctcctgttttacttttggaaaggagaagcagcgagtgaaaggaatgaaattgattttcattgattcaaggagttcagtatagtatgagctttatatacaattcagacaaccaaaactaacacaactctaactaacttcctaactaactaacaatatgcactacaccttataactaactaactttgatactcccccttaaggtggagtgtatatattgcaaattctcactttgtctttgagaatttggaattggttttgctggaagtatgaactattttaataactccttgttggaccttttctctcaccaagtgacaatcaatttttatgtgcttggtcctctcgtgaaagataggagtagcagctatttgctgggctgctttattgtcacagcgcaagatggctggtcctatatgatcgatgcttagttcctttaatagagatattagccataccaactcacaactagtatttgacatggctctgtacttggcttcagttgaggaccttgatacagtgtgctgctttttacatttccaagacaccaaagatctcccaaggaacacacaaaaccctgttgttgatcttctcgtgtcaacacatgctgcccaatcaacatccgtgtatgcttcgaactgaatctttgagtttgctagataaaagagtccatgtctaggggtccctttgacatattatagtgctcttaaggcagcattcatgtgattcattctaggagtgaccaaaaactagctaagcttgttcattgtgtaggctagatcaggtctagttatagtgagatattggagtttaccaataattctcctatacagtttaggatcagcaagttgtcttctccttcttggcttagtttgagatttacttccatggcggtattagcaactttacatcccaattgtcataagtctacaagtaattgaagagcatagtgtctttgggatataaaaattccttcattgtttctagcaatctcaatgccaagaaaatactttagttttccaaggtcttccaacttgaatctgtagttcaaagtgacttttaattcctccactacagccatgttgttgttagctaatatgacatcatccacatagacaagtaggattatgatacttgattcaatcttttgaataacaaagaatgatcagatgttgaatgttgaaatatccctattcaatgaaggttgtagaaaacttctcaaatcattgtctagaagcttgttttagaccatatagggacttctttaatttgcatacaacattaggtggcaactctcccttaggactataccttggaggtaaagtcataaacacttcttcatgcaaatctccatggagaaaagcattattgacatcaagttggtgtaaaaaccaaccttgaatggtagcaagagcaagtatgagcttgacagaaacaagctttgtgacaggggcaattgtttcattgtagtcaataccttcttgttgattgtaccccttggaaacaagccttgctttaaatctttcaattgagccatcaatattgtacttgattttgtaaacccacttacaccctatggcatgttgacccgcaggtaaactaactacaattcaagtgccattagtttctaaagcttcaatttcagtgtccattgcagcatcccaaacaggtatgcctcgagcttggtgaaaaatttttggctcaaaatggctggaaatagctagcacagttgctcgaaactttagtgatagcctgctgtagtcaataattgcataaagagggtgagcagtagatgcagtatgtacatgagattgcacactgttagtggataagaagcagtgataatcttgaagatatgatggttttttggtatgtctagtcggttgagtactggtaacatttgcatgtacattaatgatatgaagtgcaggaatgtgtggttgaatttcatgttgagtactg

SEQ ID NO: 234979 - DNA, 1684 bp, Cannabis indica
ttagtttattaaagagttttaacttatactttacttgatacacagttcaggatttatgttacagtcttaagtgtttctccccaaaacaagtttcatgaggaagaatgaataatcacacttctagccacgtccttagataaatgttgattacatctctcaaatacccttcatgttaggtttgcttaacattttgtattggaagacaaaaatatatttatttagtagttgtgcaaaataatcttaaacattatttatttgattcgtcatacctcccatggtagtgttatccaccacagttagtttcaatgactttagttttcttgcctaattgatttgtcaactatagttttgaaaatttaaaagaaacaacgtctaaagattaatgcccttatgaacaaaataagtttcattagtctaaggacaagatacaattattgatcattccatgaaaccatgagaaaagatccaccaaaatatagcataaattcttagataatgaaactttattttgtcatttcatttctttatgtttgtttgttactctttaacaaaatctaaaatttattaaatcaaggggtcatgaattctattaaaaataagtctttctattctcctttgagagatataaccttaatacttataccaaaatataatagaattctcatgattcaatttatgttttctcccatgagaaaaattataaggtttatttatatgaggaaaatttcaataaatttataaattaaagaactagtagaaccaatattgaaatattagaaaaagattaattttctttaaaattctataaaagaataagaatgacctaattattcaaaatataatttaaaaccaaaactcatctaggtgatgatattgtataagtattttccaaatcctaaaaataactagtttttaacaatagtttgaatatccttctagcctcatatgtagatgtttcacttttgcccgtaaagatgaatctttcatcatcatttggcttttagtttcatagataaccttccttagttatacttacataaataatgtcacaaaattttgcttattaagtatatttgggtacaataaattaaatcatttacaaaacacgacatagtaagaaactcattttttttagttatgtctaatgacatacttggaacactttaaccttattattattattattattattattattattattattttaatccctcttgtcagctagataatgaatctctccatgagtcttgggagaggttcaaggatctcatcaggaagtgtcctcatcatggtattgagaagtggatgctggttcacaatttctacaacggggtggttggtaatactagaacacttatagatgctgcagctggtggggcatttatgaggaaaagtgcaaaacgaggcctgtgatttgctagaggagatggccttgaataattagcagtggccaactgaaagaagtcagacatagaaggtggctggtatgcatgaggtagataccatcactaaattgatagcccaggtagaggccctaaaaaaactaatagttgtgcaagcaaaacaagctcaggttgtttgtgagctatgcggaggccctcatccttatgcggaatgcccggtagatgtgaatagtttgccaatggatgaagctaaagccattaggaattacgtctcaaaa

SEQ ID NO: 234980 - DNA, 964 bp, Cannabis indica
ttttttttttgaaaaacttttatttaattatataagtgtgtatagtacaatatatttcaattcttatttcttatatttaaatttaactgttagattgcagaaacattgaatatatttcttacctattatataaatgtctatctaacactttttgttgtgtcttaacagattttattgtgatttaatagagttttttttatattttttaacaaaaagtgttaacaaaaatgtaatatttgcatcctttcacaaaaaagataatcattcacagatgcattcattcatataaataggcatcctcccagaaaagaggcaataattcactattgagatgcactctttcatatatagtcttgtctatagtggaatcacatgcctctatatagtgaatcacacgccaccatcttcaaagtttccttttttcaatgtcactgccacttttattgattgtctttgagtcaaattacctctatgatctataaaattctaaaatacttactgctctattgctatcttcatcatacatacaaattttgcttgtacaaacaacaactacaaacaaattttgttatatatgttagtgcttttcaatttgaactacgtactcaagcaatgaaacaagcaacaactactctcatcacctggaaaatatttgcttctgatcacacattgtttcaaaggaaaaaaaaaagagtttccaagagtcaccaaataacatgctcatttacactcatccaataagtacttttgcatcagttaaattttaagattattttctatttgaattttgaaaaattcaaaatattacgtgtaaaaaatgactacttttgggagcactgcatgacgactatgtgcttaagaaaatactatagagacttaaaaacaattaatagttaattaataataattactaatattgttcattggatttgaaaggaattctaaaaaaatatgcacattgaga

SEQ ID NO: 234981 - DNA, 925 bp, Cannabis indica
aaactaaataataataataattaaaaaaaatacacaaaaccaatgccattgatttatatgttttttcaacttctgattcgtcttcttccttaaatagacggaagcaaacattctgcccagaatctgctaccatctccagccatccctgctccaactaagtccataatcaagatcaccacccttcgaaaccccaatccctaaagtttcttctctctatgtgaatcctttctctcacacgattcttcgcccaactctaaaggagcatctcttttcgtcgttgtcgtcttctttttcaacctcattccctttattcttcttcgcaaatctgggttaataagtcgaagaacttctgcaaatctagaaaacggaaagaggtagacaccgagaagatggcttgagaaagagaaagaacgagagagggaggcgaggctttagggagtttcgttggtccgggatctttgtagggatgttggtttcgaagatccatggctggagatggctccactggttgggcaaaggtcaggatttcgaattaatcaaaatcacttcataaccctcttcctttaaagcaataatagaagaagaggtatttcttggtcctaggagcttactagagccaaacaacaatcgaaaggtgttggctttagtggaatagagggtagaggaatttggaatttctcaagaatagtgtttggaattttattattattattttctggattttcttttggttattattttttgagttttcttttgctctggtcaccacaggccaaagtggaggccatggatgacctctctcggtcctgagatcttgtggtggtgtcctgagatctaggggtggtactcgggtggagctctcatgggtgagtgaaagaagacgaacaagaaaaaaaaacagaaaagaaaaatataaaattaattt

SEQ ID NO: 234982 - DNA, 969 bp, Cannabis indica
atataagatgcatgagctactcctatctttgccacttaattttaaaatgaaaccttatgtaccaaagcaattaaaatcaaagaaatttacatctagagttttatattgcatctaattttcataaataatgtggcttttaaaattgtcaatattataattttatttgtattgtttttaatttaattaatttacttttggtttatgtgttgcaagctaatgtcatttatctgaggtccatcacgtcaagttgagcatcacaattcacgcacctgttcctgtttttcatattttaaatcatgattttcctattttatagccatttgggctaactacatgtacaattatcgtattaataaaattaatttgataggagttcttaaatcaaataatcttaatagtttagaaagaatttttaacggtctgaaaagttcaggggacataatttgatacatgtcaaagttcatgggacaaaaattcaaattaaccttaattctttttagttactaccactttacttgttacaacatgatgtttagtttggtattcagttaagactttctaatatataagaggtctattaattcgtttgtattaattcattcaagtatatctcaaatacacattcaataagagaaactcttatttttaattgagcattgctattgagtaccagtagtgctcaacatcttctataaatggttctgtatgattggttagtgatattccttaaaagttattttcttaagttatatagaactcgatacttaattataccaatagcaatatgataccgaggagagtgctaggcaccaatgttactttttaacaattctctttttaataatatggtatcaaagtcagacttacagtttagaccatatattatatttactctaggccaattaaagtagatctcacgtgtattcctaaacaatacaggtgaacatcttacattgataaaataagaga

SEQ ID NO: 234983 - DNA, 507 bp, Cannabis indica
ctctcgtccatgacagaaagcttactaacaaggatggtaggatgcaatactgctagacagatctggagctcactggaaaaatatttcacccttcgtgtttcatccaaaatcctggagtttcgtactaagctgcaaaaccttcgaaaaggttccatgtctttgaatgagtatctattgaaggtgaaacaaactgtggatctactggctagtgttggagagaccttgaacgatcgtgatcacatttctgctatcttcaaaggtctccccagcgaatacgatacattcataatctccacaaatacaaggatcgaagggtacacagttgctgagatagaagcattactcctagcctctgaatcaagaatcgagaaaactgatcaagaacatgagatcagtgttaatcttgccaaagtcgacactgactatgctcctgatcaggatcttgaagcaaatctcgcacatttcaatcgcaatccgaggtattctatgccaaatcgcagcaatttc

SEQ ID NO: 234984 - DNA, 796 bp, Cannabis indica
cttaatgctatcaaaaggcacaagaagggtcgcgcgtaagggttttcttgcttataaggcaaatatggcaaaggcttatgatttgttgggtcattctcaaaggtatgttttccaagcttgggtttcatcctggttggataggattaattaggcgttgtgtcagtacagtgtcttgtgctattaatgttaacatggatatatcattggtcatatcgagccatctcgatgtcttagacaaggggactctctttccccttttttgtttctcatctgtgttgaggggttgtcttccattattaagcacgagattgacttaggctctctttcatgtaacaattgtggtcggtgaagtcctatgatttctcatcttttgtttgttgatgatatatagctttttctttcttgaagctttagtggccagttgttctcgatttaaagaaattcttttggcatatgaaaatgcttcaggtcaacttgttaatctacataagtctgcggtatctttctcatctcatatgccgtcaaatttttgtgctttcttggcacatatccttggtgtccctcttgttccttgccatgataagggctttcttgttttgctggtaaaagtaagagtgacctctttcaatcaatcaaagatagaatttggaagaaactctttggtggaagtctaagctcttctctgttgggggcaaggaagttcttttaaaatcaataatcacagccatcgttgcttaagctatgagtttattttgcttgccagtgggcattgcgaatgaaatacatcaaatgtgtg

SEQ ID NO: 234985 - DNA, 859 bp, Cannabis indica
gttaagtacttttaaaatattttcttaaaataaattcatacagagcagccattaaaccttattttaacttcactattagtgttagaaaaagaaaaaagtttacttgtttaagtgtatattcgtcttgaggagtttagtgttagcgttagtctctcataaccaaaattatgtaagaaattgttatgaaatagaaaatgttaattacttttataaaatagttttttaaaaaaagtcacacacaacagccattaaagcttattttatcttcactgttagtggtagaaaaagaaaaaagtttccttctctaagtgtatattcgggttgagaagtttcttagttccttgtcaatgaatcttaggtacattagtcattcaaatctctatcctcaattttgatcggcatagacctaattcaccttttggagataactaattctccgccaggcagtaggtttccaaagcccttatcataactatcaaacgatttacataatttatcaaaaattctagccaccacatatgaatgagtggccccattcaaacaatacagagaaataagatttattgaccgagagctgacctgtaacaactgatgggctagcttctgtaccgacctgagtaacagcaaacaccgttgctagagcgggctttgctactgtcttctgctcttctttcttgagttgtgggcaatccctcttgtagtgaccaagaaaaaaacactaaaaacatcctcatcctttacactctcccagatgatgcttcttacagttgggacattctaggtaagtatattaggtttcagaaccaccctaactgtaaagcccgcttagttaatttggaaattagcagttatttatgtt

SEQ ID NO: 234986 - DNA, 3044 bp, Cannabis indica
gctgggaaaagttatttttgccagcgcttttcattttgtgctggcaaaagttctaataccaacgttgatttgctaacccattttgccaacacatcagaagtaaattctattttaccagcgcgataccaaacttttgccaatacaaaaatgtgctggcaaaagtgacatttcttgtagtgcgagtaggggtgttagaccaattataggttttacatgtaaagttttgtcaaccaggtaccaactaaaagtcatgtttctgactcaatgtaagtgtttactaagatttttagaaactagtctaaaagaaaaattataagttaaagaaatgattaaaaaaataagtacacgatttttacgtggttggagcgttaatgaaccttagtctacgagttactagtatttacaatggtgtttgagtacactttttgacagggtttgtgctttgtaaattttaggttgtgaaccccttaatagtgaatatgaagccttatttataggtttccatgaaaaaggagctgaattgacccggacatgagaagtttatgtataataaaagcccactgatggggtggttacaagagacataaagtttgggccttaatagaaagcccaatgccaaaagtagtatgtggcgcacactgtttggtggtactattgaggctgacttatctcatcacgtgagccaccactagatgcgtgggcaatcgatgaggtgttagagtagtgatcgttgcaatcctacaacgatcataccttttttccaagccttttcttgagataagggagacattcttcgaatttagtgggattgtgtcagaatgataccacgtaggaaatgtgcccaaatcgttaatgatttttaggaagttgcttactctcggtgaggtatttagttctcgaacaaccctaaaatggcttgtcggtcctatgttggtcccatgttacagttcttgggcctgagcccaaggtgttaggatggagccaattgacctagcgttcccttcttgcttgaaaatttcttcatatgtggatctctcgatcaggtatcgattatgcatggtccccagctataccttgaacaatcttcccagaattttaatctcgagtcttgcctcttgaaggcacatggcatttctccttattgttggggccaagatgggtcgtgctctcgtttatgggctttccccaccctgagggtccatgtgtcatcatgattagatatatagtaagctcttcaagtgaagtcactctgacgagctacgagcatatctcattcaattagctaataacaacagcccaaatattcttaaaattttacgaaattatttccttattagatatttgtaatttgaatttaattttgttgtttagatatttgtaaagatagttagtatgtgccatgtgttaagaatataaattagtacatatatcatttaaaataatgtcttcattaaaatataaagttcattaatgaaacacaactaaacttgatgcaatacaattaatttaaaccctagcaacaccactaccaataaaatggtaaaataaaaacatctaaaagtatgattcattgccaatttcgcatttgagattgaactctcatactcaaccacccacactcatctttgacacaaccgacatgatcttctacaatggcacgatcaagctaagcttgattctcaatcttattctcgatgattggagcaaaaaatcttgtctataatttaaactcagaggcgaatgaaatcccaataactcttcaaaagaagtaagataaaacaagatagactggcaccaaagaggtacaaaaagttgagatgactatgatcatcgtttcccaagatttcgatagaagtgtccattgtcaattgaagaagaaaactcaacataccaatctttacaatctgatctcccaaagataatggtgatgatgatgatgattgagtcaaggcaagtgctgaaaatgatccaacactcaacacatcaaatttattcctttgtcctttattggttaccaaattacaagactccatatactttggatgtaattcaaaccttggataattgtacaaaaaagtaaccatagaaccaatacacaaggagaagaatttcaccatggttaaacaataaaacttttgttcacatgttttgaccaagaatgaaatgaatttaggtatcttgggcaataaatggctaagaagaatagaagaaaaaataaagatgatacctttcaaagtgtcattatctttaaattgatgcttagaaaaaggagaagcataaagaagaatagcaccaacaaatgctgtggaaatttccaagtataaatacaaagtatcctttttaaggccaatgaaattaacaactccaactaatatggattcaatacaatggcttaaaatttgtaacacaataaatgagtatacaatagccccaaacatataccataaattatttggtccattttttgatgatggaatttccatagaagtttcaatagtcaaacttatcaaaacactaaataaaccaaattctatcttattattattatttatattttcagcactatgtgatgataaaagcaaagccaaaagagcaaaagctccagctgaataaagattataacttccatataatattttttctccttgtttttcaaaacaagagtttattaaataattagattgaatcatactattattaaaacgaggatatttcttcaagaatgtcaagcccaaaataattccctggctaaaaaaattaataataattataaatattgtaagaaaaagttgatcaaattattcttcatcttttccatgagataatcccagattggagcagcaaaaataagaggaagaatgagaaaagaaataggaataaaagtgaatatttttattaaaagattttcatttttattgaattgagaagtgaagaaagagcttgggtatagaaagattaaaccaagaatggctgacaacactgcccaaaatattctatcacatggggaaggaaaatccatggaataaaaataaaataaaagaaaa

SEQ ID NO: 234987 - DNA, 1076 bp, Cannabis indica
aaaatatttccaacaaaacttgcacagaaaaaataaagacaataaagagaaaagtatgaacacaaaggtcttttacgtgattttgcagttaaaattctgcatagtccacgagtcaatcttattagatttctgatattgttctagggccttttttcttatgaatttttcgtcccttttttagtcttacttgcctctatttataattacatagtcaggcaattaattacagagttaactgaaatctttacaacaattatgccctaaaatcgtgaggtttaattacatatcacgtaagataaatgcggttaatatttgaatatcacacagcagctgtgattagtccgcttttattgggtcaaagtaatcgtatattaaacacgttataaatcataacgttccgggacttctcgataagaacccagttccaatgaccttgatagcaacctggatctttttccatatcttttcgaggttgataatataaatctcatcgctcctgcgctgaagacataacgctccatctgacaatcgcattctcggcgacaaggtgaacttcaacattctacatcatttgaatgttagcttctatttgagaggactgactcgacggagctgtgaatctcattgaaagatgtttggcgttgattagtgaagataccatgcgcatgtcttcctatggagagatggatgcctcgctattagttgattgggtttacccgactgttacacttagtttgtatgctatgtatcttaacagtcattatacctcgcttacgtctactcatgcttaacgaggttgacgcctcacgcatccactgccatatggtttctcactaatgtacgaggcaacagtttgtatatctttatcttgcgtaagacattatagtcaggaagttgtaaatatattctgtcacgtctgtatttaatgagttattccattttcaaatgtgattagcgtttaaggcaatgatccctattcttcccaatctgacacgtgttttccattgaaatgctagccgaattatatgtataacagtcacttatgatagattttatttaggtccaattagtattgg

SEQ ID NO: 234988 - DNA, 1369 bp, Cannabis indica
gggcgattttaggagcaacactacaaaattttgaaaaattcggaataatttacaatatagaaaacaatgttcaaacaatcaattttacacgcgtataaaataaaatagtcacgcgtggaatacactacttgaatgcaattttcagcgtgttaaatttttacgaatttcttaaaattttgcagtatgtcttaaataactataatatacatgatcataagaaaaaatttaactaaaaaattatttcggatactaaaacagaaagagatgtaacagtacatcacttttaagggggtgcattataaaatttccttaaagctttttatattaaaagtagtataaattggatattcttttttcctaaaattataattcttgtagtattttgttccttaatttttttttttgtcaaattttatcatccaactatacaaatggttgtaaatgttacattttagttaaattctgattatgcctcaattaagcgcccatcatgaccctgagctctggaacccacttcaaatcttcttgtagcctcaaaaataacttcattgacattcaccttgatcttattaacaaccagtttaaacaagtgctctacactattagaattagaaaaatccaacaatggcacctgcttgttttcttgagcatgtctttattggtcaaaaactattcttgtcgatagaatcacatttgccaaaggcaatttcttgcttaattcattcaacaaccaaaacaagttcttatatgagagtatttatactcaaagacaaaagccaaaatggctaacataaattagttacaattcttccaaatcacttatgagccaactgcaaatcaaagtctttgagctagtacttgttgctttcgctagtcgttcacagattgtaatgttgttgctaaaatggccaaccacatcaccatggccttattgaccaaactcaactcaggaagtgggaagccgtcaatagttgtgtttttggtttgaacagtgagacatgaaaggtaccgatttcttaaacgtcgttattggttattagtggcgagaattcgttaatattattttcatttgttaatattatttaagttgggtctgggtatgaggtcgggatcgaagcctagtccgggttcaggtctgggcctagttcggtccggggaccaagtctagtccgattcgaggctcgattccaatctggcccggggtccatgtcggggtttaggaccagggtcaaaattcgggttccaaagtttaagttggggtaagagtctgaaatatcaattaaaaagaaaaaaaaattcaaaaagaattaaaaataatttttttaaaaaaaaaattgattctcaaggaaaaaattgaaaagtgaaaaca

SEQ ID NO: 234989 - DNA, 1255 bp, Cannabis indica
cgtccatcaatggagctcaccttggcctctggaggttgtcgtcttcaatggaggagggttgaagatcgattttggagagagatagcaaagcatagagatgagaatgagataaaaaaataaaaaataaaaaaagaattgaaagaggactctagagagaggaaaacaaatattaaggttttgaaactattaccctaaataatattttaataaaaaaatataaaaaagtgaaaaattgaaaagatttattgagaaagagagagaacatgattactgtgcctttttaattttttattatttttattttattttattaaaaatacctatagcgacgtgcaaggcatatggggacacattttcctagtcaatcctgaagtgactttataagtcagtttttttaataaataaaaaaattatggttaatactttttggtgactcttcatatttttagtgacctacaacatgagagactaacaccgaaagtttatagtctatttatgcatgtcactaaaaatcaattcttaactatttagtgatccacacaaaactgtcagtatatagtgtcactaaaaggctaaattgtagtggtgtgggttgtatgtgcttagaccatatgaaccattaattatctctaaataaagaattatttaacatttctacgactagcaaaggttcgataacgataaagagacttatctgtaacacttgtgtcttcatcacatttgctatgataggataaagagactaacgaaagatgatcttttacgtgatctaactgtttgtgagttattggtttgtgaatattgtttagaaggaaaaatgactaaaatttctttctgtgcaaagggatattgtgttgtacaaccacttgagatggtgcatttatatgtctatgtctatggtgcatttatatgtctatttaatcactttcatagatgattactctagatattcaagtctttacctaatgcatagaaaatcagacacttttgataagttcaaggaatttcaggcaatgactcaaaaactaattgagcaaaatattacagatcttgcgaactaataggggttgagaatacttggatatgcagttcaaatatcatttaaataagctaggaattcgtatcccaattaatatcccctagtactccgcaacaaaaatggtgttggaaaaacaaaaagaaacagtagtttgatagaaataataaggtcaataattagctacttaactcttccaacgtccttttggggatatgc

SEQ ID NO: 234990 - DNA, 1348 bp, Cannabis indica
taaatttcaacctaaaaataattttctatttaattaagtgtcatgaaataaccaataagggttttctctgtttttctctctccttcggtgactcgccggggctatggcaaaaagggggaaaatggctgggaaaaccaaagctaaggggaagaaaactggtccatcttcttcggacagagttattaaaactagatccatggatgcattgattggaattcaagaattagagattgatgaagatgttgagaatgttgaagaaatgaaacagagtgatgaggcaatggaacagtgctccgatggtgcgccttcgcctgtaagtgaagttcatcccgacttttctgattggctcacgggggcaaaccatgcttctcaggatgtgagaatggggaagaatccctctcctccaattctcagatctaatgttgcacgtaacctagaatcttgcttcgaaaagactactgggacgaagactgagacacaaccgagggttgcagatgctagtgcgaaaatgaatgtgaaggtgaagattgattttgcagacattgctgaggaggtcaactactggcagccgtcgattgtgtgctatgtgattggagctaatcctccaatcaacatactggatgggtttgttcgcaggatatggaaggatgcagtagtgaaagttggtttgcttgctagaggcatttttattatccgttttcagaacttggataccagggacagaatcttggagcaagggtatgttttctttgataggaagccaagggtaatgaaaccatggaactcggtggatgatttcaccaaggaagaagtcacctctgtaccaacttgggtccaattgcaaggattggatatcaaatattggggagagtcttcattgttcaagatagtggggcaactgggagagccactccaagtcgatcaagtcacaaagagcagggataggcttcaatatcccagagtactaattcaggtgagtttatctcaagaattccctaaacagatttcttttattgatgaatatgatcatgagatagtgcttgatgttaaatatgagtggattcctttggtttgttacaattgctcgggcataggccatgatacccaatcgtgtaggaagaaagagagtaaggaggagcatgtgaaacaaatatggcttcttaaaaaatcgaaagaaatgatgcagaaccaaacggatacagagggatttcaaaaggtcacaaagggaaagaaagtcttaatggagagagtagaagtggatactgagattaataatagatttgggtctttggaagatgtaacaggtgagatggttggtgaagagtgtaacataggggagggggagggc

SEQ ID NO: 234991 - DNA, 798 bp, Cannabis indica
tttttgatggattcagcaactatagaaaacaatacataaatagtcctgaaatagccctagaaaaccaaaatattttaaactaaagtctcaatgcaaaagccttgaagtaggtgagcattgcatgccctttgtttaagtacgagcagccgctggggctcctcctgctgggcgttgaccgggctgccctggtgcaccgggcctaggagtgtcctcctacacacatttaaaaaagcaacgaagtatgtcaacaccaatttgatcaccaaacactaaacaaaactatcttaatgtggattaatataagcaagaacatgaatcggtgcaaccaagttcaagccgaagaaactaaaaaagaacatgcacttccatccataatgacagaccaaaactaacatataatataagcaaatagatgaatcggtgcaacgaagttcaagccgaagaaactaaagaagaacatatattttcactaacaacgactaaccaaaactaacaaacatttaacccattcttggaagatcataaagttgatgtgaaaactaaataaaactataacttgattaccatttaccaaacactaaacaaaattcatttgaagtggattaagagaagaagatcataattcataaagttgttgtgaattgtgtaacacaaaataactaaataaactataatttgattaccattcaccaaacactaaacaaaacaatcttaaagttgattaagggaagtgaatacataaaagggtgcaattcagttgaagctaaagaactacataagaacatatatcaacacatt

SEQ ID NO: 234992 - DNA, 1102 bp, Cannabis indica
atttaaagttattttgcatctcacttttcttttgatgtatagatagaaagaatgggacgagcacaaagagaaatttggtaattattgtgattattataaagtaaaatctttattatatattgtatttaataccttaaattagataattttattgatgattattgagcataattgttattgttaatatttgattatgttgtttgatgctcaattattttaacaatttgtatcaagagcttagttatctgattttaaggctcaaattattaatttaatttttatattttttcacccttatattttttaaaattcacggttggttttgtgaaaactatatttaaaatatttggacttaatctttatatataaaattaaactttcaatgttcttggactgttagaatggttttagtgcaagataaagggaaattttgttttgggttttgacaaatccatgaacagccgaagtggattatatgttttcagatttaaaattattttgagcttaaatgggtacgaaaaatgaaaagaggaaggaaaatggtgaaaattcccccaaaacgacatcaaaaatagtttacagaaggctgaaacccgaccgggtcggtgatcggatccgaaatggatcgagtcgggtctaaatggcccatctgtaggttgaagacgacccaaaaatgacgtgtatgcattcagccaaattattgtcgtttttttctatgtattgtcgtttgataattgttgataaactacatgtcgtttttgctggtaaactacacttcagattttcaaccaaactacatgtagtttttcacatttttaaaacaaaatttttaccattttgcttcattttattttctcacttaattgtatgattatattatgtgtttgaccaatttaaataattaattaactcataatcacataattaaattgaagtaaattattttctaataattataatctcacaattttattatgtgttatttatcaataaaaatataattatattcacgtcataaaattatttgatagatgattgataattttttgatagtataattatgttagtgaataattaattgagtgcttatgtactcacctat

SEQ ID NO: 234993 - DNA, 1123 bp, Cannabis indica
gcacagatcattttggtggccaccttgtagacaacattgcagcacgcaataggcctgaaatctttcactgtgttcgggcacttcacttttggaatgagggtgagaactgtggagtttatctcttttaatattctccctgatgacaaaaaggattccacagcttcatataaatcattccctatcaactcccagttatcttggaaaaaataactcgaatatccatctggacctggagctttgatccccgggatcgcaaacaaggcagccttacattcagctttcgaatacttccccattaacatttcagcttgctgctttgtgacttttggccccatattaacaacactatgaatgacttttttcctattttccatggagcttcccaacaacatcttataataggaaataaatgcctcagttacctgttcaggctgctccgttctggttccatctagctgttcaatggaccagattttgttctgtcgtcttcgctcccgaaggcttgaatggaagatcgaagtgttatcatccccgtttttgacccaagatacttttgctttctgctgtagcatggatgacagatcactatgaacctttaaataatgcagccgagcctctaattcctcctggtgcagcaacagactgtgtggttccatttgcagcttactttgacacacttctagctcttctttggcctttgcttctgccacatgaagctcagaaaaaccttgcttgttgatctcctttaacacacccttcatagccttaagccttgtaactacttgatacatctttgttccattgattggttgagcccaaacatctttgattttctctgtataagtcgggtaagaactccacattctaaaatatttaaatggttttttaccattagatacctcagaatggaaatttaacacccccggggaatggtcaaaaattccttcattaaggaataaagcttcagcattcgagtacttgcccatccaacttgggttagctaggattctatcaatttttgaatagatcctatctccaccatgttgcttattattccatgtgaagaagtttccactcattttcacatcttcaagctgacatttttcaacaacttcaatgaatt

SEQ ID NO: 234994 - DNA, 1250 bp, Cannabis indica
gataactaatcagattgtaaagagttttatttatggcacaaaacccaacaactgaaaccgttgttgggtttcaacttgtcagcgatacataattaggtacaagcggcaatgacatgtgagtgtcaggctatgacacaagcttgtctgattaggtgatgtgatacattagtgccaggttgtggcacgggctcacctgattaggtgatgcagtgatattatgtatgatgttaaattatgttacgggcttgcctaataggcaatgcaatatataatcatttttatttctgtgcatatggtttgttatggtatccactcttgaatgttattgtttaatcattttataatagtgaaatggataattagttattttatgtattcttctttgttacttttcttgctgagtctttatgactcacgggtgctttgtggtgcaggtaaagacaaggaaaagttagagcagccatgagatgacagtcttctccagtaatgtacatattgaccccttcggcctgtgtaccgagttgccaggagttgttttgggttgtatctactgtgtatcttgatttcgtattttgaattgtcgttgtatatagtcctttataaaacttttataacagggatccccataacacatttttagtgtcgttatgatgtctatttttagtgttttattttagtcaattttttaatattattacggttttgttaaaattagttaatctactagtattaaactagtttataaaatttcatatgtgacgtctctatagattagggcattacaataacaatttacaagaaaattgtcgacatcctttcgacattatctcaataaaaaaaataacgagcataagaaaattgtcgacattatcttaaataaaaaaagaatagaatacgataaaattgtcgacatcccgttgacaaattatcaacataataaatcgcagaatacaatcaaattgtcgataaaatgtcgacattctatcgacatactcaagaaattctaaaaaaattatagcctaaccaaaattgtcgataaatcatagataaaatatcaatatcctatcgatatacagtaaaaaatttgataaaactagttatgcttaaacaatcaactacccattttgattttcgttgatatcctatcgatatttcatcaataacaatgtaaaaatacacacaccactgaaacatatccaaaacttctagctatcatcagaaagaacacaaaatctacataaattcaacta

SEQ ID NO: 234995 - DNA, 682 bp, Cannabis indica
agaggtattgaagtgcaccaacaatagagcgatacagttgaggatctggtgtaggttcactaccataagcagacagtcgaagactactgatcataggagtgggggatggttttgcatcatgcatctgagctttgatcagtaagtctcgaatgtatttagcttgagagagatgtaaacctgaggtagtttgttgcacttcaatgcctaaaaaataatgtaaatctccaagatctttaagagagaattgattatgaagagagacaataagatcttgaatgactttgttgttgctgccagtaactaagatatcatcaacatatactaacactaaggtagtatgtgaagatgtatgtcggatgaagagtgagtgatccgatttagatggaatgaacccaagctggaggagacagtggtgaagtttatcaaaccaaacacgtggtgcttgtttcaagccatatagtgctttgtgcaacttgcacactagattaggagctgtagtgatctcaaacccggggggttgtagcatatagacttcctcattcaatgtgccattaagaaatgcattgttaatgtcaagttgcttgatagaccagccattggatattgcaagtgtaagaacaaatgcgaattgtcacgggtttcacaactgggctgaaggtctcagtaaaatcgaacctcggtg

SEQ ID NO: 234996 - DNA, 1338 bp, Cannabis indica
ggtattttgtgttgcagatcaatgcctatatatattttgaagtctaacctcattttcattaagtcaaacgaaaagggaaggagagagatagcagtagagattctagagagggaaatgagagtagggttttgggaaatacttttgagggatttgtatgggatgtgagaagagactagttgtgagggttgagtgattgttcaagttcttcgatgtaaatgagtttttggtttctcatctatgtcttatgcatgcatatcatgttctccaatcgatttgagataaatttataacaaatttattttctcatagtggaacctcttggaagacttggagtctgctattaattaagtcgaaccaatataaacctagttgtgatttatttatttattttatcttaattatttttagtttattttagttgtttattgctatttgaggtagaatctaccaaagttttgttttgagtgtgtttacaacataaccactaatattcattatatgtgttatggtggtataggttcttagagatggtgaatagagtatgaaaggaatctactattttagttcgaagagacatcattaacatcaaattagaagatataattcgagctaatgtttcatcctttatgaaaatgatcctttaaagatttctttcattgaagaatcacttcttggaccaagaaggtcagagttgaacttttttggtttcaactaattgcaaacaagatttatatattgaagtagttatattttcactttagtgctaatactttctttggaaatacaacatatcttgttgacaaccctttagaacatagtaaaaataatttaaaaaatatctttccttttattttgtggtttcattgccaatagaaattaaaattaacaattttatatgtaaaactggagacaataattttttaatgaaaaatttacttttacatatttataatttcaaattcgatattaaacattcttaggatgcgtttggaaatctaggaggaaattagaattgagtgtaatggaaagtaattacacatttttatgtttttgtttgatcatgtaattacactgtaatgtataatttggagtaattgagagacttcaattacactatttccaagatctcatgcccccatgagagttgggtgtaattatactatatcattattaaaaactttccattttaaatattatgtactaaaaattaatatttttttgtgtagtaattattaactattttgtcaaataagaaattaagaatttataagtaattactataacgtataatccaaattacacatttttaggaggaaattagaattgagtgtaatggaa

SEQ ID NO: 234997 - DNA, 847 bp, Cannabis indica
gatatgtacaagcctgacatatctagatcaaatatgtgtctttcaatggatactttcacattcgcattgttaggccacgtcgatataattttataaacctcattcaagtaatgacctcttattacaggttgttgcacttcttgtgacagaggttcacgaatacgacgtgtaggctcttgttgttgttgggttaatggtgctgctgagtgtcttgatttggtaactagagcatcctgcatattgatttatgaaataaattaaaattaaaaaaaaagtagtttttctaaatagttagatgacaaataaaccagttgtgtcacctgatcggtccaatcatgaaatatgacgagatgtttgggccatgctatgacaaccccagtagcttgagaaactacgcacacatccatgtcaaccatggggtaaggcaatggagctgctccttgaatagggtgttggatggtcacatggcaatcaacttcacccatgtctacattgaagtcatttggtctagtatcaagatgaaaccccagtgcaacaatattatctctagattgtatggctaatcgacatttacggcgctgcacacaaagtataattcatacatatcgataagaacaaaaaaatttttagaaaaaattagacaatattttccctataatattaacctaaccatccaacaaacacacaataagtttttcctatatatttaaatttattacctcaggcataggaggcggttctaatggtgggtctggtacataataggttgttggcggttgtggtacataaacacatccttggatcagttgcccacgagcatcttgatattgttctccggagttcgatc

SEQ ID NO: 234998 - DNA, 2165 bp, Cannabis indica
gtgaatgaaatgtttgaaaaacaaataggaaggaacattattgcgtttcctaatcaggcaagctcgtgccatagcctgctaccatatatcgcataactgcatcacctaatcaggtgagcccgtgtgaaaaacctacacctatatttcatataattgcatcacctaatcaagtgagcttgtatatcacattcatagtatcatacattaccattgtttaaccaatcaatattcattatataacaatattaactatatctcaatctcaatattaatcaattcataacactattaattgtattacaatatagcgtattatgtagtactatatacttttcttacctttaatccaagttcatacatatcggccaacctaagtggataactatccccgatgatctcggtcctatgtcacaacaatggtaaacaattaaataattatcctaaaacactagttaatattcacataagacaatctatggtgttctaccgaaccctgcagtataaatatactaaaataaaacttatattttggctctaaaacatacaacatattgtatagcgcatcgtaagcttcgaaacgatatatagaacgtccaaaagggacacccgagtaaaaagttatgacaaaaatacaatttttgatctcttagaaatttctaaaaacggtgaaactcgaaaatctcaatatttgcactcaccgaaatactaccatcactccaaacttcatagggcacatatatataccataaatattaccatccttacgtaataaatattgaaattgagcccttaaatgaaaaacaccattaacgttcggactaagctttaagaaattccaaactcgatttctaactcaaaatcaacaagtaaacatcgatactagtgccatagctaccaaagaataattctacgaagtcagaatctccataactattttgattcacgaaacccctatataaaactaatcgttttagcttaaaacgtatttaaaccataccttaagttttttctcttcaaggatttactatcccgctactaccagagcttagatcggtaggtttcaggttgaaaatcaaagaaaatgaatagaaggagagaaaatcttattgaaggaggaggaagaagattccgttcgtactgttctttgttaatgtttattgatataacttataatatatactagcatacacataaatttaccacgtaaacaaaatataaaataagataaaaaattagcatcaattaattttaaaattctagtaatagataagtatcaattgtaagagaaaaaaaatgataatatggaaaatgaataatctcacattgtaacattatactgtcagtaagctttttaaattctagtaatagatgagtatcgattctaagagaaaaaaatgataatatagaaaaccaataatctcacattgtaacatgtatactgtgagtaagctatttaaaattctagtaacagatgagtatcgattctaagaggaaaaaaatgataatatgaaaaatcaataatctgacattgtaacacgtatattgtaagtaagctaaatatagataactaactttcaaaatctagaattttcttttttagaaaaaaaattgctaaataaatataattagaacaaatacaccaaaaaaaaatccaaaagaataaaaattaaaattttattttattatttcttatatatacagattgacagagagaaaataaatcacaaaaagaaattgatcacgtgaatcatgaaaattgtgtgcatttttattatttgctggtgcaattgggaatttttacattaaattaggaattattgcatttttatgtatagagataaaagaaaaaaataaaggaattaaggattttaaaatcaatgaaaaagaaattcatatatataagcatagttacaattgatgagaaagactataattgctcgacactgttggcacaccatctgaactgctctagaagccatgacttcgatgggttaatgggtgtggttagagagaaagaaactaaaatggttggatcacccattattgcttgctgcttgcaggaagttaaaaatcaagagattaaggaggcaatcgcgggagagaaagcgatagaaaaaattgcagaagagaaagatgaaacgaatctggagagagagagagagaga

SEQ ID NO: 234999 - DNA, 953 bp, Cannabis indica
ttggggaagcgaagggtggcggttgctagcaaatgataattctttggtggcaaaggttttataaagctaaatattttcccaggggcaatttcttatctgctgaattgggtcctaacccgagtttcatttggcgtattgtcctggaggctaaatctttgcttcagatgggtgtttcaaggtctatatgtgatgggaaatccacttctatcttggcagacccttggctacctgatttggacaataaatttgtcaccacttatcatgcgagccttgaaggaagaacggttgatagcctaatgcagatggatcgaaaagcttgggatatggaggtgatcaatgatattttcaatccacatgataaagctttaattttctctattcaattgtgtgactcaaggagagaggattgttggtcttggtccaaagaaacaaccggtatctactcaattcgtagcgcgtacaaactgctgcaatgttccaatggcgactggcaggttactggtgtggacagcgtctgaaagaagctttggcaattgaacgtcccagccaaggttcaacacctgctatggcgtgttgttgcaggttgtctccccaccaaagttcagctttctaatagacatgtacatgttgatctaacctgtcctatgtgtaatcttgcacctgaagcggcttcacacgtgttgttcagttgcaactttgctcgttcttgttggaatctgtcatgtgctcctgctgctggtgttggcgaagacatgtttatcgactggttttgtggcttgctggtgcagggcagtcgggctgttgctgagagtgcggcaatgctcatttggcgtatttggacagcacgtaatgatcaactatggaacaataaatcaacaacagttttggaggttattcggtcggctaagaactaactctcggcaaattggcaaaatgctcaaacacgaaggtca

SEQ ID NO: 235000 - DNA, 2370 bp, Cannabis indica
ctttattatataattataaattttaatataaaatttaatacattatttaatatttacttaataatttatttaaaaaatataaaataataataatataaaagaaaatataaaattgaataataattataatttgttccctgaggttgttttgtgctcctctcaaacctacaattctgaccataggccgctatgtctttttactgatggcatggaggaaaaattcaaaagaagtttcaagtttgaagatagctggaccctggatgagaggagcaagctggtggttgatagcgtctggaaatcggtgtgttatccttgggctcccgctagagttttcaagaagattggtgcaactagagttgctctcttgcattggagtagatcccaatttggtaaagttgataacttaattaaagatttggaaagtcaactcagcgccatccagggtttgtcagtgggatcaagagattgggatgctgagtgcgaaattcggcgtgctctcaatgaggcctacactcggaaagatttgtactggaagcagcgggccaggatttcttggctaaaggaaggggatagatgttcgaaattcttcttcctttcggctgcaatcagagggagacggaatgctatagaatgtattttaaataaagatgatgtttggatttccagtcgggagttaattggccaggaattcttagagttctttcaaggaattttttctggatcggataatgagcaggtgcaaaatttcgatgatctcattagggatagattgtctgccgatgataaagctgagctagttagaggcccttcttatgacgaaattcgtcgaactatttttgctatgagtaaccacaaggctccgggaccggatgggatgtctgttatgttcttcaagcactactgggatactgtgggtgtggattttcgtgaagcagtctcagatttcttcaggacaggtattatgcacaaaggggtcaatgcaacaaatattgttctcattccaaagaccaaaaacccgaagagaaccaatgattttagacctatctccctttgtaatgttttatacaaggtcatctctaaaatcattgccaatagaattaaacctctattgccagcccttatttgccctacccaggcggcttttgtcccgggaaggaatattcaggataataatgtaatcattcaagaaatcatccattcgttcaacaggaaaaaaggtaaagaaggttgcttcgccttgaagattgatcttatgaaagcctatgataagctgagttggaactttatagatcaagtgcttgacgggtttggggctcctcaaaggttccgtgggtgggtttcccattgtataactactacttctcttagcttatgccttaatggggggcaagttggaaagatttctccatcctgtggtcttcatcagggtgatcctttgtctccctatttgttcatttggacggcgaaaattttgtccagacttctgattgacgccaaggggaagggcgtgatcaagggcattaagcttagtaggtggtcccataattactcacattttctttgcggatgatttaatcgtggttggaaaggcgaacttggaagaagtgaaggggttctggcaatgcattgagaagttttgtgcttggtcaggccaacaagtcaataaacaaaaaacctcaatcttctttagcaacaatactcccattgatatgagaagtgctataaagtcggagctgagaattgggtcccctgaaggcaacatcaaatatttaggtttgcctctttttcgctccagcaaaaggacgccgattttaatttcattatggaaaacttgtcgtcaaagctccagggttggagctaagacgttatctaaagctgggccagttactctcatcaagtctgtcggactatccttgccgatgtatgccatgcaaacgaccaagctctctaaccggcttgttgggaggattgatggtatggttcgcgatttctggtggagtttgagaaaggtaaccatgggttgtatcttaaagcttgggataaactttgcctccctaagtctcgggggggtctgggtttccgcaagactagagaaatgaatcttgcctttctggcaagatggggatggaacctgttgtctggtagccaatccctttgttgtaagatcttggaagcgaaatatctaaaaggaaaggctttccttaattgtacttccaaaaattcagacttctggttctcgaaaaacgtggtgaaatccaaagccatcttgaagaaaggagcttgtaaattggtgacggatggcaaagacaccaacgtttgggtgatccttggattactcatagaaggagttcatcttcgtcctaatggtat

SEQ ID NO: 235001 - DNA, 1392 bp, Cannabis indica
acacttatcggggatgctaaaacaaaactaacattaaccctatcgataaataggatgccaataccctatattacacaaaaacgagaaaaactaaggctcgggaaaaagccccaactggcaggccggttcccaactggaagtccggttcctaggaccaaccggtcgaccggttgccacaggctcccaggaaccggaattccggttctcgactgggaaccaaaaatttgacctccacacctcaatttaaacccaaactttctaaaaactcccagaatacctgtatatactatattaaaccaatcccaagcattagaattcaacaatcctcacaaatttccaattcaccattaaagagctaggtttgagttctcaaactctaacttagctcaaatctcaaatcaacaaataaattcagttcaaataaacttaaacaatatcaaataatctccagattatcaaatcaaacctctcttagttcctacagcaacttaaatatcaaaactcaagctatattgaacctaacttttaactaaagctcaattagaaaaacctagggattcttaccttgattgaagttcaaatccttgctggaactcagagaatcacagcaatgaaatccctcttcctttgctatgcttgaaggttaaaaaggaaagggaagaaagacttaggaaaaacctaggtttctctcaatttttctattcaagaaaatggtttcctttttttttttccttttcttttaaaattactaagttatatattcagcatatatttttataaaagacaaaatagagattaactcgaaaagactactatacccctctagctatttaacaagtagctaataacccacaagggtaattaagtcatttgcggacccctggaaaaccaacaacactaatatctaacaacgataccccgataacattctaaatcttataagatacaactctctaaaggcccaacgtcactttccacagcttccgaacacaatcacagaattgagaaatttacaaaaatagcataataaacatatacgaactaaaataaattcccagaatatgtatttttataaataataataaaatctcatacataaaccctaattatttaataatttaaagtactaatcatgtgcggtctttacacaatctttctgtttatgcgcattgtaacgagagaggaaactcttcctcctcaagtttcaagccctttaaatagtgaggaatgttcactgggcaaaggaccgagatattgtaagccgaagcattgtaagctaaggctatctaagaattatatattcagagatactattttaagagctataagaaaaggaaacttcgttcttattcttaagtcaatacaaatagcgaggattaggctattaccgaa

SEQ ID NO: 235002 - DNA, 1106 bp, Cannabis indica
ctttattgatgttgaataaaatagattacattgaaatggagttttatttagggcataaaacctaacaatcttaaagcagtatagcatccatgcacggtctctgctgacagtagaatcatgtgaggtggggcatagggcggtttgcacgaacgtgtaaagacatttcaaatcgtgctccaagtcagtgcgctgaaagtgaagatttccataattatcgagatcccatttggaccgtggcttggcaatcttaggcatcatatcattcaatgtctcgtcgctcacttgccctttttgggaagagtaatggcattcgattgattgtaacccaaacaagttgttgattgcttcagcggagaattccactagtacttcacgcacaactacttcagtaggccattcttgggacaaaaaattggcgtagaattctttaacaacttccatgaccgcctgtcctctctgcttgacagaaagtccccaattccgcttatgaaccatttcactaatccattcaggtaactcgtcaatgtcttctatatccgccactaatcctctctccatataaaattcccgactgtccaccttatcgtagtactttgtctcgggtgccttgcaatgaaacttagcaatttcatgaagtgatttcttttttttcttgttggcaaccaacttttggcattttctcttcttttttacttgcacactaccccaacaccacaaatttcttctctgctttgtcttcttaaccgctgcccctcaacacaataataagtcttacaatacccttcaatgtccacaatccaattttttttcaaaaatcaccactctttccgaaccacaccaactaaaattcaaagcactcacaccaaattctttcaccctcaacagtcacaacaaaagttccctacttcttttccatttgaaactactcaaacaacaacaccaaagcttctaacaataatctgtccaatagccacaacacttccaatactacaccaaatttccaattcaaatcaaatagtgacaaccaagcagttcatcgttcaaaaccacagcaaaacttgagaaaaataaactaagagcaattccaagaatttcaaataaaaata

SEQ ID NO: 235003 - DNA, 728 bp, Cannabis indica
gtgttttgcctagcatacattttattatactagcctgtgaaaccatgagttagcctagtcagattgcgatcaagattaaaatctaattaccgcttacttgagaaaataaacatgcacctatattcatctatcaggctactaacatgcttcatattaggcttttcttaatcatactagtaaatcaaactgctaaagcataaaaggtttattgaactatgaatcgagcttatctctaatgatgattgtacatatcgtgacgatcttcaaaagacaacctgacgactctgatataaaattgtaatgtcttactagattaagcacgctatcttgatttcaaattactgtgcactcttttgctaaacaaagggtttactggaaagcgtgaataattaaaaattttcataattaaactcaaatcttaaatatataagtacaaaatatatctcgagatcatgtttacaaagttacattagttttacaaaatatataatttacataagttgttgcctaaagattgctaaaataaaacctataactgccctaaagatcaaacactccaggtgtaaccgccttcatatgtacaatcttcatctaccatgcgctcactatttttcagcctttttttgcctttatctacacatataaacaatatctgcaagtcaacgaacttagtaagaaaaacctaaacataaactagattataaccaggcgcacatacgacacccaat

SEQ ID NO: 235004 - DNA, 1289 bp, Cannabis indica
gatcgtcacataaattcgacagtattgtgcatcatgtcttcaaaaattgtggtcatttctctttggtaggttgcccctgcattcttgaggccaaatggcataactgtatagcaaaatatgccttttggtgtccgaaaagtagtgagctcttcatcctcgggtgccattttgatttggttgtacccagaaaatccatccatgaatgataaggcatcaaaaccactggtagcatctatcaataactcagtgatgggtagtgggaattcatcttttgggcaagcccgattaagatctcggtaatccacacatatgcggagtttcccattttcttcatcacaatgacgatgtttgcaagccaagtaggatattgaacctcccgaataaaccagcagtctcttaacttgtcagtttttgcctcgactttaggaagtaattctggtcgaatccttctttgagattgtttaacaggggtagcgtcttttgacaccgccaacctgtgcccaacaacctttcgattcaaccccggcatgtctcgatacaattaagcaaatacatttttgttctcacaaaggacttgtatgtactgtggtaactcttcttcagataataaagcactgacaaacacaggctttggatcatcttcggtctcgaggttgatctctattaaagcatccatagttgcttgtcctccatctttgaattcctgaggtgttggttgaaaaatgtctttaaaatcttcttaaggatttgagctcgagtcttcatcttctacggtcaaactttcttcataagagagctaattgacttgagcaaaattttcttcatcttcttgtgtttcatgcccctgaatagtaattctcaaagatttcttctatttttgcacccactgtttttgcttttttgttccctttgactgtggagcacttgggaaagcaagcctttcgaatgctgacactcatggggtggatgtgcttgcttcaagtctatcaaataccgacacctgcggggagagtgtaggaacatcgtcactgggaaacattttttgttcctcctctattaactcgtctggttcaaaagaagcttttaaacaatcattattttgatggattgtgacttcttttagcttcttgaaatgaaactttttcttctctgttttgaaggtttttggagttatagatgtggaggactttttattgagagtaataaaccttttattcttcttgctatctttaccaaaggatatttaaatttgcattttacccttgggtagtgactgatcgattttcctt

SEQ ID NO: 235005 - DNA, 842 bp, Cannabis indica
caatgtgggcactcatggtaagaataacccttgcatccacctctgtcctggttccctcgagaccttttgatctgtcccgaacctccatcgtaccatatcctaaagtaggaagagtagtggttccataaacacttagagtctctcaaggctcctgatgaaatttcactgcacttttagctcgtagagcctttcaactatctcaacataaatcgttgtatcatttgtagtgattaccctattatatttaatcttggcatttaaatctaccaagtatttctcttccttactgaaattcatagatactacactcgtaaccaacttggcttaacgatcatacttcgttgtgtagttagttaccgacatactctctagctgcctcgttataatacttagcattgaacagatcccgaatctctttccaggtcatagtagtgacgtctccggtgagaaataccaactctcaccacacaagagcatcctcctaaaactaaaacgtactgtaggtcacccgaacattcctggtgacacccataaagttcaagatcccctcaaacactatgagccgcagttcgactttcataacatctgagctttcccgaaaaactagaagtgtcagcttgcaaaacctcgtataaagattttataaagttaccaacaacaaattgttctgctggcaccactaaatttgagtagtcgatatctgcggtggtggcattgtagaaggaccctctgaatcttctatttcttgataattaattcggacttgcattcctgccaacctttgttcttagttttgaggtgctggtgatggattctcataaccacccctttgcaaccttcca

SEQ ID NO: 235006 - DNA, 888 bp, Cannabis indica
taatacttagcattgaacagatcccgaatctctttccaggtcatagtagtgacgtctccggtgagaaataccaactctcaccactcaagagcatcctcctataactaaaatgtactgcaggtcacccgaacattcctggtgacacccataaagttcaagatcccctcaaacactatgagccgcagttcgactttcataacatctgagctttcccgaaaaactagaagtgtcagcttgcaaaacctcgtataaagattttataaagttaccaacaacaaattgttctgctggcaccactaaatttgagcagtcgatatctgcggtggtggcattgtagaaggaccctctgaatcttctatttcttgataattaattcggacttgcattcctgccaaccttttgttcttagttttaaggagctggtgatggattctcataaccacccctttgcaaccttccataacccctgccgcatccacgagggttcaaatgattttgacttccctgaccgcctccagtctcgacctcatcatcttaaccttttcatttcgttggacgtccatacactaggacttagcccgcgaacccttacgtcaggccagtcggatagggatcaaatatattctatataccgcatttatggattttaaggcaatgcatccaaataaataattataaaatattatgcttttctaatcacatacattactaaacaagtaaaggcttactgaaccgtgagtcgagcttttctctgacgatgattgtacatgtcttgacgatctttggtagacaaacctagcgactctgataccaaaattacagcaccctgatatttaggcgagctacagtaattttctaattaatgtgtcacctttgctaatcaaatgg

SEQ ID NO: 235007 - DNA, 862 bp, Cannabis indica
catcctctttgcgagctctttttagaaatgatggttgggacacactctcaccgtgccatatccatttttggtaagtttggtctataccatttatgtataagtgtcctcttacatctacaacctttaatatttttaaatttcaacacttcatacatgagcaagatattatagtaggatcctattcgttttgtattaaaaaattcatgaaatagttaactccatcttcatactcttttgacaatctattctttttcattcgatctctatccatattaatttataattacctaaaataatttaatgctattacaagttaaaaattaaatcaaagtaatttttgttaaattattttagtacttataaatcttcaatattattaaaagttgggcagagtttcctctgtttctataacattttctaattttataagtacctatatcaacaaataacaaacacaataaacataattgaaaattggacagaatttcctttgtttctataatattttcaattttataagtacctatatcaacaaataaaaaacatgataaacagcacacaacaaatataattgaaaattggacaggattttctctatttctataatattttccactttcataagtacctattatacatacaaataacaaatatcacacaataagtttcttctttatatctctgcagcacacaaattttccagaacctacttcactacaacacacaagtttcaaccttccattatcaccgcaacacacacttaattttaaaacatacttcactatagatgaatatttaagatattcaaactcttcaaagatgaaaaatattatgtcatgaagtaaagaaatgagtgattgta

SEQ ID NO: 235008 - DNA, 752 bp, Cannabis indica
ccacagcagaaaataaactttgtaattaattttacttcaggagcgaaaccagtttccaaggcaccgtatagaatagctccagcagaacttaaagagctaaaggtacatttggaggggatgcatgacttaggtttacccaattaagtatatcaccctggggtgctctcgcgttgtttgtgaagaataaagatgggccacttcgtatatgtaaggctgagcataaaatccagaaaaccgaaaaaccgatcaagccgacctaccaaacaccactgaaaccgaaactgaaaaaaccgaaaaccgaaaaaactgacgacggttaaaatcgccattaaacggtcggtctttttttgggtactgaaccgaccattcaaaccgaaactgaccgactatcttatacatatatatatataactttcatatttaatttataatgcacactgcacagttataacatataatacactcagtacacataatataacaaaaaacaaaactcattgaccagtccactctttttctcattaaatgaaaaataaattgtacattttcccactctttcgtccaaaaccaaaatagtaaacataaataaataatgctatgttgccaaactgtgatcctaagaagccgagggctgcttgcaattattgtggtaccgattatgcagtaaatacaaagttgaatgggactagcacattatgggcacatgtggagagaaaatataaaaaaaaagtccttttagcgattgggtcgag

SEQ ID NO: 235009 - DNA, 1032 bp, Cannabis indica
caatctagagtgccatgtttcagcagtaacattgaaaatgacagtgtctttgaaggagggatcaagagtgtagagaccattcttggtttcacctctgccaatctccttcttgctgttcttgtcctgaacagaaaaattatcagccatgaactttatgtcaaggaatttattgcttgttagacaactcacagatattatattaaatttaaaactggggacataaagaacatcttctagaatgatgtctttagaaatggcaacagtacctattttatttgcaagaaggtaattattgttaggaagcataagtctaacaggataagagtcacaaacactttgaaacattttgatgtcatgacaaatatgccgagtggcacccgaatccaaaatccatgtactgctaatgggaatattaggcatacatgaaagaattatgctagatttacctgtcacattaccattctcattatttgtcataccagtttgttgtcccgcaagtaagttgagtagttgttggtactgaacagcactcaattgaggcaaaagagcttgattatcaccaggaggcttgttttcgttgctggtttgaaattggttgacagcagaatctttgttatttttgccatacccaggagggtatccatgaattttgtagcacttctcaatggtatgtccaagaatgttgcaatgagtgcaaaaaggcctattctttctaggaggtttatttccttgggtatctttcttattgctgctggttttatcaccttggaaagcaaaggcaagttgctggttttgttcagtattgctgctggtatggcccttctggttttcttcctgagtaactaagtggaagaccctgttaacttcgggtaaaggctccattaagagaatgctacttctgacttgggaaaaagaatcagatagccccataaggaaggacatgatgtattccatatggtggtgttcttgaaatttcttaacaccaccacaagtacatccattacaaacacaagtaggtctataattggacaa

SEQ ID NO: 235010 - DNA, 493 bp, Cannabis indica
tcctgcctacaattggcgcaggcaagagaagtacattattccaagctggagcttcaggtcaaacaaaccactaaagaggagcatgtttctgtctgatgagaaactctatttcgtcccaaaattgattacactcattagtgtcatgaccgtaattgttgtggtggcaataattttttcatgtccctcttcccttactctttgaagggaagaagtttgcgatacgacactattgactgtgttgccgtatagatctcctcttttagagccaagagaatagagtaagtgatacaacaaggctcataatctcataagggcttgcccccgatcctgggcttcattccaccaggggagttgactggcttaccaccattgttggctctctttcctctgttcaaacctcccttcttcccattgctctgtgcctcagtagcaggggcttcagtgtctggtgactttttcttgccaccctttgagcccttggctcgggtgatgg

SEQ ID NO: 235011 - DNA, 856 bp, Cannabis indica
ccaaaccgtggctcttttcccttaaaaatagagcagcatcacagttatcctttaactcacccatagactgtttaatccagagctcagcaccagccgagagctgaccagaagatgtcaagacaactccatttttaatctgagcaaactttcagagttcaaggtacgtaattgcagccgagactactctttctatagaagcaatcttcttgttccaaagcaagtcatttcgagctccccaaacaccccaaagaatcatagccattttatcaacactgtcacatggatgagtattgcagaaactctcaaaccagcaactaaatttgtcttctccatcgctaaaagaaaaccccagcccacgatccaaacaagctttagtgaaaggacatccaaccataatatgatatatatggtctctaactctccattacaaagaggacatatgctatacacattaacctgtttagattgaagagatacaagagttggaagacaattagtaagaaccctccaaagaaagttcttaacttttaggggaagttttaagtaccaaaacttcttccaaaaaccagagttatcttacaaattccatctcccgttacgcacttgcaaagctcgataatcactcttgacagagtaacctccataagctcaaatgcccaatactaggtgtccatatttggagttgaaggcagaggtatactacgaataagctccacatctctctttgagcaaacaagtcctccaaaagctcttcatcctagctcatattatcaagctatagaagattgaatacactacaggcatgaagagcctcatgagaagaaacgacataaaggttatgttggaaatattttac

SEQ ID NO: 235012 - DNA, 1205 bp, Cannabis indica
ggatataaccagatcaaaatgcacgtccattatcaagaacacacaagttttgtaaccaatatgggactttattgctataaggtcatgccttttggtctaaaaactactggggcaatgtatcaacgactagtgaacgagatgtttgaaaaatagattggacaaaatatggaagtctatgtcgatgacacgctggtaaattcggtaataagtgaagatcacacaagagacctcaaagaatgctttaggatagttaaaaatacaatatgaagcttaacccgaagaaatgctcttttaaggtctcctcaagaaaatgtcttggtttcatagtaactgcgagaggaattgaagccaacccagaaaaaattaaggccctaatcgagatgccttcaccaacgaagccgaaagaggtccaggccttaacaggaagaatggcagcattaaacaaattcatttcaaagtcaacagataaacgtctaccattctttaatgttttaagaggcaataagaagtttgaattgactaaataatgcagagtttaacataaagaaacatttatcaacacctctaattttggccaaaccaataactagagaaactttatacctttattagctgtctcagaaagtgcaatcagtacagccttggtgtgagaagaaggaaagcaccagtaacctctttactatgttagtaaaaggttactgggggaagagtcaagatatccccctcttgaaaaacttgccttatgcctgattcatgcatctcgcaaactacgactttatttctaggcacatcccataaaagttttaacagatcaaccattaagacaagctttatcaaaacccgatgctttgggatgattggtaaaatgatcaatcgagttgggacaatttgatataacctaccactcaagaacatcaatcaaaggccaagctttggccgattttctaattgaagggataacctcagaagaagacccactcgtcaagcacaacacagaaacttggaaattatatgtggatggggcttcgaatgagaatggctcgggtaggaggagtcataatgatgtcgcccaataacttcaaatttcactatgcattaagattcgaatttgatacctcaaacaataaaacgaagtatgaatctttgttggctggcttgagaatagccgaagcattaaaagtcaagaatcttatatgctatagtga

SEQ ID NO: 235013 - DNA, 1980 bp, Cannabis indica
cttgaattcagctcactagtttttagtactttgaaccatgaagatatggagcaacctaatccaagcctcaggagctgaaattatacaaatctgcaacccaaaagccaacatgggcacctagggtttcacttagctcccaggttgacatcctcaactagggttttagtttctgagaccgtcttggtgaaaaatggtcaaaacatgaccacaaatatatttgaggcatcagaattagaatcggagtaagttgacttttgagcactaggggcgcggggccactaacacctagcgcccaggttgacaatctatcaatctaggcaccttccaagtatcaaatcagatatataacttatgcatcttcttcatcttcatcaaaaacggagaaataggtcctttcggaggaaaaacaacaattcctgggtacaaataacagggccaccacccaagttgacacttggggttggccctgcgcccatgttgacattttgtcaacttggaccatttaaagtagagtttttcaagaattctttcgagcatcttcttcgtcttcagaaaatattgagattcaattattttcaaggaccaaacagaatttttagaggggcagaatagggacccagcccgcaggttgacacttagggttggaaaagcgcccaggttgacatattgttaacctgtggtgttttcgatcaagttcggcaaaaattattttaggaatttttggccccctagagaaaaattcaattcttttggctcattaaccttcttagggccctaaaacagtgcagtaactctagctgcttgagttgaactcccaataacttctctgaattgtgatatcccctacatttaagtaatcctcttaccaataaataaacacgaaacttggaaatttggaaactaaaatgaaagtacagtaccctaatatgaatgcatataagatagaacaacagagaaacaacatcatggtattttacaacgatatgattgaaccccaaaacgtgtaatactaaaattcaggaagctattcacaacgattcgagtattggtatttccaataaaactatataggtcataggaatcatgaagaacaacaaacatgtaggatgtttatttggtgtgatgctaagctggtatttgtgggttcagagttctcattcagtcccactaccagtctaccacacacagagtgagaggagggccaagaagtggcaatgagctgctgcaatccttcgccatttttcggcaaattccgaaccccttttcattctgtacgctctctcactctacatttcctataatataatgtgtcttatatatttgcatccatttagggtactatactttcattttagtttccaaatttccaagttttatatttatttattggtaagaggattgcttaaatgtagggaatatcacaattcagagaagttattgggagttcaactcaagcatctagagttactgcactgttttggggtcctaagaaggttgctgagttaaaagaattgaatttttctctagggagttatggcaatatgcttggcgaatacattctaacaaccaatatacaaaaatgaacctcgaatacaaggtaagaaactaaaacaataaaatgtcatgaatcttaaaaagaaccaaatcaaaacaaatcaaaaaacccacaaacacatgataataaaaaaaaaataatatatatatatataactaaaaagtaacttatcaacatataaaatcaaaacaacaacacatattgacaatcaaaatgaaaaaataaaataaaaaatcattgaccttaaccttagaaggcatcacaaccttattttcatcctcgaattctaaatgtcctctatcaaactcttcatctttagcttctttacgacatcaggagatacatcaagaacacgaattttttttcttcaatacaaaactcaccgaacattttttcacattatcaacacctttgtcattcatttt

SEQ ID NO: 235014 - DNA, 1901 bp, Cannabis indica
aagataaccaattaagcaaaaaagatagatttttgccattttcaagttcaaaatctactaatatctaaaattaattaatttcaaactgataattagatttgagatttgaaaaataataatctacattcaaaattttgaggtaaattttggatccctatccaatataatgaacttctgagccccatgtaaccacactatttccttaacatataatgatgtgtattgatccactgtaaaggttattttcacttgtacaaaatgtgtgaatcatacatcctatggttcttagtaacctaaccacaacatccatggtgacatcctcccatttccactcaggaagagttagaggctgcaacaatcctgcaggtctctggtgttcaaccttaatctattgacaagtcaagcaccgggatacaaattctaccacatctttcttcatctcgcaccattagtagaagggttttaaatcttgatacattttggtagtgctaggatgtaatgaataaggagtggtatgagcttcctcgagaatctcattttcaagctctacactgttttgaacagcagcattccattacctgacactgtaaagtctttagcttgactagctaaaaccacttctcgaatcttcaccaattctaaatcagttaactgagccactttaattgtgtctaacatatcaaattgcaatgtcaaattattaagtttgcctacaacaaactcaatgcataatctgactgtttcatctgctaggtgggtgaaatcataatcatattggttacttgcccgggaccctttctactcagggcatctgccactacattagctttcctgggatggtaagggatttcacaatcataatccttgaccaactctaactaccacctttgcctcatttttaaatctttcagagtaaagaaatatttgaggctcttgtgatcggtgtagatctcacacttttctctgtagagataatgccgccaaatcttcaaagcaaatactaccgcggtaagttctaaatcgtgaattaggtatcgctattcatactcctttaactaacgagaggcataagcgataacctgatcagcttgcatcaaaacacgtcccagaccctatctggatgaatcacagtaaaccatgaacttctcattatcaaatggtagggccaataccggatctgtgatcaaccactactttagctcttgaagcttacttcacacttgtctgtccacagaaaccgctgattcttttaggttagttctgttaagggtgttgagatgttagaaaatcctttaacaaattgacaataataaccagccatacccaaaaaacttctaatttctatgaccatctttggtctcagccaatccctgactgattcaatcttccctggatcaaccttgttcccgtctttactgacaatgtgtccgagaaaggacttttaagatagtcaaaattcacactttttaaacttggcatacattttatgttcttgtaatcgctgcagaaccatttgaagatgttgctcatgctctgcttctgattaagaggacacaaggatgtcgtcgataaatactataatacatatattgaggaaatccttgaatactctattcatcagatccataaaagctattggagtgttagttagtctaaaagagataaccaaaaattcgtagtgcccatacctagtgcggaaatcaatctttggaatgtcctcctctcgaattctcaactgatgatagcccgattagagatcaaatcttagaaaagagctatcttttcctgaagctgatcgaacaaatcattgaacctaggtaaaggatacttattcttgatagccaattatttagttcccggtacggtcaatgcacatgcgtaggcgatctgtattccttctt

SEQ ID NO: 235015 - DNA, 664 bp, Cannabis indica
tttatgtagttttcttgttgtttttgtgttactacaattgaaaaccgtaaaaatgtaatttttttacaaaatgtaatttttacattgtattttatgtaaaaatcttcaaatgtaaaaatgtaatttttttacaaaaaaatttattttatataattatttattttaaaaatactaatttttcacacctttgtaccttatttttgccacttattatttcttttatcttttgtgtcatagaagctattttcaactccaaacaaatataaaattaaatttattcaaaatattgtcaatataaaaatatattttattaattccattaaaatattacataaaatttaatgtattttttttttaaaaaaaatggcaataaacttcatttaaatggccaaatcagccattactgttagaatttaggataagatgaatgaagttccatctcaaaactaattggaaagagtagctcattcattttatatataatattatcttttcacatattagcaatgtgagactctctaacatcccctctcaagatggtagttattttatttacttaccatcttggacaactcgattgtaaacgactcttttttggttcaactctttttttgactctacttcgatcgattttatttttgggtcagatagtcattagagggtt

SEQ ID NO: 235016 - DNA, 945 bp, Cannabis indica
tttgttttttaattttttaatcacaaaaataaaaacaaaaattttgtttttaaaattttgtttttgaaaaaacaaaaatgtgttctgtaaccacttttgtttctcaattttaaaaataaaaaataaaaatatgttctataaccacttttgtttgtcaattttaaaaataaaaaacatgaattttgatgtgtttttgttaaaaaaacaaatagcagttcaatcacatctcaagtatcaagcataatgccaatttcttgctccatcccctaaaccaaccaatctggaaacaaccaattaaaaaatcaatatcttagagagaaacaatgattctgtacataacaaaaacaatgatctatatgaaaagagttggagttgatgagtatcacatgtcatttggcaattcaatattctgggattcaaatatttggtgagatctcttccattgaaaccttccatagagcaaaattaattattctagatactattttttcacttagaaatctttcacagcccaaagtttttagaattttctaaccacaaagtcattggacaagatgcggcctttgttctccccgctcaggcagtcagtcaccaaaccattttcgtataaggccaccatcacattggcgccttggctgctggcctatgtcctcaacgcacctgttagagagagtagttaggtgtctgcatgcctttggaaattcatatgagcaatcctagaatttataaatagtaattaggctatagttttcttacaaaacaaaacaaaaataaactgggtataacatgattttatagcatcatcatgtgctttaattgactttaaacacttcaaatcgattaccctcaaaactttcaaagtcttatccaatgaacctcaataaataaacccattacagattgccaaacaagatttactatcaacatgttcaatccataattttt

SEQ ID NO: 235017 - DNA, 1477 bp, Cannabis indica
aaataatccttatgaaggagccaatcatcgtcctggaaaagagccattgagtccccaaggatcatttgacttatgatttgaacacgccactagctccgcgaaaacccaagatttgggaaacagacttgaagggcctaagataagcaacgaccgatctcttcctaatctagttgatgaggatggcgcttacgatgcaacgaggtacataccaatcgttgaattagaaaactgccatctcatgcgccaattggaggaagcaaaccagcgtaatattgaattagagcgagagatagctgcagtcagggtggcacaggagaatagggggcaggaaacagcccaaaggtatccctataacgctcaggatagacttgtgcattaacgagaaaccatgtaacttcatgtgtacaagacgaggtactgacctcgttatgtggaggggatataatgacagtaaaaacacttagcgtataatttatagtatacaaactaagtatagctgacgggtgaaccaaattaagcaactgatagcgaggtgtcaaccttgctacaagaagacatgctcatgttaaagatcacctcaccactaaaagttgcgattgtcaaagagggtgttaggtttccagagtaaaagcaatgagatttgcattatcaacattggaaaggaatatgacaagctccagctcgctatcaaggttgcctctgctcagttcgcagcgagacattccacaacaatacagtttataacgtatataatacacgtttattttgacctagtaaaagcgagctattcacaactgtgtaatattcaaataatagcttgctccaggcacttctttagtgtatcttcaagattttggttaatagtttccacttgcccatttgcttgtggttaagcgactgctcagaaactcttaatgattttgtgtctttcacagaaattagtaaagaggtctctataaaactatgtgttgttgtttgacactatctgaaagttcatagcgacaaatgatattctttactacgaagtcgagaaatttcttttatgttatggtggtcaagggctctgttttggtatatttaatttgtgaaataatccactgccactatcgtgtattggacttcgccttttccattaggcagggaacctatgagatcgattcacttgataacaaatgaccaagaagtctacatgctctttagctcagttggggcagctcttggtattttggagaatctttggcacttgtcaaatcttttgacatagtccattgaatctttgatcattgctgcacaaaagtaccctttcctcagtatcttctttgagaggttattcccccaatgtggttgtcagtaaaaccatcttatactttttgagtattttttcatcttctcactactacaaaaattatatttggcaacacctaatcaacaacacttaataaaaaagtgttctgaatttatttctttatatagttga

SEQ ID NO: 235018 - DNA, 868 bp, Cannabis indica
tgggggaaggagtttaccgggaattttaaagaacgaataagccaatgtaaaatggttattcgaagattgaagaagagaaaggatgaggattcggttaagttacataaggagaagcaagaggagttgtttgaaattttagcgcaaagagaaatttattggaagcaaagatcaaagcagttttggcttcgctctggggatacgaatagcaaatattttcataaccttgctagctcgaggaagaggcaaaatcacattcagcgactccaaagagaagatggggtgtgggtggactgggaggtagggttaggcggggtgatggtggattattttaatagattgtttgaggcttccaatgttgatattagcagtgttctacaagaagtgcaaccctctatcaaagaatatcaaaatgcaatgcttctcggtatggttgaggaggaagaggttcgtgtggcactttttcaaatgcatcctgacaaatctcctggtccggatgggatgagtccggggttttatcaaaaatattgggatattgtggggagagatgtgattcggcttgttcgggattttatggaaatgggggtgcttccattcggtttaaatgatactaatctcgtgttgattccgaaaaagggtagcccttgtaatatgggggagctgaggcctatttctttatgtaatgtggtttataaggtcctttcaaaagttttggctaaccgtctaaagaaggttcttgatcaagttgtttctgatttcgaaagtgcgtttatccccggaagacttatctcggataacataatggtctcttttgaagtcatgcattacttgaaaaggaaaacgagtggcaagcaaggttatatggcgttaa

SEQ ID NO: 235019 - DNA, 1907 bp, Cannabis indica
ctgactggaaatccaagctcccttcgatgacctcccgagactacggtctcgttcgagtgccgcatcacagtcccgtatccattccaattttatttttcgttggagttatatatgcccactcgacttctcttttttttgtccaacctgatgcctgaacttcgaggcgctcggctgcagcgagtgcggaagcccagtccttcacttattggcacgcttattttttttaaaaaaaccgagcgcaactttccatccgaggcgaaaagtaggactttaattagcctccttttccccaacctatacaaggtgctgctttctgctcgcccctatctctaaaggccgatctgtgccttgatctctggccatgaatcaaagattcctcctggcggccgtcgggcggcacgggaattgaaactatacgagatttttgttttcagtgattcacaactaaaggtaaatcagaataatggagatttccgggcgcgggatgaacaggctcgatagacctagttctctcctcctgcctaagcgaacagggaaaaagaaaagggtcggtctattcagtcttattagtcccaatcattctccccatggcctcttagtcttgatactgaatgggaggcccatgctagctccatgcgtgcctttttcaatggctgatgttcgataatagtttgtgccgactcattttcagtagtagctagtattgtttataatcttctcaaatctggtctggcctgtagttcattattgaatgttttcggcttttcaaccgcttcctcccgattacgaaggagaaagaaaagaatcgtcgttgttaccggagctgctaatgacaaatccatactctttcgacctccaaccaccatgatgatggagctgtcacctctttatggtgtgccgagctacacggatgaacatgccagctctattcccgactcgaaatccataaaggactttgagggagaacaactctctctatctcagctgctttccctactaaaatgactaagtccaaagattccagaggaggtagctcgaacaggcctgaacaggtgaagggcggaaccgagctaatcagaagcgggtctaaacaggttaaggcccctgctccacctccattgctgaacccggagaccaaaagaggtagagaaatgctcacccattatatgaatcggtcggtccctgaggtgaatgagcaactagctggagcggacgacgacctgtctttggagttagttatgggaggaatcctgaaggagctttggagggtaagtcttttttgacaatttccttttgtccttctttaattagttcaaattttaatgtcctctctctgtatagactggcctgaagatggcttatgcttaatcctgagctaagtcggctgctgttaagaaccttgccatttccaacacaatgtggacggaagtggacttggccaagaaggacgtcgaggaggcccgggttcaacttggggctatccggatagagcagggagaggttaataagaacctcctggctgaactgacgaaggagctacaggacacgccatctaccgagcagctcgaagccgatattgcctctttatctaaggaagtgaccagccctcaagaggaaagagagggtctccgaaccctttttcgcaggttggaggaagagaagagagccagggaggaggagcttggcgccgaagttgagaagcataagttggaggctgagcaacagaggttcgaagtggcgaggctcggagggaaggtgaatgccctagagacaactagtctcgagattttttatgacttttggatggccaaccccaaggcaaattttgattacctaggcgattccaaagacatgtttctcgactattgtgctgctccggccgcttacggggaatccgaggcgaccac

SEQ ID NO: 235020 - DNA, 1352 bp, Cannabis indica
atgacagcttttcgtacaactttagatcaatgctctttgaatgaattaccttacttaggtgatgatttcacatggactcgaagtaaaaagaaccctgctgcactaaaagaacgaatcgactggtgttttgtgaacacagtttggcagacttcactctctttgcctacggtttcacaccttgattattatggctcggaccatagagcggtcttggtggatatcaaattttctcatcaaaatcagcctgagaaaagacgatcgcgatttcgtttcgaaaaaatttggttgaatgatgcagaatctgctgccatcatttctgcaaactggaataaaactgctggttcttcgagagatattttccaacagcttgctgatagtcttcaaatgtgttcgaacaatttacagcaatggcataatggcaaatatgggcatatgaaacaacatatcaaggaggcgcaagctcgagttgaacatttaaataattgtgttgtacctgactcaaatttctcacaagaagttcaatctgctgaagccattttagatgagcttttagccaatgaagagcaatactggcagcagcgatcacgagtggattggcttaagtcgggggatcgtaataccaaattctttcatgctaaagcttcctctcggaaatctaataaccgaattaccaaattgcaagatgaaaatggacaatatgtgtactctagtgatgatattgcctcggttattacacaatacttcacttctcttttcaaagcttcaaatgaagaccattgggcactctctcatgtcctttcaacaatccctactactgtcacagatgcaaacaatgattttcttcttcaagaattcacaccagatgatgttactagagctttgaaaacaatgggtgcagacaagagtccaggaattgatggcttttctgctatgttctatcatcacaactgggatatagttggtcctttggtgactgaagtcgtgctaaatgtcttaaattgtggtggtagtccagctgggataaataaaactctcatcactctcattccaaagattaagaagccaaacactatgaaagactttcggcctataagtctttgcaatgtagtgtacaaactgatttccaagatgttggcactcagattgaaacatattctcccactggtcatttctgaaactcagagtgcttttctaccgaacagattgattacagacaatgtcttagtggcctttgagatggttcatagcttgaagaatcgtaaaagaggttccaaagggtatgctgctttaaaacttgacatgagtaaagcctttgatcgagtggaatggtcttacttggctgcggtaatggg

SEQ ID NO: 235021 - DNA, 719 bp, Cannabis indica
actaattgaataagtaaccaaaagttagctaatacataattttgtgtttagttgaaagtttgtttcttttatctcttaataaaatattaaagtaactaaaatgtagcttttgattacggtaatctttatcggtgaagataatgttgtttttgattctcaaatagattttgaaggtaatttaaatgttattaaaaagaataacttaaattatcttaaacaacaatccaacataatattacttaaatggaaactttttttaatatagttaattacatgttttttaactttaagatatcaattagtttcattaattaggatatatttttataataacatgtaattaccatattgaatattgtttaaatttaaaatttagttacttttttataaataaaatataaaagaaactatgaggttattttttataatggttacatttttttgtaacaataaaaaaatatgtgttctcacgtattaaaatgatcaccttaaaaaatagattacaatgatattatttttaaactataatgatcaagggagttgataagggtgtgatcagaaaagagttttgaaataatagataagagagaaaaaaagaaaaaataaataattgaaaaaatagaaacaaaaagccctattgtagaaaaaaatcgctcatagattttttacatgaaaaaagaaataactgtacacataaatatatatatatagagagattt

SEQ ID NO: 235022 - DNA, 1327 bp, Cannabis indica
ttttttaaagctaatactattttttatttaaaatatattgattaataatttataattcaaaaaaaaaattttaaaaaaaatattagaggcggactggcccgccgctaataatagtgtcagtttacgaatctgagattataattagcgggcgggtgtgtctgtccgctgctaatacatgttattagcgaccgggtattaccggcagctaatagcggcggagcccgccgctattaacctttaccggcggattttgctattattagcggcggaaggctccgcccctaataatgataaatgttgtagtgtgagctgaacatcatgcatctgatcttattcaacagtgttctgttcattatctcagctaccccattttgttgaggagtgatcctcactgttctgtgtctttgtataccatggttcctacaaaattcatcaaactctccactacaaaactcaagactattatcagttcttaaggctttgatcttcctttctgttaaattttctattaacagtttccattgtttaaatttttctaaagcttgatttttggttttcaataaaaacacccaaacttttctagagaaatcatcaacaatagagagaaagtaagagttacccccatgtgtagacactttttctggcccccacaaatctgcatggatgtaatccaaaattcctttggaacaatgcttgccaacactaaaactcaacctgtgttgttttcccaaaatgcagctttcacagaaatcaaccttgctgattttgtccttcccaagcaggccttgatcatggattactttgagtcccttctcactaatatgcccaagccttctatgccataatatggcattagaatgttcattgcttgttgccattgatacatctccagtcactgtgttagagtccatgcctcttttctccttttataaccaccattgaacctttgcttatcttcattatactagactcaatcttgtttgaataacctgcatcatcaagagttccaacagagattagatttttagttagattaggcacatacctcacatctttaagaatttgaattgccccatcaaacatcttgaaatgagcatttcctttgccttccacatcacatgtgttgctgtctccaagaactacttttccaccacttgttgtcctgaaatttctaagtaattgcttgttgtatgtcatgtgaaatgtacatccagaatccaagatccaattttcactttgaatgtgagaagcagctagcagtacttctccagaatcatatccatcaccatagtttgctgaatcttgggattcaaatttgttgttggag

SEQ ID NO: 235023 - DNA, 828 bp, Cannabis indica
gttaagaccttgttggtgagtcaagagtatttttgtaattttgacccgagaaaggtaaaactataattttaatgttatagcgtgcttatagactatattattatataatatatttgttttgtccttctgcaggtattttctgacaagtcggcgcggtatagtcacaatcgggtatttcgggtcgaaccggatttggggccgaaatacattttcgggactttattttggcattttattattagttgaataatcaaaaatttattggagtgtggaaagtgattaaatgacaattttacccttgaatgcatgcttatgtgatttattggccctaggggcattttagtcttttgaccagttaattaattatcaaaaaaaggaatttttacaaaaatttagaaaccaattttttggttatttccaaccctaaccgaacacacctctctctccctttctcaatttttcctcactttgcttttctcttcaagttgaatttggtgtttgtgcttggagctttggattgtggtgcttgcttttgtgaggagcttgaggtagtttttctaccacatttatcttgattttagttgctaaaatttcaagttgaaaagcatgttttaggctgttagtgttcttgagatgcatgtgtgtgtgaattggtttaattttgatgttgtgtgcttgattgtgttgataattagtggatattgtttttgggtatgttttagagagaattttagggttgtgttagtgtttaaaatctgatttttgctctaaatttattgttgttttcaagcttaagtttatggctttggtgatcaagcttttgaatgg

SEQ ID NO: 235024 - DNA, 1086 bp, Cannabis indica
attccattccattcctattcccattcctattcctatattttcattcctcccaaccaaacccctccttagttatctttatactttgaactaattgtaattgtagctgtcatacatgaataatctaccaacataatgatatattatgagtttttggcttataagattttattatgccatagcatctctaatagaggtgtaaataagtggtgaaaggttaaaatatagctcatttaacaaaaagtgtactctaataatgtaaccaaaaagtaatataaatttggcacatagcaaattttgtgctaaatttggcacaacatttgttatgatgtaaaatttacaccacaataaatgcactactttttcatttgcatttatattatttttattattttattagtatatttaactatcacattaaattattcaaacatttatattatttcttattgtcttacatattaaaataataataaaattaattataaagttatgagattttatattttttaatgaaacatcaattagatattaaattttacattaaaatattacaattgtgcattggagcacaaagctaaaatttagtataaatttactacaaaattatttttgtgccaaatataatacaatttttacatatctcattggagatggtgagaatgtaatttgtctttgtatataccgtaaagagcatggttgattttaatgttttttttttaaaaatatatattatttcccctcttaaaaaaaattacggcagatgtgaaaaaaattgtccaaattgaccactaagtatgagatattttaacagttaaatctgttaagattggttaaatattcaccaaataataacttatctcgatggttattaagtgtcaagattggttaaatatatgaccaaatattatcctatctcgactattcttttcaaaaccgtcaagattgagtaagcaatcttggtggtttgcagccgtcaagaaactcagaaataatactaacttataaagtatgtacattttaactataaaatcacgtaaaatttttaattttattattattattcaaagatataaataaatatattat

SEQ ID NO: 235025 - DNA, 1137 bp, Cannabis indica
aaaaaaaattataaatttgtatactttttaattattttaaagttttttccttgtaattcctcctaaatattgaataggctaatttagatttttgacccctgaattacgtaccaaatcacgctcagaactatcgagattgttagatttaaagattttggtctaattttactaaacaaattctaacgtggatgaaatacccctaattaggataggcgtgtaagatttactccacattatgccgataggtcttgataaataaagatcgagtaagtttgaaagcatatcatcatagagaattacagttatttgagcaatccacagagtagccagtttttgctacctgatcagaccgtacgatcgttttgaaatacccctaattaggataagcgtgtaagatttactccacactgtaccggtaggtcttgatctataacaactgagtaagttttaaagcatatcgtcatagagaattacagttatttaagcgatctaccgagtagctagtttttgctacctgatttgactgtacgatcgttcaaaaataccccctaattaggataggcgtgtaagatttactccacattatgccggtagatcttgatctataacgatcacgagtaagtttgagagcatatcgtcaaagagaattacagttatttcagcaattcactgagtagctagtttttgccacctgatccgcccgtacgattgttcaaacccctaattaggataggcatgtaaaatttactccatattgtgccaataggtcttgatctataacaatcgagtatgtttaaaagcatatcgtcatagagaattacagttatttgagtgttccccgaatagctagtttttgctacctgatcggaccgtacaatcgttctaaaataccctttaattatgataggtgcttaagattttctccatattgcgtttgtaggtcttgatctataaccatcgagtaagtttgaaagcatagcgtcatagagaactacagttatttgagcgatccagcgagtagctagtttcagcgctagttgcaataggggtttctatacgattttttgttacaatttaggttgcatcgctagttgcaataagaatttctatataaaattcagtaaaaatgacaaaaaa

SEQ ID NO: 235026 - DNA, 1132 bp, Cannabis indica
tcatatatttgttattataaatcatttatcgcttataaaatagactcattgtcgttggctaaaagcgaagtcaacaatcttgatccttcctttgaagtgctcttggcaactcatttgtaacacccaagatgtttttcattaaatgtagaataaatataaaatcaaagggttgcatcaattccatcaaattaattgcttcagatctttaatcacttgatccatcctcaacaactgtttctagaactttaatagtagatgaaaaaatagtaatcaagctaattaatgtaccatagtgggaatcccaacgtgtgtctcagagcgtttgagggaagtattttgatttaaaccacgtgctctagaaatctcatcattttgaagtgtttcaaaaattattttagcttgattatcttgaagaatatcacaatgcttagatgacccactaactacattcatcacactagaagttaagaaaaccagaagatcaatctaaatatgttttttagccacagctacaagagctaattgaagttgatgagcaaagcaatgaatgtaaaaagcacaagaattttccttcaaaattagtgcttttagaccattgaactccttgcatattacttgctccatcataaccttgtcttcttatcattgagataatcaacccatatcttgaaaatagtttatcaatcgcagccttaagagtcaaagttgtggtggtagaaacatgttcaatgacattgaatcgttcaataagatgtccattcttatccacataatgcaacacaatagccatttgctccttggttgagttatcacgagattgatcaatcaaaatagagaaaaaagaatctctaatatcttttataataatattcatagtttcaactgcagcagcattaatgatatcaaactgaatgtcaggtgatgttaattttagattttcaggggcattcttcaatgtagcaattctaacatcatcattaaaataagctgcgaaccgtaaaagttctaagaagttaccttaatttatggagtttacagattcatcatgtccacgaaatgcaagtccttgccgtaaaagaaattgtacagaagctattgatgcatccaaccgagttcgatattcttttttgac

SEQ ID NO: 235027 - DNA, 1055 bp, Cannabis indica
agatgttgcctgggatgtcgacttggtacatgacttgtttaatgattgggatgctaatttaatccttagtattccgttatcttcaagtcgagaaagagatgtgcggttctgctgtttggaaaaaacagggcatttttcagttaaatcaacatacaagctattacaaatgcaaaaggaggcagaggctcaaccgaataactctgatttttggaattacatttggaaggtgcatgttcctcccaaagtaaaagatcttgtgtggcgtgcggcttcagattgtcttcctacaaaaaatgcgactgagatctcggcatgtgcaggttgataattattgcccaaggtgtgttcctcatcctgaaactccatattattgcttggtggagtgtcattttgctagtagctgctgggagcattctggaattaagaagaatattcaggggctatcttcttttacagggtggctggaggcaatgttcaaacaagtggagaaagctaaaagaaatgacattgctgtcttgtgttgggcgttatggaaaaccaggaatgaactggtgtggtctgataagtagtcgaaagctgctagtgtatcaatgctggctcaaactactctatctaactggtttaatgctcataataagttactggtccctacaacaacttttttaatagaggaagatggttgggagacttggcaaaggcctgcagctactaaacttaaaataaatgttgatgctgcaacttttgacaacaacggtacatttagttttgtgtgtgtggctagagatgctaattgtagtttggtggaagcaatcactaggtgtcagacaaggaatacgacacttgaattggccgaggcaatgggggttagggaggctataagctagataaaatagaaggcttggtatggaacagtggttgaaactgattgtctctccgtggtacaagcaatccgtaataatcttcctttcttatcatattttgggagtattatttccgattgtaaattgtttttagaacaaatgcgtgatgtttttgttaattttattagacggtct

SEQ ID NO: 235028 - DNA, 3605 bp, Cannabis indica
tgagagagtaccccagaaaaatacatttttcagatctgaaccccattttatgattgctatatggtcggagataagggaaacaagcacatccaaacggttttagaaacttgtaatcaggtgctttatgaaataagcattcaaatggtgaaatgtctcctataatagatgtaggcatgcgattaatgacatatgtggctgtggaaaatgcatgccaccaatatgacaagtcaagattggcttgagcaagtagtgtcaagccggtttcagtaatgtgacgatgctttctttcagcacgtccattttgttcatgatcatgtgggcaagggttctgaaagtgaatcccatgttggttaagaaatgtggccaaagacctatattcacctccccaatcagattggacacacttaatgggtaagttaaattgtttttcagcaagcaacttaaattgaaggaaggtaggataagcttgagattttgtggtaagggggaaaatccatgtgtacctactaaaatcgtctaagaaatggatgtaatatctatacccatctttcaagggtgtgtgggatggcccccataaatcagtgtgtaccaattcgaggggctgatttgctctagattcagataaggaataaggtaatcgatgactctttccttgtttgcaagcctcacaaaattgtaagtcttttaagtttggtgggatatccagttgagttaaaacttttgcaagaattcttggggcagggtgtcccaatttcatatgccacaaattaatattagttttctgtgaagtaaaaacttgattgtgagaagaagagggttgacaagaattatttttatttatgaaagagtcattacaaaggggaatagctgctatagcagctatttgattacaattgatatctgatgctgaattaaaactactagcaggtgctataggaggcctaggtgaggaagtggcaatctgacattgaagtgggacatctggtatggcaaaggaacgatgagaaagagtgtatagaccattcttaaccctttccttgagcaaaacagtccctgtggccttgtccttgacaaaacaacatgtagagtgaaattctaagaatacatggttatctttagtgagttgaagaacactaactagattcttagttatgctagggactttaagaacagattgtaattttaaaggaagattggaggagggtagagatgtattaccaacatgagatatagcaagtttcttgccattgcctactgtgacaccatctgttccattgtaagggccttcagactccaagttttccattccttgtgccacatgattggttgcgccagtatctgcataccaatcataatcgtcaagaaattctggcatagagttggaagaatatgcttgaggaggatcatgatcctcaatttcagtgaggaaagcctttgattcaccaactgtaggggtgacaaaattcttgtcaaacctatagtggcaaacagctgcggtgtgacctggtttgtggcaaacttgacatagcaatcggggaattgaagaggagccaaatcttggatttctgggagggagtctgttgaagtggctgtaagatccccgattctgagatgggtaatggcgatttggggcaccagacgtatttcttgagctattaacgctgagattagcagtaatctttgaagaaagatcagtgacattgaagtgtcgttcgagtctgctttcatgagttagcaataatgattgtatagactcaaaagaaagattatcaactaaacttgtgacatgaaccaccactggatcatattcaggtcccaagccattgagtaaatgcattattagatcactttcatccataggatgaccagcagtagataacgaatcagccaacaatttaactttatcatagtaatcagatatggaaagattacccttttgtattgtggataactgagacttgatctgaaggagacgggctttagattgactggaaaagcgttgagccagggcacgccaagcatcataagacgattcatggtgagccaaagaaccaagaattgtctctgtcattgaggagcgtagccaactaaggagtagttggtcttttcttttctagacagtgaactcgagattgatttcgccggagacgagtcgagaaacaggggcaacaccggtgagtaaaatgtcgtcgagtccatggccgatgacagtgggaatgacctgagatttccacgcgaggtagttcgttcgatcaagacgaactgtaagagatgaattgagtgagttttggaacggattccattgatacagagtagcagtgggtgcttgagtagtggcggaaggagtagcagtgggtgcttgagtagtggcggaaggagtagcagaggtgggttctgggtgtcgaggatccattatcggcgcgagtcaatggcttcctgataccatgaaagagaagcttatcaatacaattcctaactggaacaacaaagattggacacaaagaattgtaaaagctctgcaaaacaaagagctgaaccttttcattatatagcagtaagaatgatacagaaggttcaaaaccagaaaataacaaactctgttgaacagagtacaagtggcaagaaaagaaataactaattctttaacaagaaaaccaataacagaaagctgaaaaactgttatttatcaaaacacatccttattaattaccttcttcaacattttatgcatctttaaatatgtaaagagaaacaagagtggttggctaatgttggtgaaatggaagtttaacccaacataatgatgggtttaagctttctaatattagtgaaatcaaatcttttaaatttagattttgttatgaaaaagaggagaacaaagaaagacaatccaatcacacaaatgaagatggcaagagctttggaaagtgacaatactgcataggtgccagtaacaaatgctatcatcatgaatcccaaggccaatattgttaaattcatagacatgttgtagttagatacaaactccttatttgcacgttcatcaccagaagatgctatagtaagcaagaggttgataaaaacagccgtaatagaaaggaccaaggctattgcgtctgtcaccatgaaggcttgaaatgctgcattattcctaagaacagcactaccttgttgttgtccatgtccaaccttattatcgtcgcttatgtaacctcccggtaatgtaagtcctgctgtgaatgtcaccgtcgcaatcaatgcagccgcaaccaaagtagactctctgtagtttgcgattctagtccttaatttttctttttgctcaagctttctcttctcagtatccgtcaatatttgtttgtcgtctttgaaaaatgactttctcaaacagctctttattgtggggttttctttgaaagatttttgataattctctctgtcatataacaacagtagaatttttatctaagaatactgttgacaccaactaaataaaatcgaacatgaagaaaaaaaaaatcaacttattaattgaaattaaattaccttgttgaattcatggtaatgaacattatagagatcatgggctatgtcatgaatatttt

SEQ ID NO: 235029 - DNA, 1206 bp, Cannabis indica
atatttatattattaacaaacaacatcaaccaagtttcttataaaccacaatttttctacaagtgataaaaacataatttaaaaatattataaattattttaatcaaatgcatatagatttatactataggaaaaataattaaaaatatataaaaaataaaattttatataacatatttttttatatatatatttgtgattataaaatactagattataatattatcattattatgatagaatcttaacagctcgcaacattataaaatttttaatttaccaaacactcaacttaattttttttcatagttctgctacaattgattttttctcacaatacaactacaactgtttttctccgtaatacagttgttacaaactggccctatatgcttttcattgggtaggggctccgtacccttctcatacgtaaaataaaaattgttaataacaaatttggtatgccaattatcatcgaatcccaatttgtttaagtacttctgcaaaaacatccaattttttttttttaaaattaattaccactactaaatgtctaagtgggactacacagtgtacaccataacggatgaagaaaacatacactaaaggaaaactatgaagaacttttttaggagatcaaacaagtaataatattaaataatttaaaattaaaaaataatcaatccacaataactagttgaattggatttgagctattttacagattgtattggatctaaaatataaaattcgcatttaatgcggattgaatgcagtataaacaaaaatagtgcagattaattgccaacactttataatatgttgcatgcataatgtttttcttttattatatacttgagcaacaagttatttaaatccatattttgatgcactaaataatttggtacctcgatcaaaaacaacacaattaaaatagtgcaatgaaagaattagaacaaattaagtaaactaacactaatgatgatgaactgaattaataaacaaagcaatgaacatttaaacacatcaacacatgaacattacgaggtttgatgcctatcccttggctagaacagcccaataactttggagcttcattgagctatgaacagagttggcttacaagttgattctcttaatgccattacaaccctccatctctttcttttctctctcaaaagctcactaaacctctctaagattctc

SEQ ID NO: 235030 - DNA, 1274 bp, Cannabis indica
gagggagaataatcattgcttggaatccgcttcttttcaatactagtatcatcaaatgtaatagtcaattgatacatcttcatgttgaaatggtaaataaaaggtataagttctttaccacctttgtttatggtttcaatgatgaaaatgggaggaagattctatggaatgatttacgtagtattgctatttaggaaccatggatagtatttggtgattttaatgatattctctacaaagaagaaagaattggggatagagctaagattggcacttccacgacttttttagactgtgtgagtgacagtcaattatcagatgtaaagagtgactgtcaattatcagatgtaaagagtagtggttgtttctttacctagaataataaacatcaatcaaaagatcgaatctattccaagattgatagagttatggctaatcaatcttggatggatctatttgaaagggctgaagctgtgtttcttacagagggagcatttgatcatactttggtagtactcaatacttatactgatttcccaagtggcaaaaaacctcttaaatacttccgtatgtggacttctcatccaagttatcatatggaagttaagaggatttgggagcaaaagatggcaggaacaaagatgtttcaagttgtgtcaaaacttaaagctctgaaagtattctttaaagaaccgaataaagaatattattcagacattcaagcagcagagaaaaaggcacggcaagatctcgagaatgtgcaaagtctactacaccagcaacctttgaatgtgcagctgcaagttcaagaacaagaagtaagagaacagtttgttaaaattcataaatattattgttcctttttgcaacagaagtctagattacattggctcaaaaagggtgatgaaaactcagcattatttcattcgagcatcagagagagaaggcatcacaataatatcctatctatagcagatgcgactggtattaggcatgaagatccggagagcatcacaaaagctttcttagatttctaccaagagttgttgggatctaagatggtgaacagactgcctgtgaataccaatttagtcagaaaaggagcgtgtgtaactgaacaacacagtcagattcttactgctgcttacacaattgaggaattaaaaaatgcagtttttggcataccagcagtaaaggccccggggccggacgggtacaatagttcattctaccaggataattgggagttagtcaaacaagatgtctttgaggca

SEQ ID NO: 235031 - DNA, 1075 bp, Cannabis indica
ctaaagaaatagttgaggaagcaaagaagcaaagttagactaatgatttttcttttgaagcaaccttccaaattacaagctttctttttattgatgtctttttttcttttctttcaatcaatgattcaatattacactgcacagagtgacactagacacagagtaacaacaaaaattcaaaagattaatgaattttgtatctaatagatatgtggaaattctcattagatacatatttatatgctaagaatgctttattgagaaagccagagatcttatagtaatataagctccatagtgtaattatatatgtaaagtagctcatggttggaccatgctaattggacaaatgatttgctgattggctacaccaaaactatgatcgtttgaatattctggtaggctgtgttcatttcactgttaccagtgactttaacttaaaaaacgttgtgatcaatggtagattatgctctagtggtttataatataagcataatgtacatttatatatactgttttcctttttttttttctttttcattttaaagaaaattaaagttacatacataacaaaaagtattgtttatatttatacaggacaaaatctctacagctttgttcactctgattacactgaggttccttgacagaggaaaccacgaagagcttcctaaaggattattttgtgcttttccttgacagaggcactgaggtacaagtaaggaaattgatgagcaatcttgctactgcctactctgttttccggtatttttgttttacactttcccctttttgggttttatttggactatatgtcattctgctatgttcaattgcttcaggatggttgctttatgaagttcctcttcagttaaataacaatttcagacatagtataattatatataggactcgtgcactttctgttagttcatgtgtcttagtttaagtatataaacttatttatagagtcgtataactgttctcatttttgataactcttattatacacacttatatggtcattttatcaatttttttcttcttggaatagagtcctatacacgtcctcatt

SEQ ID NO: 235032 - DNA, 1244 bp, Cannabis indica
tagtattttttagttttttttttttttttacatttttacagttttaccaaaaataacacgaaaacaacataaaatcaccaagaaaattacataaaagtaacatgaaaataacaacaaaaataacatacagataacaaaaaatcaacaataaattaacaagattacaacataaaagactgtattttttgttaataaaataaaaaaaaacgtaaaaatagtttaaaattccgttaaaaccattatttttgtaatttttttttgttgtttttatgtttttgtgaaataatctcattattatatttacgaatatcccatattataaatacaatttttgattacaacttaatcaaactcaattgttaaatcattacatacttcaatatccattatttgtaaccatcaagtggtagagcagtccttatcaaaagtgtagctcgttcaatacctgtttatgctatgtcaacaaggaaaattcctttggcaatctgtagagaaatggatgctctggtgagaaaatattggtggctaggaaatttggataaaaatagattcttggctactaaatcctgggactacttgtgccaaccaaaaagttctagaggattgggatttaggcgatttgaagacatgaacagagccttgatgacaaaactctgttagtatcttgcaaagggggaacataaaccttgggtaaactgcctcttaaagaaatattgcaacaaagatagcttttgggctgttaaacaaagaggaagtgattcatttatgtggaagaacttggtggaaacaaagaatattttatacaatggttcttgcactcttgctagcagtggagagtctattgatatttggtgtcaaccatggatcccgtggcttagtttaagtcaattcaagaatctaatggcgagaatcaaagagactaatcaacacctgaagtctgtggctgatatctccatcggtaatgagtggaatgagggagcgattatctctatgtttggggagatagagggtagaaaaatcatgactattcataggttgccagcctcgagtggagatactttgatttggaagtaaaaaaaagtggagaattctcagtgaaagcagcgtatgtggaggaccaacaacataggttcggagataaaactgacttatggaaatggatttggaattctaaaatacatccaagaattgctccgatgttgtggagagtgctcaataatgcccttcctctcaaatccaatctc

SEQ ID NO: 235033 - DNA, 763 bp, Cannabis indica
gtatgtgactaatcttgttccagtactcctcattcccactctctttcgggtcgtactttttgttcaccagaggacagtcatctatccataaagaggtgagggaggttggaaatccttcttctgacaatgtctccaactcaaggcattcatggatttcaagtgtttgcaaggaggtgagttgtgtaagtccatttttgtctaggcttctaagttttgaaaatctccatatttcgagatgggaaatagtggtaggcagtagcccttcctccggaaaggattccatgtcttcttctcttccatcaatacgaagagaggtaagatgtggaaatgtttgcctattccatttcatcctcaaaaatacatcacatgatatatcaagctcacacaaactaacaggaagaccaccttcacctccagggaaaggctctatcaaaggacaatctgtgatattgaaatgctttaaagccgagagggaagtcatcttctctggcaaccacctcaatttcgggcatttactaatgtggaactcactcaacttgggtgcaataagtccaccatttggaaaagatacaaaactaccacaatcctcgataaaaaaagatgttagttcctcaagagattgcccattggacattaagagagcttcaaaatagtggctggatgcaatataaagagttttgagattgggaaataaatccatatcgagagatttgaaggaagatccacaatttcttaagtaaaggtattgaagaggagggtaatg

SEQ ID NO: 235034 - DNA, 1228 bp, Cannabis indica
atttgcacccaccgaattaatctagaagaagaagctatcccacgaagggaccctcaaagaagaatgaacccaccaatgaaagaagtggtgaaaaatgaagtgttaaaacgtgatctgtatgtgccattgaattggttaactatcagttgggaatctaacgtgatctcaagagctttgatattcatctctttggcgtggtcaagcccagcaaagagcgctccgtactcaatttcattattcgttgccttgaaatcacacttgattgctcattgaatgacatctccttggggtgaggtgagaatattgcctaagccacatcctctgctattgcttgagacatctaatgacaacctccacttagagttagattactctttcaagcacaacaactctttttctggttgtacctgcatgtcattggaaaagtcaacaataaagtcagctaatacctaagatttgatcgttgcccttggttggaatgtgatttcatattcactaagttctactgcccacttggtgagtcttcttgaaagctctggcttgtgtaggatgctacgaagtgcatattgtgtcaacacaataatagcgtggcattgaaaatatggtctgagtttgtgtcctgctgtgataagtgctagtgccaatttctcaagttggttgtatcttgtttctgcatctagaagagtctttgaaagatattagacgggttgttgccttcattcctattctttgataaacacagtgctgactactatttcagagactgctaggtatatgtagagtgcttctccattcctaggttttgctaagagcagaggtgaggcaagatattccttaagttgtctaagtgcatcttcacattcctctgtccacttaagtccttcatttttctaagtgttgagaagaataagtgacaacgttcagaagatttcgaaataaaatggttaagtgttgctatcctcccagtaaggcgttgaacttccttgattgattttagggattgaatgttttgtatggagcgtatttgatcagggtttgcttcgactcctcgctttgtcaccaagtaccctagaaatttacctaaggaaacatcaatagaacacggcagggttgagtttcatattatatttttcaagtacctggaaggactgttcgagatgattaaggttgtctgctgctgctagcaatttggcgagcatgtcatcgatatatacttccattgacttcc

SEQ ID NO: 235035 - DNA, 1378 bp, Cannabis indica
aattttatttttttaaattattcaaataattttttcttaagatctaaattaaatttttaaaatttactaaaaaaagtgttaaatctttctcatgtttattttgagagggtacgatttgatagttgtcaaaatttaggggacaaagttactaatttataaagacacgtcatcatttaaacgaaataatgggacgaaacccaacagaggaactaaatttctgtaaatgtaaaggttcagggagaattcttaacaagccgtatattttagggggcgaaatcactattatcaaaagttcaggggtaaaatttaccaattactcaatataaaaatagaaaaaaatttggtaggggcaatctttttttaaagaaaatggatgtatctattaatagggaagtcggacaaaatctattacatgaagatatcacttgaaaagcaaattcaacaataataggttaaccaaaccgtttacaataataaagaaaagagtaatttgcggcataactttcataagtgtttagtttattgcagctaacccttctaacccttaattctaaaattttggtggtaaaatttcctaagctcgtgttctgttagcagtttaacatttccatccatttttagctgttaactgccatgttggaatgtctacgtgtacagagtgtgcacgtgatacaattttattggtccacataaataattatttaaaaaaaattaaaattaggaaaataaataaattataagataaataaaatataaacataattaaattaaaaattaaaaaaaaaactctaattttgaaacctaaaattatcgcatcctctccctctcagccgcatctcccaccttctccctctgttcattatcacacatccatccatccaaccaccccgaaaacccatccacgaccaaaatggaagccaaaccaccatctgaataatccccatgacccaaaaaccccaacctgattgtctccgtccatccatggcaaaccccaaaccaccatccgatttctttctttctttctctctctgcgttttgctcggcccattgccggagggttgtctccgtccatccacggccaaaatggaagccacgaatggcttcctgagccgttcgaggaagagaacgattgtcgatgctcttctgcttctggtgttggttcgtgcacaggcaagagagagataatatagtgagtggtggggtggggtttttgggagcagggacctccgtcgtggtcctagttcaaaaagacgatgatcggtgatcggaggaacaacgaacgactgtgagagagggtgatggtttgtgagtaggctgtagagagacaaagggtgctggtttgtgcttcttaggaaattagggttttctaaaaaagaaa

SEQ ID NO: 235036 - DNA, 1694 bp, Cannabis indica
gcataaaacccaacacttttgaggtcctatgatatttagctttcggttttgtgggaattgtagttaatgatttatgaaaaagcttccatttatgtcttggattaacttctttgaaacaaactcaaagtttgcatctagtttgcatcttccaagttttttttccactctgttattgatgtatgcatatagtttgcatcttccaagtttttctccactctgttattgatgtatgtataacactagaaaaatcatattttggcactttcgatatctaattgggtaggtgatcatggtttaatacctcatcatccccatgtgacagagaccatcttccaggggttttggttgctgggtaggaatgtgtcaatattctcaaaaggcggataactttatgctactcttcttgagtaaccctagagagtagagaatggagatgaccacacacaacacttgaaatttctattcccactttgcactattaattgcaaacaactcttctttacaaaaatggaaaagctgaggcatagtgaataaagatcacctaggcacctactgcattgaattgaaaacaattgagttcaacaaacaatgtctagctaaagctattatggggtttgaacttttaattcatattttcaaatggcaaaaaaagttaaaaaactttttcacatgactcatatggtaaggagatagttcattgactatctagaaataatttggcagcattgaactgatgaatcatgacacagtgcttctcctagttgtatttttagattaagatgctggagtaggataccattagtgttagaagagtacaataaacaaaattttataaaataaaatttagggatgcatattgattactcaacatcatatatatcatagtagtgtatgatgctcacatatcttattatattttcaagcaattataatgggaattttacatagaatacttagaaaaggtagattatcatagtagtgtatgatgcccacatatcttattaacaactactttgatgtattataatttctttttttctttttgcttgttttatcactcacccacatatatctttctctaacttagtcatatcactaaacattttttttttcttatattgtattttttcatctctcaatctcaatagactacttaccactcacaactgctattatgttatatcaaatttgcattattctaattttctttttctctacatataggtaactagctataatttaagctactacaattttattattattattattattattattctttttcttaacattttaaatactctatcacacactaagtagccctttatatttcactttcagttcaaatgtgtgtatattttttcttccatgtgtaatatcatacatatatacaagttaatttcataataggtttacaatttcgttgatcaatttacaggatattactacttatgtgatgctagatacctaatggtgaaggcaacttagtactgtatagaggacagcgatatcatttttaagcgattgggatgtcccacctactactcctgctgaatttttcaatacgaaacattcttctgctcggaacgtagtagagagagcatttggactattaaagggacgatgggcaatccttagaagtcaatcatactatcctgtcaaaattcagtgtcgaattattttggcttgtt

SEQ ID NO: 235037 - DNA, 1194 bp, Cannabis indica
ataatgaataaaaaaataacacaaaataactcaaaccagttataattaaaatagaacctgatctataacagtgttataatgaataaaaataaataacacgaaataactcgaactatttataactaaaatataacattatgaatataaataagtaacacgcaataactcaaaccgattacaattaaaaacaaagagaaaattagttcctaaaatactgaaacataatttaaaaacaaaactagttccacaacaaaatattttataacacataataccccataaaaccgattataattttttaaaaaataataatggggatcaattccaaaaaatattaaggcataaatatgaaaagaatcggttccataaaaaaataaataaacacaaagaaaaacatacaataactcaaatttaatataaagaaactggtttatatttatcaactagttaaaaatttgagataaaaaactgattccgtaaagcaactaagataaaaacttacacaaaaaaccagttaaataaagtaactcaaacaaaaatatctattcaaccatgctccaactcaccaaataatcacacacataccatatttcccccaaaaatatacattcattatgttatataactggttctattttagttataaccagtttgattttattttatgttatttatttttattcattataacactgttatggaactagttctattttaattataattggtttaagttattttgtgttatttatttttattcattatgttacagaaccggttatatttcaattatgactgatttgagttattttgtgttattaatttgttattattcattatgtaatagaaccggttctatttttttgtttatatctgagacatttacttctggtgacttttccagtgactttttcggcgacgatgagttttctggcaatttttttcggcgtcgctaacttttttggcaacttttcttacgccaatgaattttccagcgaaacttattattgttttacaaatatgagatttctgctttttttcttacaaaaatatggcataaaaaatcccatataaaatgtaaagaaaaataaaaaaaaaaaaaaaaaaacaaaaaaaacccaataacccatagcattattatttatgtgataaaaagtaaactcttataatttctcatacattgtgtaatttcta

SEQ ID NO: 235038 - DNA, 966 bp, Cannabis indica
ttgcgcatagtcgaggatcctaggatccaagtctagtttgtctttatgcggtatttcttctattctgaatacctcctgtcgaggggacagtggttctagcaagtaaatgacgttaaccgacttcttttctgcgagttttactgctgtattgtagcattctcgtgagtcccataggactcctcgcacagataagactccagcaggagtagggaacttcattgtgagatgataaatggatgtcactatcttcatctctttcaagataggtcgaccaatcacagcattgtatgtcgagtgttggtcgattactgcgaagtcagtcattgacttagctaccacgggtgtggtccccaaggtaattgggagtttgatcatctccttcagtgcaatggtttctctagtgaaaccatagatactcgacacgacgagtcgaagatcttcctcttgtaatcccatttgtttgaaggcctgaaaatttaggagattcacggaactcccatcgtccacgagtatacggtggacattatctcctccaatatttgcgacgataaccagtgcgtcagagtgtggatgatggacccacctggcatcgctttccatgaatgtgatgtcatcacattcccttttgaatagcttctcaggccgctcgctcaagttgttcacgttggtgagcaacttctctttggccacttttgcatatcactcttgcgatttcctggaatcgcctgcgatgtgaggtccgccaatgatagtcaatatattgcgaggagttctcgaaccactcgcattgagattttcttctttgtcatccgctcggggatgactttcctcattcttcttgtatttgttgaattttccccgcctgatcaactcttcaatttcatcctccaaaaaccaacattccagagtagtgtggccaatgtctttgtggtacttacaaaatttctttgggtcccttttatcgcg

SEQ ID NO: 235039 - DNA, 892 bp, Cannabis indica
aaacgtttggttgtgcttgcttcttattcctaagaccatacaataaacacaagtttgagttcaagacctctatgtgtgtgtttcttggttatagtccttatcataaaggatatcgatgtttgcactctattggtcgtgtgtacatagtgagaagtgtcaaatttgatgagaaaacttttccttattctcaattatttcccactattacacatactcgattcctcatcaaattaccaaccaattatcttacctctctctccaataattatccctcatactccaccaccaccagatcataatcccaaccccattactgcaacaaacaggtccacaggaaccacatcaccaactgatataacccccattcagccacaggcaccactctcagaccccacccgagacataatatcaacaccacctgctatagcacaaactcaaccacaacaaacatcattccctgatcacaccgaccatatcaccccatgcaaaccagatccaagtctggtatacacaagcccaaactcctagctgctacaataactagattaaataataattttcttgagccaagatctgtcaagaaagctctagctgaccctaaatggaactcagctatgacaactgaatattatgctcttattagaaacaagacatggattcttgttccctatattgatggtatgcaggtaatacaaaataagtggctatttcgaaccaaactcaacagtgatggctcggtggaaaggctaaaagccagacttgtggctaaagtgtttcaacaacaagagggaatagactactttgacacatttagtccggttgtgaaaccatctaccttaagacttatgttcactcttgctgtaacaaacaattgggacatacaacaagtgga

SEQ ID NO: 235040 - DNA, 1143 bp, Cannabis indica
tttcttcatagactgcaatggcactggcggtgctttctttgaccacgtcacctttcacgacgttacagttgccgatattctcgatccgctctacatcccagacgacgtcgtttactctttctttcccttgaactttgtttgtaacttccaaggagtttcgaaaccgttgctggcggctcaagtaacggagttagttgacggcgttttcattggtctctcagccaatcattgcgttgcggatgggactatgttttggcttttcttcaacacgtggtctcaaatctgtcgccaaaacggcgtcgttttagaccctccacacccagttttcgatcgtgaccaattctttaaaggtatcaacccatatcttcttccacttagaataccttttgatccagatcaaaatacaaacaacactagctcaacaccaatcacattgaagcaaagaatgtttcgcttttcaaaagaaatcatagccaaactcaaagctaaagccaacactgagatagtccatttgtcacccacaaaatccattaataatatatcgtctcttcaagcggtcatggctcacctttgggtatccataacccggaaccgaagttacttgaaatccgaagacgaagtgaactacattgtcatggtgggtctcaggcaaagaatggagccgccattatcagaagcgtattgtggcaatgcggtgatgtttgggaatgtggagaccacggcagggaagcttttgggtaagaatggattgggctgggcagcattggaaatgaataagatggtcgtttcgcataccccgaaaaaggcccaagagtacttgaagaattgggccgaaagcccaaacgaaataaaaataaagaaagagttagggtgtgaactgttgaccggtagttcaccacggttcaatgtttatgggaatgattttggttggggaagaccagttactgtgagaagtggtccagggaacaagtatgatgggaagttgactgtttttcctgggtctgaacatggaagcattgactttgaggtttgtcttcgagctcagacacttgaatccatgtcagtagataaacagttcatggagactgtaaccatatgattagtattgttgtttcttttgagtaatgatatatgcttaatcaa

SEQ ID NO: 235041 - DNA, 685 bp, Cannabis indica
tcaaagtattttatagttttttttatgtatattttgttaaaaacaaaagaggtagctaataacttaaaaaaattcaatatgtaaactaattttgtaaattactaaaaagtatatttttaattcacatttaaaagttaccgtatggtgtgccctttataaaagcttatttatagatttatttctaataaatttctaaaacaatttatagaaaccaaatgttatcttaaatatcgtacaatgattatattatcgaaaaaaataagctatttggtaattttttgtattttattattgtagctcattatatttgaaggtaacataaaagttcccattaaaaagaaaggcaacttttaatgtattttgatcaacaatattatatatataacttgaaaatgaaactataattttaaaagttaagcaattgtcaaaatagagcttatcaaaataaaaccaactagtatcttaatgttatatataacgtctactaaattttaaatattaaatttttgttaacaaaatataaaataaactaaaagatttcttttgatttagattatttaatgtgctatttttaagtccaaataattaataatgtaactgcaattcatttctaaaagcataataaaagaaaacaaattcagaaaaaaaaaagtaataaaagaaaacaaaaacgaaagagaaaaag

SEQ ID NO: 235042 - DNA, 1423 bp, Cannabis indica
aacaaatttttttagattttttttaggaacaagtgaaaaccaatttcaaacgagaatcagtattttacgaacgggtaatggaactgagtattttaataataccttgggaacctttttaaaagaaaatggtcttttacatcaatctccttgtccagatactcttgaacaaaatggaatggataaacgaaaaaaaaaaaaataagcacttattagaagttactcgtgctatgatgttttatatgaatataccaaattatttgtggggatgccattcttactgcatcatatttaattaatagaatctccactaaggttttaaattatactactcctttagcatattttaaagaaattatttcttacatctataattaattctatcttgccttcaaaaatttttggttgtactgcttatgatcttcctaagagatctagattaaaattatatccaagagctgaaaatgtattttttgggctattctcctaacacaacaaagttataaatgttttaatcctgttactaaatgggtttacattactatggatgtttttttcttaaaaaatgccccctatttttccaaaaatttgattcaggggagaatgtagtggaaccaaatttttggaaagtcattgagccattaccaaaattgattactgatattcaataagggaaactcaaccccagcctataaatgtcaaatctgagcttggtttgttagaaaaagaaatactacgattatggtttattcaaggaaaattatctttgaaaaaagtaaagatcaccaaatcatccctacacaagatcaattgcatgccttgaatgatgattcaacaagtactacatgtaattttattcccactactaattcatctcctattaatactattctaccagttgtgtctgaactagttacaatcgcatgtgactcagatgatcttcccattgcccttaaaaaaggaacttgtaattgtattagatatcctactgccaaacacatatcgtatgatcatttacccgaaacctatagagcatttatcacaaatatttcagagcttgttgtgcctagaaacatacatgaagcattgggtgaaccgagatggaacatggttgtgtgtgaggagatgagtactttgaaaaagaatgggacttggatagttattaaattaccaaaggagaagaaaattgtaggttgtaaatgggtgtttactattaagatcaatgctgatgatagtattgaaaggtgcaaagcttatggcgaaaggtttcacgcaaacctatgggatagactatatcaagagacgtttgctcccaaacatcaattctattcagttgttgttgttgtcattagatgtaaattccaattggccattacatcagcttgatgtgaaaaatacatttctcaatggagatcttgaagaagaa

SEQ ID NO: 235043 - DNA, 2298 bp, Cannabis indica
aagacatgataattaagaaggttaaaaacaagatggagcaccctacactttggcaggggcatttgcccgaacaagtactgaaggggtatcgtcattcgacgagtgttcttgctcctccaagacggctttcccctttccttctacaagggtggatggccgagaaggaaggctgggctccctgatttggattgtaagtttgatgggcatgtgcccggtcggaagagtcttcttccttttaagcggcctttccttctcttcctcagcctcatcttcttgctcagaatattcttaagcatgttgtttagctccggctcctcccttcaacttagccttgcgcttaagttgaatgagctccttctcctactcagaatactcctaagcatgctgcttacccctgcacctcccttcaacttagcctcacgcttaagttgaatgagctccttctcctgctcagctccctcagcccggccagcactggacttcttcttcctccccttcacaggctgaggtataaaatctgctggataaagcccgtattccacaaagttggcctccaaggtcaacaaggtgatattccgagcaacagccgacagctgagcaatcctctgagctctgtccctaagagccagtgtaaggggtggacgataatatattaggatctactgaaactgagtataagtggtgcttatgccttcaacaaagtaataatcgccaacaaaactcccgatctggctcacgatcttgtccacggtgcctatcagccacttgaaatctggctgagagaagtagaagtaccccgacctgctttgtttgggggtagacttcaggttaaaaaaccaactgacctcgtgcggagaaggcacacctcgaactcctggatggcataaaggatgaacagggccgacagatacttaatgccttaggagtgaactgggtcggacaaaggcaaaagtagtctgccaccttcctgaagtacgggtgaaaaggcagcatttccccttgtattgtgtgggcacccaaccaggcacacatccccttctgcgggtttgtatctcagtgatttgaagcagggacgtaacattcaagtccacccagatagccagactggtccaagtcctacatgcttgccttagtgatcttggacgaaggactcacccatctggcacctaaggcactttgcctcctgtgaggaactgcttcagtaagctcctcggtgacgtagtctactctctcgactaagacttcaccctctgcaaacaccggctccccaacctcattatatcctccaaagtttagaggttcagcctcctcttcctcctcggtctcggaagggctgccaggacggacgtcatcctgttcctcaatctcttggacctcgatgtccctgttgtgatctccctcctcctggacgagaagatcctattcggtgctcgaaagtgtggcgagttgggccacgtgaggatcagatgcgttgaccttccgcatcgtttgttttgttcgagccatcatcctactattagatggatactggtgtgaatgctcggcaaccgtgacaacaagaacagtaattggaatgccaaagttccccgaacttggatggccaataggtagagtgtcagcaacacttggccggacaatgtatgtccatttggatggcagataacgcttccaacctttcttcaattcccaaatgaagcagtcgtacccctctccagcgatctgcttggagtaatagtggtgttgcacttcgggttctagagtagaagagcgttcactactcacttcccaatcttcaaagctcgaattagaaagtctgtcacttgagaggaaggactggcacggagacgagggtgatcctcgtacaaaagttgaagcaggtgctggtcaattcgctgttcgcttccccaaaactcactagggttcacctacaaaagacaacacacgagatgagtttttggccaggatatcgaacaataaatgggtaaaatgccgaccaggagtactcaatagattaaaagaatgaaaacattcaaaaataagtcaaaacctagaagtttgaaatttttgggtttagggctaaatttcacaaagctttgaataaccaatcaaaggccaacgtcatgaaccgtgaagttttacaggttattacaaacaaaatcgcgaagttttaaacctagattttctatctatcttctacagaaaagttaagaacacatgtatgaaacccataaattaaacatgcaaagtaaaatgagaaagaaatcgaaaacttacccactgtttgacgtctgagttcag

SEQ ID NO: 235044 - DNA, 783 bp, Cannabis indica
cacccataaataaaatacttttagatgaattaatatgacatgaaaagaataatatttataagctacatggatgatgcttacatactttataaactatgtgggacatttagttccatgtattttgtagttcttttctaaacaaaatagaaaaaattcacaaaattttaaaaatagaataaaaaaaatctaagatgccacctaaacttattttgtgctttcctttatgttatatatagatatatatgaaaaaccataagccacgaagaacgctccttggagccgccctagtcacatccctagtctcatccatggaggccttaatgatgaaaaacttctgaggggtttcggaaaaccagtcgtccgcctccaatttacagtaatcaagaggggttttctgaaggaagatatggaaaatctgtaataaatgaaaaggagacagaagaaaatgatgatgaaaccggctgagaagtgaagaattaaagagtttagagcaattaatgctctgattaagagttattagatgtgaaaggaagtaataataatccctagagcatttaatgcactgggtaaaacaaaccaccacttaacaataaagggtggacgaaatcccccattgaaggaaccaaactcaatgaagaagacgaaccgtaccacatacttgctagaaagctccagaacctttcttaatgtaatacttatctatggctaatttaaattaaagtataattaaaaaaaaaaagattagaaaccattgttcttagtttctctctgcaacctgtaaat

SEQ ID NO: 235045 - DNA, 905 bp, Cannabis indica
tctctctctcttttcttctttcgttgtctattgagtaatgagctcctttgagctattaaggacaactgtaaaaatatattttttttttgactaagagagctccagtaggagctaacacacagctggaactaaagcattccaacagcattcttcatcttaccacaatgccctttgcgccaggttgtgcgctctgcaattatgagatctcttgacatgccggaggtggacatcagggaaggcagataaagaacaacggatatcttcgactacatctgcaagagctgaaaaatcagctttcttgttaaggactttgtcaactagcaactttgagtccgtctctatcacagctaacggtatttgaatactgatacaccactctaagctagcacgcagagacaaagcctcagctattagtggcggcaagttcccagccacaggtgcggagaaaccagcgaccgtactaccttgacaatcgagaagcacggctccaagacccatcttactctgagtctgattgattgctgcatctgtttgaagaagaaactggttttgtggaaccacctttggtgtcctgtctgaaacctgcaaattatgaactccactatatttgttcttcatagacatggctgcattgtaatctgaaatgtaagaatcaatccaagcaatagtgtcattaggggttagatccaagtttgcaaatagcattttgtttcttgagtaccaaatagcctagagagttgtaaccaaaagaactaattgatctttatgtaactgctcaaaaccaatgatcataaaatctttgacatcaacatgcctgtttgacaaataaaaacttcggaggggcgaggccttccaaatttttgacgctctgggacaatctagtagggcgtgtgtgactgtttcag

SEQ ID NO: 235046 - DNA, 880 bp, Cannabis indica
agagagtgatatgaatcacactatgacaatcgtagatgcagaaaatttccagtcaacaagctaattgtctagccaaagatatacaaagtcaaaatatgaatcactataaacaaagcgacttatataagaccaagctatcttggaaatttagacaaaacaacttgagaccaccttcaagaggcatttgatgtaaacaacccaatgggccaaaaatacctacaaaataaataagtataaaaagtggattagcatactatacaataataatgctatgaatttataaattaaggataaaacgcaaatattatgttaacaagaaaacttatctttgaagcatgacgtcaccagtgaaactaatatgttatgtccaaatattaaaactaagtcttctaaagtagaaataaactagccaccataacatgcaccatgcataatatttgaaaattaatcaaacttaataactcaaatcccaattaaaattaactattttttaacagagttaacaaaactcaattagctaacaaataagtaataagaaaataataatataaaataatagaaataaaattttaccaaaattattaaaatataaataaaagtaagattaaaacttatctgtgactctttgatgtcgcctccatgcgcaaacgcgtcaacaacatactagccaaaatatggaacaaaatagccaagcaaattggcccaaactaaccaaaattggcacaaactagctaaagaaagacacaaactagccaaatataaaaattaaatatttatatatatatatatataacataaataagttataaaaatgtaagaatacaattcgaagtaaaattacttatttgcaagctttaatggttaaataatttgattttag

SEQ ID NO: 235047 - DNA, 2083 bp, Cannabis indica
gaaagaaggatcatttataagaaaattttccaggtgaaaacgagaatgtttgtgggacttggaagcagtgtcctcaaattggagttttaaggctcggtgatccgatccataaaaccccaaatgagtgagggaagcatgggggaagaggctattccaagaggagaaaattgtgcaccaatcgagacgctcaaaagttgtaccatggcgccaagtgaacttatttcccgaatgagggagaggggacatgttttgagtgtgcaaaaagttatgaaattgatgcatagcatgggaggggggagatgaagtggaattacgatcattaattgataagtagtcattaaaatccccaataaccagccaaggcaaaagaggagcagtgtcatataagcgatttaaaagtgtccaagtaaaaacttttgaatcaatgtaaggagagccatagaaactagtaaagtgccagtgtctatcattaaaattatttataaaacagtccacatggttaagagagtaagagacaacagtaatatcaatacagttgttccaaaaaagcaaaagacccccccctaaaccctgcctaggaacctctaaaacattgtcaaaatgaagtttgtacttcaaggaaggtccacggccagcaggcagcttcgtctccatcacaaaaagcatagttggctgatgctgcttgaccaacagggagaggtgacggaacgctcgaggactccttaaacctcgagcgttccagctgcaaacactcattttctcggcggggtcgcgatgcgacgcccgccgttggttcatcatcagagagagagggaacaatagcgtcttcactaggggctgcacgagcacgcttcagcatgctcctgacagaatcccccacttgggcagtctggcgagtaaagtggctcctggtgccagcagaggagataggtggggactggggagtggagtcattaataaccaagccgataggtctagttcgaggaggagtggttgatggtagagcaacacctttgccttttgcagtgtgggtgacagtagaggtggtcataatcggtggaggaatggtggcagggaaagtctgggaatgaggagatgttggagtagttggaatggtgttagtgttggtgatagtacgggtgggggattgaactcgcagaaattgattgacagcatgttggagactttgatcaggagaagatataggaggaaagaattcctcaaagggagtggcattggaaatttcgaagggattcttcttaaacaggggctgcgccggagcacggagagtgtcacggtattctaagacagggggggaagggaagttgtcacaacggaggaggtaacgggtacagcggttgtaagtgtggtccaggaggccacaaaagtagcagaagttgggaagactttcatatttgaaactaatccattttggttcagggatggatctgaatcgaatagtcatgcccctacgcaagggcttggtaatgtccagcagaacacggattctgagaaaagggccagagttctcaaggagagaaaggggaaagatttcaataaggtcacccaattcatcagctatgaactgagccaactgagggctccttttgccaaagggaattcggtgagcttggatccagaaaggagtgtatctgatactttcaggggtgggagtaggtgaaacatcaggatgagtgaagactataaggaacttgtcaaaatgccatggctgttcttccaggacacgtcggcaatccccgtcgcattggaaagtagccaagaaaaggccagaatggtactcggagatttggacagggaagcggagggtccaggcttcagccattgccttttcaatccaggcgggcttagcagttcgaggagataaagttttgaagataaggcagaaagagttggggtcagaggatgaagagagggagatatgatcaaagtcatggatgaggctttcttcttcagagagaggggtgaggatgttagggttggtggaagaggatgccattgaagaagtggaagaagagagggctgcaatggtgagaaaataaggagaaggtgccgaacaacacaa

SEQ ID NO: 235048 - DNA, 1022 bp, Cannabis indica
tataagttttatggtctaatttttcggtgcatctctttcttatgtcagacgtaatattaatgttgcaactcatagattaatttagcatactcttaataaagacattaaatttttttggatataataaatctcacttagtgttctttgctacttgcaccaatcagatgtatttagacaagtgggccttagggtctatcctaccttcatacagctccatcaaaagcattctaaagttttttgactagagtgcctctattattcttcttgcacgtggttcctgatttttcttctgaatcagatacaactccactttgcctccggaaaatacattttgcggctttgtcaattcagctatttggtcttcaagacttggtgtcgtcttggagttcacacccacagactcgatcattaaaataattccttaggtcgtttccattaggtctcaccttctcacatttggcttgttctttctttgcgtctaaacatccctggaggtcatttgttgaaaaactaccttctaaaattgggcgaatctcatctactccatcattatggttaataggattactctagtccatcactgtggttaataaaattactagagcagtttttccttccctgagcggtaggcctttgttccttagtactcagcttatcgtaactatgccttgtagattaattaggtggctttactctagagcattgatcgccttctttttccgtaaaggttagttggcagtattcgtgtcactctgtggagtagtgggagtagttttttttgttggttctcccatgacacattttcctttatcctttgcaggatcaaatgttctagggtcttttgggtttattttctttgtagcattgttttcctgaggaacaggatcattaggaatattttcatcaggttccacttctcctaactcaaatctgacctctaatctgattaaagtttcttccattcaatgggagaattcctcctgacccgccaactttattttagtttcagcatgttctttagc

SEQ ID NO: 235049 - DNA, 1002 bp, Cannabis indica
agccgccaaaaattcggtttttgtggttaagtgttacaaaatataaagttcaggaagtttagccgccaatatccctatatatatattttgacatagtcattagaatcactcatgaaattacgatgctaaaatctgctatcagcgcaggacccttctcaaactaggatagctcatcgtctaattgaaaagcatgttttgccaaaccataggctactaaattcttaacgcgaaccacatgagacaatactgctccaaaaatttagacaataagctattacatcttcaagtagccccccagcatattaaaaaataaacttccattattaatagttgttgacagtgctagcaaaattgaaaataaaaatatcgcaacaccaaaccaataacaaagttatattagaatgacaatcttcaacataaaaattattatacaatcttataatttaacacaaaaattatttcactagctcaacattactgaaaaagtagaaaccaaaaaaattctaagtataactagccaaagataatgtcattttgctcgtaacaacttactagcaccctactaatttaaaattactgaaaattaatatccaacataatatgtttaaaaaattaaatttatcggcaaattctttgtaattgtaagccctccacaaaatcaacctacaaaataacaataaataaaactatattaccacacaatataatgaaaaaatgatggtaaatataaagacataaaaagacatgaaatacttatctgttaatatttaaaagtcattgaagtagaagccatgagcacaaaatgggttacatttcttgcccatttactatagtagaatttacgtggaatatgggttttttaaaccttttataataaatatggcataattgactatggacactttatatggcttttttaaagtttgggcatagtttatggaattttaaagcccatacggctggaatatatttgtcaaaacccatattgtgtgtattgtagtt

SEQ ID NO: 235050 - DNA, 2563 bp, Cannabis indica
aggagccacaaaggtacattgccaaaattttgttatgaaatgactgcagagtatctacatcatggtagcttattggtttttctgtggcaggtcctccgtgtgattgactcaaattaccatattttgaatgataaggagaatttgaacatacctcatttaagagagaaaaggaaacatgagcagaaacaggacaaggttcttggttacaaagaacaaatttcagtagtaatcccacatcttggtatctccttaattaatattgatcctcgggtatgcatagatatagcttcatttatctcttcttcttcttctttctttctttttaagtaaactgagttgatgagaaactgtcaccattcgttctttgcaggaattggtttttgcttgtgcaaaagatatatcctttgatctgctgcagagtttggacctacaaaagttctcatttcaaatttcatcattgcaaattgataatcagctacgctcatcaccatatcctgtgatgttgtcttttgatcgtgaatacaaaagcattccagccgaaagaaaattgcaaagaacttctgattgctcttacgaacctgtattttacatagcagtgtcaaaatggaagaagaaagatatctccttggtttcatttgaatatataatcttaaggttttccttgctgctgtttttttaagcaaacaaaatattattacaaactcacttgacttacaaatgggatggcttaatgtgctttctgtaatgcttgcagagttgcagatttccgtcttgagcttgagcaagaggtgatactgggcatgtttggcttcatcaaaaatgtgacatcaaggtttcagagtagtttcttaaagttaccagatcccttattgtgtccacttattcctgatactggcttgctagagccatctctttcacatgctcagacttctgagtatcagaaagcaaagggcgttcctgtctttaaaagtcaatcgctaccctcagtggttcccattggagctccttggcagcaaatttaccttctggccagaagacagaggaaaatctatgtagaggtgtttgaaataagccctatcaatgtaactttcaggtggcccactaatctccaagagaatttccatttgttgtactttgtattaagtttttttagtcactaaaaatgatagaaattttctctttgcagcttttccagtgctccatggatgcttagaaatgggatccttacatcaggagagtctcttatccatgtaagttttttttatctaaactcccacaccttccaaaactagtgctgcaggcaataattacatgtaaagtaaatggatccttggaaattaatgtggtattcaagacagaggatagaacttgaaagcagttactagtcttatcatctttttttattctgtttctatctactatacacatgttttctatcaaaaaatacatttagataaatagtaggttagatgattcttgctatttttgtaccaccgcaaattgtgttcccattttcccatctcgttattttctactccattatctatcaaccatcgtatacgctgataagaattaattacagagaggtcttatggctctggctgatgttgagggagcacaagtacatcttaagagactaaccatttcacaccatattgctagctgggaatccattcaggagatctttattaggcattgcactcgtcagcttcttcatgaaatgtacaaggtaaaatggagacaagttcaacaaactcttactgggcaaatttgtactctgcagttttactttttcttttcacctagcacatatagatctttcagcagcagatgcactatagtaaatagcattggaaatacttctcacataggtgtttgtaatgttttggtctaaatcatatgtgcatctatcaatactcattattacttggcccacttggttgtaaaatgctgctctgctgtttagttgatttctcgaggaaaagcttgtacctgataagaatgcagtcacattttgttttcaatgaaggaaaacaagcaaccatatctctaattcgttgaactgtaggtatttggttcagctggtgttataggtaaccccatgggatttgcaaggactctggggcttggcttcagagatttcttatctgttccagccaggactattttccaggtaaactttatcgaattggttgagaccttccctcttccggcattactgaaaatttattattttattgatagagccctactggattgataactggcatggctcaaggcaccactagccttctaagtaacactgtctacgctataagtgatgctgctactcaattcagccaagccgcacacaaggtatatcttcctcttcaaaatatctgaatatgttgttaatcacctcatgtagttttattttaatgagttgtgtccttgtagggtattgttgcatttacatttgatgaccaggcagtttcccgaatggaacagctacagatgggtgtaccatcacattctaaaggcatgattagtgaagttttagaggtacgctatactattaccaacc

SEQ ID NO: 235051 - DNA, 601 bp, Cannabis indica
tttctgtttttttccctaacttatatgcatcttatatggtaggatcattaccgaaaactagaagcagaggttaaatgggaacctgaaggttccaaagatgtgctgactatggcattggggaatcctgagaatagaggctatgttcgtggggtgggttatggcgtaacccccactcaatattttcacactccacagcctacatccaaaaaagagaaaggcataaaaaaagttggacatgatgatttggatcgactaatgcatgagcaagaagaacgaatacgtaatgagtatgaagatcgatttcgtcaacaagaagagcgtattcgtcaacaagaagagttggtgaaatcaatgcttgaagcaacaagagaaaatccacagcaacaaagttatagcggatctgcctatgtacctgagccaccactacaaaatttagaagatttctatgttccgatgtcttctcctgtagattattcactgtcaacacctcaggtattaattcttttgctaaagtattccttttattattatttcatgattacttatatgccttattgtatatgttaatgttgtaggagcgtaaatgtcggctagcacttgg

SEQ ID NO: 235052 - DNA, 2179 bp, Cannabis indica
aatgtgtaggaaagataatagaatatataagaggaatagttactcctcccattgtcaattgattttgagataaaaccccattcaccttatcccatattctaacacacccaaccaccatagaaggtctcatttttttttcctttgtcatcttttggtttttctattatttcttacaaatttttttttggtttgctggtggtatttgcatccaaatcagatctatatggtggttttttaaaaaaagaaaaattgctatttttagatttgtgatcgggctaaatcagactctctctatattgattattctcccatcgaaatgaaattaaaataaaaaatatataaaaaataaaaaaaaatgacctataatttcggttattagcaaataatcgtaaataacatagattatggtttcggttatttactaataaccgaagtcatagaagttatcgattcacaataaattcggtttcttcgacccctttcgttttgcctaaaacaccttaggttctaaattttcttaaaatcgaagttcaaccaccaaaaaaaaaaacttttaaggagatttttgttgtattgaagtataatgtctcaatcactctcataaatattatttttacatgtttgaaattgtggatgactaaagactctacaaaaccctcttctcatgataaacaatttgagcctgacgttcacttccttcttttcaatattttgtatttttgactgtatttaatgggcaactaatgcataaattcttggtcatagaagactagtctaacatattatatgaataatgttgatcattctaaatgtaccacgtgagctcatgatacaagacaattatatattttatatgtataagtgtattaataatctatttacagcaagaaaatagtctaatttatgtatataaaatatatatatttaaccacatatgatttttgagagccaacattatttaatatatgtaattttatgtaacacattaaattttctattttcaaaaataaaaaaaatctaaacaccaaaataaaaaaagttaaaacttctattggttattgaataaattaactgcaatcaaaattaatcttatattttgaagaaaaaaaatatattttttattatcattgcatatcacttatgtttacacaaattttaacgacgatgacatatcaagagtagcaacacgtggcacgaaaaatactgggactgaattaatgaaaaatatataaaatcatgaccgttggggagaccgttaatcatgacggtggccatgaccgtcagaatagaagtcaaacggtcaccaatacctctagcttgagtaagatggatgtctccaagaaggaaaaacgatggactaacaccttcataagtaaaataaaatcaccacacacctacaggcaagctagtctaaggggtagatgatactacccccaccatagatataaggacgttctcaaaggtaaatgaggacatccacacaacaatatgactacccacaacatacaagttgatttgggagaaaacaatgcaacattcccaaaaggattgggtgaagaactagatgatttttatgggcttacaaaactgtatttaaaacacatattggtatgtcaccatataggttagattttgggaaagtctgtcatcttccagtagagttagagcataaggcattttgggcaatgaaggccctgaatatggatttggcatgaaaatgaaaatagattgctgcaattgaatgagttggaagaattttgaaacgatgcctacgagaatgccaagatctacaaagagaggaccaataagtggcatgacagatcttggtcagaaaagagattcaacccgaacaacaagtgttattatttaattcgagattaaaactatttcctggtaagttgaagtcaaggtggttcagaccttttacggtggtcaaagtattcccatatggagcggtggaactcaaaggcgagaagatagagactttcaaacttaatgatcaacgattaaacctctacttgggtggtcaaattgaccaagccaagtctatatgatgataacaacagcgctcttgggaggcaccccaagttgtttattactttaattaagttcgagtacatttgcaattaattcattttttagctttttaattttgttctttgaatttgtagaagttttt

SEQ ID NO: 235053 - DNA, 745 bp, Cannabis indica
aaatctcaaaagcaagccaccataagtcgatcatcttctgaagcagagtttcgaagcctcgcaagcacagttgctgaagtaacttggatacaatctcttcttcgtgaattgcatattcctcaaactgtcattctttctgtatggtgtgacaaccaaagtactgtgccattggctgctaaccccgttcttcatgcacgcacaaagcatatagaaattgatctatacttcgttcgtgacaaggttctacagcagcaaattcatgtcaagcatgtacctgctacagctcaagttgcagactgccaaactaaaccaatttcaagctccaagttctctaattttcgaaccaaactgtgtgttgtgtccaaagtcacactcagtttgaaaggggcagttacagatataaattagttaggacaattagttagttaggttgttggttgactctgttttggttcagttgtatctgtatataaactcctcttgtaatatttctttaatcaataacaaattaccttcttttctctcttcttctctttgttcttaaacatcacatatatatatatataccattactaattactaagtatgccatctaagtttctcatatgccaaaaattagctctcaagagtcagcctcgcaatcaagctagtttctccacactcgaggtaaggaaattaagtagaaaaatatttctgtatgtaataacattcatagaaagagagggaatagtaaaagagaaattaa

SEQ ID NO: 235054 - DNA, 2207 bp, Cannabis indica
aaaaagaaaaacacacaaaaataacaaaaaaaaaaaaaaaaataactaatcacaaatataattaaaacaaaacacaatgcatactaataatcagaacaaaatataagtgtaaatttcgaacttaggaacaaaataataaaaaagtaacttgaaataaaaaatatgcaataacatcataaaatggagcaaccccattatagaactttagaaacatgtaaaaccagtttcgaacccttgaactcggtaaaactagtttcgaccctataaaaaatcataacaaaacataaatgataaacaatgaagtcaactgaaaccagtttcatcagtcaaccaaatgaataaaaaaaatacgaacacacacacaaacaaaaatgaaaatattaatgacaaatataacaaaaaataacacataatacaatttagcaaaaaaaaaaaaaaaataatcacacaatgtacaatgcacaacacataatgctatataccaaaaaatatagcacacaatgcactaataaatttttatggagtctattcatctgaaattacataatgatcaacattctatctgtaattgacgcatttcaaaatgaaaggtggagctcgaatgcaatattcaacgagcaagagctcagatatcctccctggaatagtcttttgaaattcgaactagttcccaaagagcacttccactaatcatgtcctttggatttacttctttaatttaaaaaaccatatttaagaaactatgctacgagaaaataaaataacatggtgttaacgccaagcaacatttattttttaatttttaccaataacctaaatattttcaaaaaaaaagtgagctacgttcaaatttttaagagtaataacctaaatgttgctataaaaaagtgaactacattttatatatatatagatattgttgacggtgagaactttgtcaaccaatgagcagtcgaaaaaccaacttatgcttcatttttactgttttagtgattgtttatgtactaaatcatgctccccagactttgatatctaccaatctaacaatctcaatagttcagggggaatttttaacggcaaaaaaggttcaagggaatgatttggtacatgtcaaagttcaggagaaaaaaattcttaattagccttattataattattaaattagaaggttttttaatatgttatatcgtgatttttgagttgtcgtgcttttcgaacttgtcgcctgtcatgttttttgggctagtctattcatgtttatgtgtcgtacattttgtgtttctcgtgtcgtgcttaaggatatatttttcgtgtcgtatcatgccaattcgtagcaacgtgcctagcgtgcccaagtccgtattttttgtgcctattcgtgctcgtgcttgtttcgtgctatatgaaaaagctcgctcgtactttcaacactaatttaccccatctgtctctgaaattgacacgatcgaactcaatgttcttctttgatccaaaaactctcgtggtcttcatcatcatcatccacaggcatagcactcaagatccgcttatggatgaatttcagtgtgtacaaagtgattctatagccatttgcttgtgaaaaaaaaaagatgaagggtttctcttgatcttgggctgatattctgataaaggtaccaggaccaccatcactcgctgttttctgcagctcattttctttaatttgctgctacagaatattatgaatacgatcataagttcaatacaataatatatctcgctgtggatggatgatgcttcaaggtgtaaagaagttttctgctaggaaaggaaggagaaagtcctcgaaaatatgatgtaaaaactaaaaactcatcataatctttacctacgttttctttatagaacttatcaagatatctagcctttactttaatggctattaattagtattatttgatcatctctgtataaatacggtgtattgctattttttagaatattttgctaaaatttaactttatggtgatataaaatgtgtgctaaatttggctcaagctaaaaattgtgccaaatttaacaaaaaacgatagcatgtgacaaattttaactcacaataaatactatatattttttttaattatatctttttcacttattaatacaattcattaactttgaataagatatatttatgagttaaaaaaaaaaagaataaaatatattta

SEQ ID NO: 235055 - DNA, 838 bp, Cannabis indica
aaataataaaaaattaataattaattaacaagagtattacataaaaaaatacatcaaaaaactatattatctgtaaataaaatcacaaaaattgtaattatatttaaatttccgttcaaccgtatttttataattttttttgtcgttttagtgtatttgtgaaataatccttataatctattgatatattaatataaaggaatgcaaagtaggtgagatggcatcctacaatttttttaatcaattttatctattttactagaattagtttatttagtttcattttaagatttcttttttcattttgacaaaaatctcagataatgtgagggttgtacttctaagctataaataaagtattcttgccttcattttatttataaattctaaaatatatattatattatattatttaaatttgtaaatttaatattgttatacccaatttttgcaaaaaataaaaaataaaatgactactcttgcaaaagggcccacaagccaagagtaccttaaagacaagaaagtcaactctctgactttgaccaaagcttaccaaggccaaataagtgaagacatcatatttgagagccccatgaaacttctagaaaacttattaaaacactaactaactatttaatgtcgagacccacacccaagtgtgcccaacctagggtttatgggctcacgtaagggttttcatcatagagaacttaatccgtcaaagaaatcagcaaggactttacttatttatgcataaatatgctagatttgaactataatcaaacactttgctggaataaccacattgtggatagtatcttcactctcaataattaca

SEQ ID NO: 235056 - DNA, 6676 bp, Cannabis indica
ttcatattagggtgttaatccaacatacttgttagtaaatctagatcctggtaaaataatttccaacagttccctgggttctgtccctatttataggagtctaagatgacagttattcttttgagatcttatgatttgtaactgtttgtgaaacgtggacaatccccacatttcacatttacacacatgggataatcacaagtaacttctcgtaattgctcttttaactttatctataagcagttatgctaactatgcctcatccttcttgtaatacaactattctactttagatgttttatcataaaaatcagtgtctaagtatacgtcaagtaatactttttgcgttcttccattagtgttgagtgaggcatacgcgagatgcttatcacagtatgacaattgcaaggtgaatcatgttggggatattgtctttagtctttgaatatactcacgagtctgtgggtcaatgagctgcgagctctttgaataattcattatctaccctttccaaacattgtcattgttgtgtattctgtttatctcgagatggaccttccttctccttcattgatctcgctagtctcatcagtcagtagttattcatggctcgacgttgtttttaagagggtgagtttgaatatttctaccaactgtattttttgaggcgagttgtctgaacgtatttattattgtataatttgggcaggttcatattccagctatattacacgtgtcagcatcatattgctactcgaagtatgggtataacaccttgccttttctcctttggcttgatcctgtttcccgtttggcgttcaaatgcctacagaggactaaagttgactaactttcttcaggagaaaatatctctaccttattgtcttggttaacagaatgattaggacaatttttccatccccgaaagcaccgggcctatcgttttgcgcaactctgtctcgcagatcaaaagggcatcctaaccctggggcatcaatagccgtctttctccataaaggttaggggtgttcataaaatacccgattaatccaattcgcatgatccaatccaatccaatcagcaaagtgtggatatccgcacttaaaacggattggattggaaaattcaaattctgcatttgtgcagattggatgttgattgatatagtaaaagtaaccaatcaaatccaatccacacatatttatatatattttaaaaaaaaaaaaattatgtgcaattaatattttaatgcaaaaaaaatagtaatttaagattctaataaaaacttaatagattaaatttatagtctattattatatagggaaaatataacttaaaacaaaattaatcatttctttctacatattatttttttcttcttttaaattttttattttatttattttaatttattgttggagacataaaagaacaataacttattttgtttttgttgttagttatgtgaaaaaatattttaataaatattaaataacttgatattaaaatgtaactaatccaaaataatcgatccaatttacacttttacatataagactaaattagatttgaattattgtacgaattgaattggattcaaaatataaaattcgcacttagtacggatcaaatgcagtataacagacttcatgttgttcctaggagcggtttctctttgagaatgtcacgtgaataactgcagtcattagatgtattaagtcgttgaaagatcttggagagagcttagttgttacagcagaactagcaacattgggttaaccccattcactaagcacaagctttgtaattcaaagctgatcgttatttattcatttaccaaataaaatactacaacaaattcattttaaagcacagttgtaaaaaatacacttgactctgcattctataaagaacaaatcacaataattatttcaaattccaaaccatacaaaagtttaaaagttcctttcatgttccattgtcgttaccactacattcattcattacaaccaaacgacaccttacagatgcgctccaggcccccttttttcacatatttaactggattacttagagaatcaaatgccaggaatcgatacaccgttttcataacagtgaaaattcagtaactggctacaagttacaagctacaaagctagtctacaggctactgactaatgctacgaaatacgttatgttttttgccagtaaattcaagccgagctagaaactgcttcctgacgaccttctgattcatctactgttgatatttcatccaaaaaactaggagacttcggggtcagtcccagcaccttgaacatgagttgatcagcatcaaaatcattgtttggggtagtcaacaacttctcacccgtgaaaattgaatttgctccagccaaaaaacataatgcctgttcaggcatggagaatcgaactctaccagctgacagcctcaccattgcttttggcataacaatacgagcagtggcaatcatccgaatcatctcccatatttcaaccggctagattatagaaatatgaattctgttaaacctcttaaatcatgcaaagacaacacgtgtatcgcaatttaaaattaaatgaacaacactcccccctactattgtctaatttgtcttcatattgtgaaaaactgtgtaaagaaatatacggtgcacattaagaaacaaatagtacaaaaccctctaatgacagataccaaccaggcatttatgctaattaatttgcaaaagcagcaacaccttgatgctaagctggaatatatgtacattatatatagataaatatatatactgtacttctttaccttttgttcttgaagaggtgtgcctttcactgcaagtaatgcattgatgggaacactctctggatgtgtgggtagtgttgccaaagtatgtaataaaccgactcgatcctcctctgcctctccaaggcctattattcctcctgataatgcaaaagagaactatcatcacacattcagaagaatatcgttcacttttcttcctcattttctttgaggacttggggatgtatttgacaattgaatgttataagaataaaaatatgaaaccaataatcataaagaaaaggaagggggaatcagatcaatttcgatccattaaacactgaacaaaattacttttttgtgcttgaatcagcagtgggacttgaagaaggggaaatcagatttctttttcatttttcatgcccagatgatacaaaaaattcaacatttgcaattaaaataccaatgattacttattttagtaaatcaacattcaaaatcagttgaaccataaagaagatataatttaacgaatttcatttcgtattctttttcttacagggaacagcttgcacaacagagaccactaaaatgagaagaatggatgggatcatgatacgtaagtcaaattttgtaacaagagtaacagccaagactacagcatgttcctggtgcaagatcaagctccaagcaattctagatgttttcatatatcttttataagatgatagttaagcaacgtcaagaacaaaagttccaagagcccagcatacaaaaatttgttgcaaaaagcttttctgaccaacttcattcagcagtagaatcatatttactaggatttcttacctgagcaaacattaatccctgcatcccggacatactgaagggtttgaaggcggtcatcataggttcttgttgtaataatgttcgggtaatattcccttgatgtatcaagattgtggttataagctgtgaggcctgccttcttgagtgcttcagcttgctgtttctctatcatacccaaagtgcagcatacttccatccccatattcctgcataacataacaattatccactataactaaccataaatcagaaggtggtgttttcagatgcattggggttttgtttttcactcttttaattaatgaatttacaatgaaatggtatttgcaactactttggtctagctcaagtacttgggtcggtgagtgtatatgtgtgatgatacagtattcaagttcccacaactgtatcttataatatatttatatatatatatataaatatatattatacatatggggtatgataaatagtttttggccaaaaggtgtcactgtaattttgatataacaaagagggtgcaaaactcaaataaattaaaaccattggtatagtccagaacgccaacctttcaacaaaacttatactaagctacaacactacacttctgcagtataatgttagtatggcattggttggtagtacataactcttcgggcatcttcctctcatacgttagcttttgagggtaagttctacccaaatgattgtaactagtgatatcagagccatgcaatcttaggttggaccgacatcacggaagagacgaccagtggattaagcctagactgcgccaccgcagagtaggccgtcatggacgtcgggactaaaggagggtgtattgttaggatcccacattgaccaagtatgggtttggttggtagtatataactacttgggcaccctcttctcttagactagcttttgggagtgagttctacccaaatggttgtatcacataactactaaaagactagtgaaaaatatcaagaaaaaaaaatgacaagaaataatttaaaggctccaatcttcatgaaagtttacataataaaagatggcccatcaatgatatcaggtataataaaacacatgccagcagcataaactttaattcactgctactgacagaacaatttaatgatcatgatatagtaattaagagagcgacattgaacattccagggtacatcagattgaatgaactcatctgtatttaacagaatggatctccttcctgagtctattcactcttcctataagccaaattcaggtaccttatttctgtaacatattcaaggatctggttgaagtttgtctttcttcccactgtctctctccatgctgcacccatacaaaaacgtgtactaccagcctctttcgcctgcaaaggagcaaatcagatgatgctataaacagaaaagtgtgattagataacataaataaaacactaaaaagcagtagtaggaataacatagaataaagaacaatgagctgaatatcatttctgtgctaataaatgcttctcacagaaacttagtgaaatcatcaggtagacaaaacatgaatccattctcagaatctttttttggtatggtcatcaaaatctctctgataggaaaagacaataatactgcattcacaagaaagcctagcttcagactgatgagattcttttcataagatgactgcagaaatttgaatacaaataaaccttaaacaacaatataatattgtgatgtcagaccatagaggttaataaacattaggacagcatctgctcatagagtgcttaaaatttagaaaactaatcctgaagaggaatgcttgagtagattcttaatttgaagttatgttgttggttcttagcagcagtaaatgagataaaataaacagtaaccacctacaacagacaataaagttgtaagtttttcctctggctctatttggtgatacaattaggtcataggaggccaatatcacacactagtctgaagtttggaagttcagtacagcgagaggcttccaacaaggctctttcatactcaccaagtactggacatgattcattccggacaagtacaatatcattaaattcccattacaaaaaatagtccatgcatgttttcaatgagacaggttaatcatattatgagacgtagtttacatacaagtatattctaaggtttgtttcaccggtgtcatttttattagttgggattatagttcaggtcaaagttagctgtctctaggatataaatgtatgctcgttcgtgtatgcttcaggaaaaacaaaaagatcaaacacaaaaaatagcagcccagtaaagtgttaatgcagttagaaactccaaatgcaaccagcacggtagaaatgaaatttctacgaaattaatgctatcttacaccatcaccaatgcaatgcaagatctaaatatagtgccaaatttggaaccaaaaataaacaaatgatatatttggcacaccattcgcaattgtacatacacaagcatatgaagatgcaaattagttttaaaaagcaaaatatcaattgtaagtgaaaaatatgtattaaaatttctcgttaatgtttaatagtaaaattgtaatataaaagaactgtatttattgttgttttaaatttggctggcgatataatgtgccaaatttggcactttagcacaccattggacaactcacataaaacactacattactgttttagtaatacataggagaggaaagatagcacaagttgtgggaagacaaagaaattgaccttttttgctgcttccaaaacagcatctttggtcataagcttctgggattttactcctgtatcatacctggatgactgaggacaatatgaacaatcctcactacatccacctgtcttgatagaaagaagagtgcactgctgcacttctctaaagttatgagcatgtctgtgaacttgagcctggaaaaagaagaaaatggttgctatacattggaaaatattaagcaagacaatacagaaaaaaa

SEQ ID NO: 235057 - DNA, 1160 bp, Cannabis indica
tgagcctaaatggtgataaatcaacaaaaagaaaaaaaatggtaaagaaaaagtatgaacacgaaagttttttacatggtttttcagttaaaattctgcatagcccacgagtcaatcttattagatttctgatactgttttagggtcttttctcttatgaactttccgtccctttttcagtctaacttgcctctatttgtaattacatagtcaggcaattaatttcatagttgactgatatcttacaacaattatctcttgagatcgtgcggtttgattacataccacgtaaaataaatgcgattgatatttgaatatcacacagttatgattggtctgcttttactggttcaaagtaattgtgtattaaacacgttgtttaatcataacgttcagggatgtctcgttgggaacatgaaaaaaaatattatttaataaaataaaaaataagataaataaattttacaaaatacataatttaaaataatatttatcctatatataataataatacaaaataatagacccacttacataaaaaataaaaataataataataataatagacccaactatatggcgccaatccgtctctctcattctctctcttttttttttcatttttctctttagctttagacttttgatttctggtaggtaattattgttctttttcttttgcacgaggaaacgataatagatgatcattacaaatctccgtcagctgatcgtgaataaataatatatgagttgaaaaaataatttttttatcaattaattaaaaataccttaatattatattttattaaatatatctaattttttgtaagtatattatttaatatatcctcattttttacttaaatccaacatataatttatattaattttttttttttgacgaagtgattaaaatcactcatgaatttacgacgcccacgtccgccaccggcgctggaacctcctcgaatcaagatagctcatcgtctaaccgcagagcatgctttgccaaccatgggacgctaaaaacttagagcgagccccatgagacaaaactggccctagaaatttagacaataaagctataacatcttcaaacaatgctcctaactcaataaaatactgaagttccacctgaaaaaaaaaaacataaaaaaaca

SEQ ID NO: 235058 - DNA, 2817 bp, Cannabis indica
tacaaacaagagctacgagcaagataatgtgcagctttgtttacagaacgtttaacaaaattaattgtgactaacggcaaatcggccataagagaacgacaagccgccgcctgaaggaccaaaaggagaaggaatatccaccgcgctttggactgcctggacaacaaccaaagaatcggtttcaaccacaaccggtccccattatttcctctttatccaactcaaagcctccttaacccctacccccactcgtaaaactgtgaagccttcaatgaatcgaccctgataatcccgggccacccctgccgctccaaatcgactatcacttgcaaagattgcaccatcgacattaaccttaatctttcccataaccggtttcacccaatgctctaagtccattcttgaacccgtaggaacaagtaaagactccattctcctttgttgagcatttctctattgattaaggactactcttgccaatttcattgcttaaaataaaatacgagacttactcactttcatactaattcaccttaaaattatgtctatttatatatatatatatatttttttttaacacacctaaaaattgtatttaaaatctcataaaatatatttttttgtacctaaatcctaattataaatttatttttcatttatgaccctaaaagaattttctaggtcctttccgtagacttgagtgtgtctctcttcttatccgatgtatgatttgtatatttgactacgttttaatgtagtgcatgaaaatgtgaaaagctatttacattattaatgaatgtatacactaaaataaaattatatacattctcattccttattttttttttttttgttaaaacaaaaagtttctctatctagaaactactctactcgggaattcattacaacaaactaattataagtattaacgatacagattttatctacatataatagagattatcttgtgaacaaatttatattcaatattgtaattattatttatttattttatttttttttttttttgtttgagaatcagaaaccttatactgcctcaatcagcaactcacttgagtctgaaaaaaaaaaaaaactaaattttaagtaacaaacaaattcaacctgctatatatatatatatatatatatatatacttctctttacaaatatgaaaaatccaatccaatccatatctaaacatgtaatctttttctaacttcatttaataacgtccgccccagagattatacatgtagctgaattttgatcagaacaaagagtttgatttctatttgtccaaaagtgatgaagtaaggctaactattgtaactttaatattcgattataaaaatacatatacatataattcatgatcatgtatatctataatttaaaagaaaaaaaaaattataatggcatactctaccatatccattttgtaataatctagacaaatttcatttaatgatatatataaatatatatatatgggatgaaaataccttcgaaattctctttttataattactaaataaaattattaatcaaattgttgtaaaattgtttgaacataattatattctgttctatctgatgtatagaatttgatagaacagaaataaaaatcagattgtaaacaagcagaaactaaaataacgcacaaaacgtggtatcaacaatcctttggactcctagtttacgaggacacgcctagagaataaaatttattagataaatttgaagtgattacaaaattaaattgacttatagactttctttgaatttaccgcagctgttgtaatctatcattctaatccaatttctgaagtgctaagatcttgaactctcttcaaatcgtaacacttacacttcctcccgaaaaacgacttacttgtaatcttcctcccgattaagagtgtctaacttgcggttttcatctcgaaaagcgtcccacgaacaagactttctcccacagcttgatgaacgatatatctaaggtgtttgacctacacaattttaacaaaaaacaatcctgaataatataataataaaatactaagaatttattggactcaagtttttcacataactaagaaactctcttcaaatttgaaagtaattttcgaaataatagaaattaaggaaaattaattacctaaaggtgtatttatacactttagaatccctaaatcgtggtcaaagaaccaaaaaacaattaggtcaataaataaaaaatcttttcaaacaaaaaagttagaatttgtttaaacaaaatcagtctgttcaaataggtgcattgaacctgaatagtttttcaacaaagttttcataaacaaatgaagaagctttgacaatctttaatgatatgcttgtagtttcttggaaatataataaagattttttaaaaacaatacaaatataatatcaaataatctaaataaagaaaatttatatttattcatcaataattaaataaaaaatctaacttgtaagacttttcacaataagcaaagaaagtttttttttttttttcaaaattcataaatataaatacaaaactattttcaagaatatatcccataaacattaattttgtctattttattaaatggctaattacataaaacaccattttttatataaaaaaaataacattttatgtttaataaagaattttatttttttttttatatttttacgattttttacagaaacaacacaaaaacaacaagaatactatataaaagataacatcaaaataacaacaaaaaataacatataaataataaaaaatacaacaacaaattaataag

SEQ ID NO: 235059 - DNA, 938 bp, Cannabis indica
agctcaagcttcgccttagccacggcctcgtcccggatcttcaattctttggccttggccagtgacacctcctgcaaagcctcctggtgcctcctctccgcctcagcctccctctggtgggcttcctcccggaatgccttcctctcagcggccaggtctttcaaaaccttcatagcctaatccatacctctgaactcggacaggacgtagccctgatctatcaaagtcttcgaaagacgactagtctctgcatcaatctgccaagataataataataagaagttaagtatgggaggcgtgatgatataaagaaaaatcccagaaagcacaagtaaagacttacggcggacatggcggcgctaatatcttggacgtggctgatggcgttagtggaagtgcaggccgcatatctcttggcggggagctgggtcaggtgagacacaaactggctggtcagcccaaaggcaaaaggagcaagggtggggccaatgaaacggttgaaccaatccgatagaggatccatgttcagatcccaagcgttcgcgaaagccccctcccgcatggaattttgctgggcctcttgcaggaccttcttcaaggcctccgcctctgcattacccatggtgtactcgtccatggcatagttgtacctggccacccgcagttgctgcctttcctcattaggagggaccgaagtaaggacgatgttaggagctaccacatattcctcgacctcaggaggaatccctgattctgagctaaccgccgtagtatccttcctcctatgcttcttggagggttcacctttcacaatttttcccttgcgttttctatcgctcaaggccacgatctcgccttcttcttcctccacgacctcaccgtcctcgtcgagtaggatgatttggccaagagggtcgttggaggaagatctctctggg

SEQ ID NO: 235060 - DNA, 864 bp, Cannabis indica
aaaaataaaagtattactaaacgacacctaaatttttcatgaggtaaatagcggtataagtactcaaagttttgaatttctaacctgcataaatctaatattggatgaaaattacacttttactaacattaggtatttataccactaaaaaaattattaaacttatgccggttacaaacataagactttaaatatttatactgcaattatctcttatcattattaaaaatatttgcgatataaatatcttatcttttcagtttcatacacttatatgtaccacatgtttttttcgacaaattaactactatatgttatttttttcttgaaggattaaataatatatgttacgtttttacagcagctttcaaatcctactatagtatatctgactaaactaacacggatcaattgattaactatccactatcaataaatattttattaaataattttaaaactaaaaaaaactaaataataattatttaattataaaatctaattaaataaaaacataattttttattattatttttctcggggtttcaaattttagggggcgtttggtacgaggtgttcaaaataatttgattatagggaatattatgaaggagaatatgattatagggaaatgtgtaaactgtgtttggttgtgtagggtaatatgtaatcatattcctgttaattaaattaaactgtttggttgagtacatgaatcttatatattattttaaaaaattaaaataaaaatattttttatatatttatttaatgttaattatatataaaaataaaataattatttattaaagaaatttatttattaattagtaaatattaaattggagaattaccccatatact

SEQ ID NO: 235061 - DNA, 650 bp, Cannabis indica
atcctaaactattaggtgaataaaatcttaagaataataatctagaataataaaaatctaatttagtaatttttaacatattatatcatgtagaaaataaatacgcctcttccgagtctgttgttggttatgggtaatatctattaaatgtgcaaagatatagatatacggaggtcaccagtgacaaatgctacattggatcccaccactttacgttggttgagaaaagatcagaggcagagcagataccactaaaagcatttctaataggggtttcccacaaagtgatctttttcacatgtgcattttgatcaacatttcaaactaattttatgaatattattgtaatatatattatttttttattatttttgaagaaagttactgatcactaattaattttttgagataatatatataattataaaatttaattaaaaaaattgtatataggaccatgaaccattggagtaatttttgtaggaaaatatatcaaattttatgtggatgagggagaaaaataaaagaaaaatattttaaaatgatgtgtgtattttgagaactatagttatgggtgttgtccaccaggatatgctccaacttgtgtctaaatttccggggacatgcaaaaaatgataatagatctcgtc

SEQ ID NO: 235062 - DNA, 790 bp, Cannabis indica
ttactccatcactcaatattgcagcagcaaaaacatctatgcaaaataagcacttatcttctgattcacccgtcacagcaccctcttctggtctggttaacatctccagcaacaatcctgattccaccttggctcacgatgtttatgggaatgaaaatagactatcttctttatttttaaagaggcaactggttacttccagtggtaatatgcgtacagttttaaagcgatgttgtacaaatgcttccccacttgttgatgctactaactctcagatgcatgatcaacttgtctccccctctgacttctcaagcttgtcactagaggccgatggtgctaatgcttttttgtcgcaggctgatgttcagcctcgccaatcaccatgatcgtcatctcctggaatgctcggggtttgagcaacccaagagcagtccgtcagcttcgtttgctcatttctcaaacttcgcctgatgtaatttttattatggagtctaagcttagtgttggttcaattactaaatttcgtaatattttaaaattccctaatggtatagaagtccctagagtaggtcttagtggtggtcttctttttctttggaaatctgatgtaaatgtaactattcttaattatgataaaaactttgttgattgttatatgtcgctctctgatggcccttcttggcacttctctggcttttatggtgatccttgtgtctctcaaaggaaccttacttggcaattattaacaaagctcaaggtgttgggttttatgccctaaataaaactcttt

SEQ ID NO: 235063 - DNA, 1682 bp, Cannabis indica
ggtggtaaggaagaggcggacagtgtctggtggtaaaactttgtctaacaacgatagaggagcagcagaagatggttggaggtgtctggaattttttcgaatatgttggctgggttgaaaattgcaaggtggtgaaagtaacctaacaaagaaaagtgctggcttttataggccagaaggggtgcaaggaaattgtgatcagacaccatcgtatggtgagaatttgtagcaattccaattccgtgatccaacggatgggatgaacaggtgtcaagaggagaaaggacggtcgaaatgtttgagtacttctctaacattgacattaatgcaaaggtctatcaatggacaggaagcgaatcattgccagtaaaaggaaataaaaatcaatgatgacgatcataaatgtgacccatgcgccaggggcacgtgccactatatttattaaggaccggaggccgcatacaagtctcatttaactattactaaataagacttgggggaaaaatgttgcttagggtttttcccaaaatacgtggccacgactacgtatgacacgtggaccgaaaggacacctcacctgagaattagttgagacatatacagacgaacaagtgtagtttgagaagtgagcccccagagaagtacaaaaagcatgcctttcctctccgggagctagacatatgataaagcatctccgggaggaggaggacatactcaaacaatcacctcgcatttaatgcatcatggggaaaacttcttggaatgcccataagaggacatgtcaaacaacgtaagcctcgtttacggcaactacacggtaatcaaaggggctagtgacggctccattacgaagaatcacatcaatcaaggaaggataaagattaatctcacctaatccctaagatacctacagtataggttatgcatgccttattttgtacttttgggaacttgtgctcatatattgctggcactcaaagacaagtgatcccttcttgaatcttccctaccactctctataaatacccctaaacaaaatgggaaaggggatcgaaaaagggagagagaaaaactcaccaagaacattctctgtataagaactctcactaataacaaagacttgtggactacgagtcattaatgcccgaaccacgtaaagatcatctgcattaattatccctaaagctctcatcattatctcatttaattggttgtcgaaaatctcagtcaacactatgttatttattatgttatagtttcggttctattttaattatgaccaatttgaagtactctgtgttatttatttttatttattatgttatagaaccggttctattttaattattagcggtttgaattattgagtgttacttgtttttattcattatattatagaaccggttctattttattttataaccaatttgagttattttgtgttatttatttttattcattatgttatagaaccagttttatttatatttatatatctcatacatatacttctagtgacttttctaatgactttttcaagcgacaatgtctttttcgatgacctttttgacaacgatgacttttttggtgacaataacttttttggttggcttttatggctacagataacttttttcaacgacagtaactttttcggtcgaaacttattattagaagtttta

SEQ ID NO: 235064 - DNA, 1452 bp, Cannabis indica
cttgtggggtcttgaagttgtttggcaaagatggtgatctttagattaggtagcaggctgtttaaagagcttctctcgaaaaggttctgtctaaaccaactcgtagtagcatgcacctaaccctctcaatcagtgttccattcatcctctcagtaccattttgctgaggggttttgatcatagttttatgtctcttgattcccattttggcacacaatcccttgaactcatttgagcagtactcaaggccattgtcagtccttagtaccttgagtttgtttccagtctaattttctagcagcatcttccatgtatcaaaggttcctagagcctcatctttacttttcaacaaataaactcagactttcctgctataatcatcaaatatactcataaagtagtgtgctccacctttggttagaatcctagatgggccccaaaggttaaaatgaacataagctaacctttctgtggtcgtatgttctgccttgttgaactttaatctgcaagccttccccaaaacacattcatcacagaattcaagtatttctattagcttctctttgaacaatcctttcctattcatttcctcaagttctctctgactaacatgccccaatcttaggtgtcatagccttgcttgactgtgtttagttgagttaataacaggtgctgcactacctactattgtctttccatccaagatgtacaatccattactcaactttcctctcatcacagttttaataacttgtgcaatttttattacaccttcctcaactttgacaacaaaccccaatttatcaaacataccaatagagagaagatttcttttgagatctagaacataccttacttgctgcaaggtcttcatgactccatcatgattctttaacaagattgttcccacacctttgatctcacgtgctttgttgttcctaagaagaactgtgcccccatgactctctgaaagagtcttaaatagttctttgtttggtgtcatatgaaatgaacaccttgaatctagaatccaatctctacctgaatttgatctagacatcacaaatgcatcatatgacactacaagtgcatcagatgactcatagccatcatcaacatcagcaactccatgccttttggacttttgatgattttcgctcttcaatttagcctttaaagccaaaacattatctgtaaagtggtcctccttcttgcagtaatatcattgctttcctacagcctcattagagcttaaccctcttgtaaagtttctagaattggatcttgaatggttaactttgtagccatttgagttctgattttccttgtattccctcttggggatttttcccttaacaatgagtaattcttccccattggtctcttctttctcatctcccttcttttgaatttctttagattcaatgcagccttaacctctgtcatggtcag

SEQ ID NO: 235065 - DNA, 752 bp, Cannabis indica
gggttcttctacaaaagtttcatatctcagcaccatagtgttatccccaactcttaccctcaaagatgttttatatgtaccagaatttcatctcaatttacttttcatcacttccttgcttgattctggtacttgcatattcactttctaccatgatcattgtgttattcatgacactatgaagacccgactgattgggacggctgagagacatggcaaacttttctacctgactctttctaaacaaaaaagcaatccttttgtttcctgtttaatttctaattcaaaaattacaaatgacactatatggcactatagactaagccatccctcttgtattaaacttcattcattgaataaaagtttgcaatttcagaatgtttcttgtcctaatttatattattccatttgccactatgcaaaataaagaaaactacattttgtttctatacacaacattgccaaggaacgttttgatttgattcatattgacctttggggaccatataacactcttactattgggagttacaaatattttatcaccattattgatgatcattctagatatacttgggtgcattttattaaagcaaaggctgaagcacaagttgccattccaaatttcattcaattgattaagactcaatataataaaaccatcaagagtgttatgtctgataataataaagagttacaatttgttaatttatttagttctcttagaattattcactatcactcttgcattc

SEQ ID NO: 235066 - DNA, 917 bp, Cannabis indica
aggtgtaagccaactttaaaccagcctacatagataaaaaactttagagtctgagctaaataaaaaggattaaaggaaattgtcaagaaagacttacccttgtcaattccctcaagactcctcccatcagcagctctagggaagactcgtagtcagcatcagctagctgctcacttacgtcaggaaccaaccggttcatgtaatgggcgagcatctccttgcctttcttcgcttctaacttacaaaggtggagtaggagcccgcatctgctcagatccgctgttgaccagctcggatcaaccctttgattgctcaggcctgtctaagtttcctcctcgagaatctttggacttagcaactttcggtgtagaatggttcgcgacagctagctcctcagaaaggtcaataacctcctcggccggtgtgttttccttggaaggggtcgccaagccgcccctagatttcttggtcgaaggagatgagtttgagcttcctctaactctcttcttcagagcatcgagcatcttcttagacatgtttgcacggaacaaaaacagcatggttagaggaaaaacgcatcagaagcataaagcatgataatcaagaagtttaaaaacaagatggaatatcctgcgaaacgattgcgcgatcaagactcgagagtccatcgtcacctgataagtctcttatctccaccatagcagctttcccttttcctagcacgggagaatgtggccaagtaggtgaactgggctccctaatgtgaattgcttgttcaatgggcctgcgctgggctagaagtttcttccgccttttgagtggagtcacctgctcttcctcggcctcatcttcaggattcaaaggctcctgagcaaactgtttggcccttgcacctcctttcaacttagcttcacgct

SEQ ID NO: 235067 - DNA, 2033 bp, Cannabis indica
aagtatatttgtagtctcgctttttatcgaaaggcggggctattttttttttacataggcattgttgatgtagtaagtgtggaacactttcaaagtgttttctctagcgttaatttcagtgccaaatattactgtagcatatatgtaaatttgaaactaatgcatatgccgagcacttagaatcctttgttagctgtaaattttgttgggtttttttcgccattgatattaaagtgatggagaataagcaaagagaaaaatctgaagaagaagagaagtggtgtaatataatatagagaatgatttggagagagcgaaattgttatctgaatacttaaaatataagagaaaaaaactttaacaacatgccggcatctataatttagagagtgaattggagagagaaaagttgtcacctgaataagaagaaagatcttgatcacatcaaaatatggtcaaatagcaaataaaattcagcataatttacacatattctatataaacaaaagatataaaataaaaaaaatattattcagcaaagtctctaagcaaaaggagaaagagaaaataaattgaaaagagatcaaaagaaaaataagatgctatgatataaattataataaaaaatgtagcaaattctaataggaaaaggaatacattaatatagtaaatgtacaacagtaaaaacccattttttgaatttaatgggattcaaaaacccaatcgtattgatgtagtaaatccaccttcaagccccaactactctcctctcctgtttggctccacagaaaatccaccgagaaactgtgagaaactctctctaacacaccaatcaaacctactcttctgctccatatcttagattggaaaaacaaaacaaaatacatcatcaatttcgccaattcaccatggttgtataaaggcagccattggatacgcagtcctaacctttatgtggatcttatgtgcttccactttgggtgctgtaactgctgttctttccaccgcttttggtgttaatggcctcgttcggccctctcttttcatcactaccgttcttgttttcattctcgtcattgtttttaccttgtcggtgacctccttggtaagggtgtttgggaagaagtaaccttgaactctataattaaggctgatggcgaaacgaccgaagtgccctcaccgagaattaaacttgcagctcacagattcgtagctgggaacattaataactgggccaaggaaaacaaaatcatttgttaatattcagcgctatctagctaatcagtaaattttaatactatgtaattcttaaaaataacaattaccgtccccatatgatgccatggttagaggcgaagaaataatcttctgggcaatgttcgtgatgtccttcagagtaatttcgtcaactttcttcaggtttcctaactgagaaaataaaaaatcatctcaagtttacctctctccatatgtcaaaacttgcctaccgatatcttcagatgcaatcatctgcaacaattcaataagaaatagatatgaatgattgaatactcaacgtatcatatgcagccataaatgaatattcatctcgatgataaaattatcaaactatatgaaaatatgtcaagatatgtatatataagaaataatactctagattccagattcattaaaactgcagattttgtggactctttagcacgattaagctgcacttgggtaactgaaatataacaaggaaaagtaagaaagagaacccaagaaaatacacaagaggaaacaagattaaagggaagggaaaataaccttgtccaggtgttgcaattgaatgtaattttgctacagcaatatcaactgcttttgaggcaaaatcagatccctacatccgaatattcaacatcttcagtcttaggaaaaaagaaacaataatgtaatcattattctgggcgcaaaacttacctatatattactcgaataaagaaggaaagaaagttgtgactctcgaataattagcatcaaatatcagttcaaat

SEQ ID NO: 235068 - DNA, 1401 bp, Cannabis indica
aaattgaaataatataaattccactaaaaattaaaaaaaaatacaaaattaaattctaatttcgtaatcgtttagtgtagttactagctcaacatgttctattcgatacaagtaagaaaagaccccgattcattatttttaattttttttcttcgataattcgaatcaacttcttcttcttgcaccgaagatcttaccattttcaaaagaactagagttacaaccttttttttattattattattttaaacatattatatatatatttgaagagagattaattatattatttatatttacctttgagaaagcttatccttaaaagtatttctatagagttgattccaacgatgagattgagttaaaatccagtagaaaccaaaccagagttcagctgcaagtaaaccaatccaagcccatcttccaatttggccttgttttggtataaaactcaatctgtaaaccaattacacaataccaacaaatatagatgaaccaaatactctgtatatcattcttcctctaccttttttgctctcaataatgacattttttcatcattattattttccatttttctcattctcattctctctcacctttctctctcttataataacatatatgtatgtatatataaaaaatatttgtgtgatttattgtttgttgttttttatataaaagtcaacaacagtggatggaaaaaaaaaaaaagaaaaaaaaacagagagagaaaatgacacattgcatctcagaattacattttgtaattagttaatgattttttataattagttattgaatggcatctatacactccttgagcatttttttttttgtcaaaagaagcatatatgtttaaattaaaataagagcattattattcggtaagagtgatgcttaacatcttttataagtggggtttcatgattagttactgatattttttaaaaattatttttttaaattatgtgattctcttaaaataatagacaagctatacttcgaaaaccgttaacccccaaatacctttactattttaaaaacattcttaatcacatagacaaatagtataatattttgaatatttaaggaataatgggtattaaacttaaaaggaaaatttatttatgtttgattttaaaagggtaaaagtaaggaatagggatcctttgaaggttatgaagaatgctataatttaattgttactagccaaagagtaatccctttggctagttatagtattttatagggagatctagttgtctagtcttggtggttggttgattctcttccgtttgaatagttttctaattaaagatttatgctgtttttcgatatttttttcaagtggaacttcagtagtttattgagttaggagtgttgtttgaagatgttata

SEQ ID NO: 235069 - DNA, 790 bp, Cannabis indica
aaactaaacctataaaggttataccctatattaatttggaaagcaaaatgagattagataaattaaaaaatataggagagaataaataagttgataatttctcaactataaatgagaaataaaattgatacaaaattaaaaccttttcccatttcacaatatacatgaagatatacatattgataagataaaatcatattttacaattctatttaagatcatctcatacatatcccaaataaattaattagataaactacaataaatatagtgtcaaatttagtaaaaagaaaatcacacaatatttataattatacattaatgcatagaatatatgcaaattagcaacaaaaaaaaaataaatgagaatattttgtttttcttttatgagaaaaaatatcatttatgtttgcttagtacgtatttactgaaaaatatccttacaaaaaatatatttattgattatattatatataatataatataatttttctatatattttaactttaaataagaaaaaataataattaaaaattttccttaaaaattaaaatagtctctaattaatatcaattagtaaataagataaaatatttagtaattgcaaatgtaaataaaaaagaggtcatttattgtatgaatgttaaaagagttttaaaaagaggtataaattactccatttaattagagatgttcttcttattaaattgcatgattaataatatttttaatatatttcataaaattataacaaattaattctttctttcttttgaaaggataacaaaa

SEQ ID NO: 235070 - DNA, 878 bp, Cannabis indica
gatgatagaatagggggaaatagcatcactctgaatgacatagtggattctaataattggttaacgcatgctaatgttgtgagactcacaaagacgggatcccattacacttggaccaacaaccaggagaataacagtagaatttattcgaagattgatcatgcttttgtgaatgaggactgggttgatattatgccagatgctaaagctcattttgattgggaattaatgtctgatcattgctcttgtgttatttctatagtggtttctgagaggattggtattaaaccttttaaattttttaacttctggactgaacatccagattttaaaaaggtggttttggagagttggtgtatgcctctaaggagcatgggattaaaggctatctatttcaaactcatgagggttaagcataggctcaaagactttaacaggaacactataggagatattggaagaaattatcaagaagccaaagagggttacttaacagctagaagggaagctcaatctaacctgatggacatagtgattcaaagacaagaaaaggaagctgctgccagttttaatcttcaggaaaaaatgtaccacaacttcttgagacaaaggagtaaaatcaattggctttgcaaaggggatgagaacaattcctatttccattcgatcttaaagcaaaggagaatggagaataggataacttcttacactaatgagcatggtttggtggtggacaattttcctgaagtggctaattattttttatctcatttcaagaacatcatgggtcgacgcagccaaactacaagtcaaattgacccgagttgtattgatcatggggctaagcttagtcttgatgatcaagtggggctgctgaa

SEQ ID NO: 235071 - DNA, 1172 bp, Cannabis indica
tgtaattatccctattatataagatgaggtaagtgccacacatatgaacaattaaaattattctgcaccaataaatctgttactagttggataagaatatttaagtaataaatactatatcgtaaatttgtaagtatttctgtaatggtagattttgtttgatgacaatctctttcaaaaaaaaatcattctgcactcttactaaaatatatgcctaaccttcctgttcatatgaatttttttttttttcagttttgacagctggcatattagacaaaattttagaagtaaccaaattatttactattatattctctacatatcctttaaaattaaaacttttgatttttctttttgagataaaaagtttttgattttgttagttttgagaaatagtcatcaatttgactattaattaataattacattgaatttagtaagtctgtgatgtactccaaaataccaagggaaatttatgtctcacccggtaaaagaatgggtcaaatgaaaatgtgtgtacagaatcatttttaattaaaatatgtttatttttgttttatttataatatatactttttgaagagaaaaataattatcgctttacattatttatacaatataatttgtcactgcaaattgactggataatattaagaaaattatctgtttaacgcgtcgcttaacttgtccaccaattaaagtttttggcttagtacttacaaaacacaacagacactaaataaataagtatacagctacggaataaaatagactgatctatatttttttgtgggtcattgtaaataattactagtatatttacttataaaaggaaaaaaaaatggaatttttctatttctttttcttctaaaattttacttttataacaagagtaatgttacccacttaaattgtatatatatatactaattacaccatgtgtataaatattagttatttatattattaattagaaactataccacttttaattatatgattggtattaattacacattattatttgtaaaaattatatgcattttaaaaatatttttcagatttggagaagcttaaaataagcttcttttacatttttgatagttttttggtagcaaataaaaatatttcatttaaacttttaagatattctacgaacaaattagttggat

SEQ ID NO: 235072 - DNA, 804 bp, Cannabis indica
attgaaaaagcactgtagcgtgccttagcattatggcgttacatcaagtatgagtgaacaagctcaacttcattaatgaatctattattacccaatgctccaatcacaacaccatataagaaacacaagaatgaaatattattttgtgattatgaaaatggggtttgcacttcttaagattataaaacaaattaaccaaaaacacaaacttgaaattgaagaaagaaaatatttatggaacaaaaataggttggaaatgtattactcccaaataaatttatggaagtttttaataattccaatcacccatatagatgagacctaaaatagtatatacataaataaatttatggttcatagagaatatgaataaacattgtcgtacttggaaattaaccagataaacacccaaattagatcagtgaagtttctattaacttatggtacatgggaactattattatgctgaactcaacgaaaaagataaactcagccgccgataatgaaggttagtgacgatctagcatggtggacctcaaaaacaacactccggatataagaacgaatgaatgataaaatagatctgagatatatatatatatatacacagatatatatatatatatagaaagagagagagaacacatagagatagacagagatggagggagttttgctttacctgctaagccatatggatgatcatcgcacaataaggagaggaggaagactagccacagagagaaaaaaaaaagtgtttttaaaaattttaaaatcaacaaaaatctatttttaaaattctaa

SEQ ID NO: 235073 - DNA, 753 bp, Cannabis indica
  modified_base (20)..(20): a, c, t, g, unknown or other
tcatggaagtcgagccacangtaccatccaatttacgtgatctcgagaaatcaagcagctcgtacctctcgtatcaaaccaacactaaaagactcaacaaccaaaaggaaaactcaccatatctactccaaaccaatgcacacacgcacctatctctgtcaatagtgtgtccatctacggataatggttaccaagacatggggcctacacctaattaacgagtccaatagtcaatatttaatcatatttaccacataagtgagcttatttcatatgagaaaatcctaatagatacgggtcaaccagatccattagtcaaaaagcctatacctctatatacccctccatgcaaagggttacaaaaaatttggcaaggcaagcttgtttaaaaaatctaataaatactccatagccaatagcttaataatattgactaatgaactaaggttcattaacgccttaaccatgtgaaaatctcttcttattcattttttaaacacattttctttagcttaatcttcgtttaatcagtttctcaaaaactcagtgaataaaagcatttgcaagaatgggagattttagcacccctccaacaaaatcgccaccagtctgcccccttcgcagttcttcattctttgattcaaaactggagaacccatcatcgtaaccactgtaggtttggccaaggattttgtttttagaatttggtcatttgacgaaggacccaatttcttcaaagcaatagcttgcttc

SEQ ID NO: 235074 - DNA, 872 bp, Cannabis indica
gtatggacatgccaatgactcgcttaaggttttcgtaaaaattccactaatagggtaaaatacatgcaaaaatagatgattgttgggcctcttagaaggatttgtgctcgtgcgttgaagtagctggacaataggggaccattgtacataatgaacgtgtgtcaccaaaatatttaaccttgaaaagtaaatatctggaataactatttggcaaaaaggtgtgtgaggtgcgcgcactaccatgtcctagcacaggggagaagatctcatcatgtgttagagaaagcataaccgtcgttgggcgatctaggtttatatccaaggtagacgtctgtgatccttttaggcagtcaacatccgtgttaggccctttgattatccgtccaggtatcacttgggcaacctttgagcttggaccactccaggtcccagagtggtaataagtcttccgtgtcagggaagctaaagtatggaaaggtggatctctacatacctctcggtcttgccctattcctagattagtgaaacttctatgtgacttagtttaattgagaggttttcattagtgagatcatgagaatatcttttcctttttatgccacgtgtcacccatctgaaaacatgaataacatttacccccaagcttttgggactcttcaagttgtgggagcttgcagtcttcttccaaatttctgagataagtttaaaacacgtggtgattgctgagatcacgaatgtattccttgagcggtcatcaattaaaggaccaagaaccaatggtgctacaagcatggcatgcatgttgcgcctttaatacatctgttgataacacgcgcatgcagagggcacgtctttcagaagaagttgcaatg

SEQ ID NO: 235075 - DNA, 1503 bp, Cannabis indica
gctgatttagtggtatgctataacacttttctttctcaaattctcacacattacaaaatactcatactatatatatataggtctcagatgttgttccagttgcatgtcgtgcagcagccgatgccggaattcgctctgtttgcgtcaccaactttaggtatatatatatcatcattgattttcttccttctttgttcatggggtaatggaattcactctgttttcatttgtctaatttcttaatttgcactgtcacagttgggacttcatctatgcagagtatgtcatggctgctggacatcatcatcgatcaattgtttggcaagttagtagttttctcctcttgattaattggtttggtcataattctcttactcttagtttagtgtgttattatttgggttgtctctcttaaaattaaaatgtcatacagatagcagaagattattctcattgtgaatttttgatacgcctccctggatactgcccaagtaagtttatttgacatatatcctacatcttggcttttaccagatttttaactaatctctctttaattttatacttatataatttcagtgcctgcttttcgagatgttattgatgttcccctggttgttagaagattgcacaaatcccgcaaggaggtttaaggctcacagtttttttgtaaacccattaattgattaattaaccaattcacaatctcattatagtttcttctttaggtgaggaaggaactagggattgaagaggatgtgaagctagctattctcaacttcggtgggcaggttagacttaattgtcttatatactttgttgctttaatttgtgtgtatgacctttctcattagcagttcttcactaatacagagatcaaattaggtaaaccacttaagcagcagaaacattgttaatattggaaatttgagttcccaggcagctgaggatataataagttgcattattataatgaatcattagacttttttgcaacattcgttttcaaatcacattatgtatctacctgagattgcatatcaaaattgacagaatccagcttattttgattacaccttgttttttttttcttttttctattttgcagccagcaggctggaagttgaaagaggaatttttaccttcgggttggttgtgcctggtaattctcatatcttattctataaaaattcccttgaaagtgttcatcacatgagcatgtacactttttgttgttgttgttgtttttattaatttattttggtgttttactattattaggtctgtggtgcatctgacactcaagagcttcctccaaatttcgtaaagctagcaaaagatgcatatacaccagatcttatagcagcatctgactgtatgattggtatgtatgaatactgaaagaagtcaatgcaagttggattttgttgttacagaatagaatgaattgaacatatcatttgtggtagggaaaattggttatggtactgtgagcgaggccct

SEQ ID NO: 235076 - DNA, 575 bp, Cannabis indica
aattatgatgatgatgtttcttgccgtactatcataatttgttgggctctatgaaaggcacgaaatactttggtttggaacaaaaaagcttcttctccaatacagattctcacatcagcatggactatacttgaccattagcgcaaagctcaagataaaagttgtttattatcattgtctctcttaccaaatgataattaaattgagtggtggactaaaccagatacaaacacggtcaatattaatgtcgatagagccttttttgagaaagaaaatgcatacggttttgatgtagttgctcgtgactcgaccggtcatcttatcgatctaactgccaaataccaaggtggcacttatgcgattgaagttattgaggctcttaatgttaaggaggcactaagttggctaaaaggcaaaggctagagtaaggtggaagtggagactgatagcatgattacagttcaagcaatctttagtaagcaacaaatgacttctgtttttagattgattattaataattgtaaatttttattatcatctctacacaatgttagtcttcgtttcattagacgatc

SEQ ID NO: 235077 - DNA, 969 bp, Cannabis indica
cttaactggtcgggtcgccgcactccacaaattcgtgtgaaaatcaacgaacaaatgtgtcccattcttcaacatcctacgaggaaacaaacagttcgagtggacagaagaatgtgaaagagctttccaagagctaaaggcacaactggcaaatcctcccgtactttcaaaacctctggacagcgaggaacttggaatatacctagctatcacggaacatgtcgtgagtgccgtgttgatcagggaagacaacagcgtacagcatccagactattacattagaaaaagactcattgaggccgagggctgatatccgttgatagaaaaactcacatactgcctcattctagtaacaaggaagttgaggccttctttccaagctcatcctattcgcgtatataccgaccaaccactacgacaaatactgcaaaagccagattcttctggacggttactcaagtgggcggtagagttgggtcagtacgaaatcactttccgaccccgaacaacaatcaaaggccaagccttggccgactttgtggtagaatgcacaggcaaaaaagaaagcataccagaaagcaaccccgagccagcacctcagccaaagaacaatgaagacaaactgacctggaaactacacgtggatgggtcagctacaaataaactatctggtgcaaggattgccctcgtcatgccttgggggcaacacctacacactgtagtcaagttcagattcaaagcatctaacaacgaagccgagtacgaagctctaattgcttgactaaaactagcccgggagatgaaagccgaacacattaaaatctgaagtgattcacagctggtggtaaatcatgtatccggagaatacgaggctcggggagaaaagatgatagcatatctgagcaaaatacacaatctactcgcacaattcaaaagctacggtctcaaacaaattccaagagaagaaaa

SEQ ID NO: 235078 - DNA, 1717 bp, Cannabis indica
tgtcaggtcagctttttagtcaactactattatttactttgtattgattttgattctagagctactaattcatatgtagtggtcaagataattgatattggtagcttgaatatatgaaacagggtcaagaaccttgttacatgatagagaattagttagctccaaaaggagcattaggtctacgataattagtgaggagaatagggaattgagtgttgatcttgtaagattgggtatagtagagtttgatattatactcaaaatggacttttggtctaaagatgccactagtggtaattgtcagcgaaggatggtaacttttcaatctcaagtcaaaggattattcatgctatggtatcaatttggggttctcgaactccagtgatctctatgttaaaggctagaggcctattacgagttggatgtataggattcttagcagtggtattagacgccacctagcccgacatagtttggtctaaggatgttcaaatggtactaaaatttttggatgtgttctggaagaacttcttggattatcacctcagcaagatatggatattgttattgatttggcacctgaagcagaattgatttcaaaggtaccctatagaatggctccagtagaactgaaggaaattaatgttacaattacaggggatgcttgatctggggtttaatcaacctagtgtatcaccttaggaagcttcagtgttgtttgttaaaaagaaaggtgggtcattttgtatgtgcatcgactatagtgaattaaacacattgacaatcaagaacaatacttctgcctaagatcaatgatttattcaactagttttggggaaaatagtattctgcaaaattgacattcgctcgggctatcatcagttaagaatttgagaggatgacattctaaagactgcctttcgtactaggtttggctatgtcttttggactaaccaatgctctagcagccttcatggacctgatgactggagtgttcaacgatttcttcgatatatttgttatagtatttattaatgatatccttgtatactctcaatcgaaagcgtagcatgaacgacatctacggatggttttgtagtgattaccacaacataaactttatatcaaattcaaaaagtatgaattttgtttattcctagtgtctttcctagattgcattgctagtaaagatgaaattatggtcgacccgaaagattaaatctatagggattggtcaagaccgaagacagttaacaaaattagaattttctaggttaagttgggtactactgacaactcatggaaaggttttctaaaatctccatgcccttaattaagttaattaagaaaatcaatattatacaaggataggcaagtgtgaaactagtttttaagaattgaagcagtgattgattacggctctagtgctagctttgccattagatcaagaaaagtttgtggtctattgggatgcatctagaccgggactgaggtgcgctctgatgcaagttttcaagattattgtttatgcttctcattaggtgtaggagtgtaagcaacactatccaattcatgaccttaaacttgtggcagtggtcttttgtaatatcctgataagcctaatggtaaataattatggtttatatttaaactatgggttaatcatgtaataagttgttgggttttatgccctaaataaaactcattacaatctgat

SEQ ID NO: 235079 - DNA, 1292 bp, Cannabis indica
tgtatgtatatttttcttggacaaaatatgaaagttcaaaaaataagaaaaatggaaagaaaaaaaattataaaatgccacataaactaatacaaattaatatcattagtgatgggaatacaaaaaaaaatgttataattataatcataataataaactggtattgaaatggaaattatgaaaattaaaagacactcataattaatatgtaacttgtgtatgtgtagtttttttcttggacaaagtatgaatgcctcaaaaaataagaaaaataaaaataaaaataaaaagttataaaatgtcacacaaagttatttgtgcttttccttatttatatatatagatatagattataattaatattaatcaataattaatatagtaaatgataaaagaaatagaattgtggtattattttataaataaaaacataactgataaagaattagagctttcattttagttgagtatagcattattactatatttaatattagttaattgttaataacttgttacagttttattgctttactaaaaaataaataaataaccgaggtacatatagtaatgttcatataaaccgaaaaattacggtttaaactcggaccgcgacaatctaaaccattatagaccgtaactggagaaacctttttgatggtttggttaatccagaccatttacggcgtaatggttcagttgcagtttgtcataaataattaacagttaaaccagactggtttataataaataattgatttatatatattttatatatgatgaatgtgtataattttaaacttttttgtatgtcaaattttttattgcatgaattttagatttttatgttatgtttgacttttaagaatgtttatatattgttaattatatgttatagatctattacttatcatgttaaatatatattttgaaaaataaaattaaaaacttagtaaaaatagtacaattacttaaaaaaatataaataattatgaatttcaactaaaccgtgatttcgaaccaaaccaaaccgttcttaagggtttggtttggtttgagaaagttattggtctggtttagtttccaatattcaaaagactgttatacaggtttggttccaaaactatgaaaatttagaccaaaccaatccgtgaactgttggaatatgttttaccaggatctagatttactaccatgtatgttatataacatcctaaatatgaattctctaaaacaatgaaataaacacatataaagtttaggaaaccttacattgggtgcatcataatatt

SEQ ID NO: 235080 - DNA, 603 bp, Cannabis indica
tttcagatgagcgatctgtcggacagccaaatgcttggctctggaggtgatgcattcgatggcgatcaagaccatcaggaggatagctttatcccaacttcgatctcagaagaggagatccccactgctggagacacggagctgggcccgctgtcctctgcagacatcgagacgatggtgcaagagctcgctgaaccatgaaatattgagatgagacagcgagtctacggtgtaagcccgtgaataccttattcactccaggtgcgctcctgacgtcgaagtcgaggagatggaggaagactggatggctctagaccgcgagtcagatgaggaagagggcgctgagggaagtgggactgattcggtggataatactcaattggatgagcccttttcatgcgatgacttggtttcgcgagtcaccaaatctgatctccccactttttcaagattaaatttgctgcgactttcctccatgcgtcctcgtcctacccagatagcacacctttcctttactaaccctgcgatcatacccacagaggatgtggttgtttcgatacccatacttcgttgtggagtttcagtccctttccatccattcat

SEQ ID NO: 235081 - DNA, 794 bp, Cannabis indica
agttgtatatgggcattaaaaaagtgaatatgattagcaagctatatggtctcatcatattaccaagtaatgagacattgtttcctaatttgttgcgtatccatgattctggccttaacaaatatttgacataaatgacagtatatatatattcataagaatctgatagcggctttcatgatcttcaagctctataataaacctttgtcttatttatttatttagtttgtttgagatgattccagtaaagaatttatgaggaagcacatatgagcaatgtcttttactcaaggtttacaactgcattaatactgaagatagaatagaggtctataaaaggaataagatttttcccaaaaaaaaaaaaaagatttttctagtgatgattatagttgaggatttcgaaagatataggagttcaaaagggcaaaagtctaacaatacaaattgaataaagggaagagtgaaaatataattgagctatgtattgtgtaataatttttagtgaaaattacattatagtacttgctaataaagttacacaaatatggcattcataagtttactaatttcttgtggtatttttttacatttaaatttttttatggtatttgatatgttacatttttgtaaatctaatatccaaactcatattttattatttttatttttagctttattgattttattttttttagtttattttgcatttacatttgagaaatttacatggtacactaacttttgctattttttacaaaaatactgcctggcggtatttttttttacttttt

SEQ ID NO: 235082 - DNA, 859 bp, Cannabis indica
ttataattttatgagatataaataaaactcacttttaaagtgttcttcctttttctcacttaactaccagtattgtcccatcatggaatgaaaccacgtatccatttctcattcatccacatcatcattttgttaaaaaaataataataaaacttactctaaaaattaaaaatataaatagaagaacttaaaacaaagttgttatccattttaaaaataaaattatactcgatttttgagaggttaagaaagtcaaattttgaaaccttgaccaagactcaaagggaccaaacggggttaggactcgactcatgactgcatagtaccctatttgagtgtcccatggtacactaagaaggcgatgtgagcagaccatgcttgcaccgtaggattccgaaacctagggtttcatgaatttgaagtaggattttcatgcgaaactctaatccgatgagaaattcaacaagaactcgactcattgggatacaagaagatcaagagtttaacaaagagttaaaatggcacaagaacaccctctcaatagtgttgggcgagcattgccatctttttggttgctcgcccaagatgaatggcaaagaggagcttgagaaattgtgtttttccaacctcaagacataaaaccaatgaaaagagccactcaaaggtggaatgatatgctacgctagctagcaatgttaactttttagccaaaaatatggtattgttcccgaaaagataaatagagggaagaagcttgtcaaatatatttttctaacaataagacactgctccaaaatgagaaacaccaccaaagggtgatggactactttgggcaatttttggccaaaaagatggtatt

SEQ ID NO: 235083 - DNA, 760 bp, Cannabis indica
ttttttctttttttttttctaaaggaatgaaaaatactgaactaaaaatttagtttacaacttcaatgaacaaaaaaataacagaaagtaagaaaaataattaggaatgttcatctaaaaatgccattaaaacttgggttgctctttatcatcatatagctggacgttgattattttcttcaaaggggtgctagaatcatggcggacttggcttggtcaatatgacctcccaagtagagcttcaatcgttgcccgttaaccttaaaagtctctaggctttcaccttttagttccatagctccatatgggaatgctttgaccaccgtgaacggtcccaaccatcttgacttcaacttaccaggaaataatttcaacctggagttaaatagtaggactttctacccgcgttgaaactccttcctgactaagtttcggtcgtgtcatttttttgttctttccttgtagatcattgcattttcataggcctcatttctaaattcttccaactcattcaattgcagcaatcttttctttcctgcagctgctaactccatgtttaggggcttcatagcccaataggcagatgataagcttttttgtacaccaacctatacggtgacataccgataggtgttttaaacgttgttctgtacgcccacagtgcatcatctaactttcgtgaccaatctttccttgatctctgcattgttttctccaatatcatcttaatctctcgcttggaaatttcagcttggccatt

SEQ ID NO: 235084 - DNA, 1100 bp, Cannabis indica
cctaaatttacgtggaggcatggtccaatccttgagcgtctggattggtgtacctctaatcagctttggagagatttatttcctcatgctactcttttccatttggggttttatggttctgatcatagggttttgaagatcatgcttcaagaccccaattttgctactcaaagatctaaccggtttcattttgaaaatcattggctgaaagatccctctttttctcacctttttaattcatcctgggttaactctcgggattctctttcatctcccttgcaactctttcttgacaagcaattcaactgtattgctaagattaggagttggagtaattcccagcaccctattaagttccaaatttcccagactcaagctgacctcaataacctgctgagtgcttctcaccaaactcccaactctctctctcaaattgccactcttcaatctcgattggatggccttctcctcaaagacgaaatctactggaaacagcgttctagagttgattggttacgtgctggagacaaaaacactaaatttttccaccaccgtgcctccaatcgcaaaaagaacaatttcattcgcctcattactcttcctgatggatccatttctcacgatcatgccactataacttcccaatttcttcatttttataattctctcttcacctctcaaggtgtttgtgatgtggctgtcacttcccttctccaagggattactaataggttgtccactcatcaagttgcttttctagctgaaccttacacagaagttgaagttaaaaatgcgttatttagcctctctgcggacaaagctcctgggcctgatggactcaactcgcttttttacaaaagtaattggtccactctaggcacagatttcactaaggctatgcttcagattcttaatcatcagggggacatctccccaatcaatcaaactattattgtcctcatccccaaaaagaaaaatcctaagcatgttcgtgactttcgaccgattagtctttgcaatactttctataagtgcctttccaaagttattgcaaatcggttaagacttgtgcttcactccattatcagtatcaatcaaag

SEQ ID NO: 235085 - DNA, 1490 bp, Cannabis indica
ggagatgttcatttgtgacccaagaagtttaaatagttcagaccagaaggtccctgtaaatcttcgatctcggcacttactatattctggggtactccccaatacgtaactatatgcttgaagaaaagttgagatgtctcttctgccggacactgcttcgacaccgggatgaaggttgcatactttgaaactctgtccacgatcaccaagattgcattcaagtctccagtcttctgcatacttgtaatgaaatcaagcgagacagtctcccatggtctgcttgggaaaaacaaaggttctaacaaccctagtgtcttgtgcctctccactttgtcttgttggcaaacgagataggtccttgtgtattccaccacatcctcccgcatctgtggccaatagtacccatgcttcaaaagggcatgtgtcctatgccacccttgatgacccgcccacaacgtgtcatgacactcactcagtaacgtcctcctcaaatcgcctaccttcggaacaaacaaacgcccaccttggtccacaagaggtcatcctctaccctaaactgagttgtctttccttttcttgtgagagccatgatgttctttgcaattgggtccttctccaagttctccttgatacgctccttgattggtgtacccactcggctggctgacatacccgctaacacctttagagccgccaaccctgctttatgactaagggcatcaactgcctgattgagacgtcatgccttgtgctcaaagtaaaagtcaaattctgccaagaattcctgccatcgagcctgcttgggagttagttttggctgcgtgaggaaattactaacaacagtattatcggtcttcactaaaaacttcgaccccaacaagtaatgcctccacgtctgtaaacaatgaataactgccaggagctctttctcctgcgcagtatactgcctttctgcttcagaagcttgcggctctcaaatgccacggggtggccctcctgcatgagtacccctcccaaagcataatctaacgcatccgtctacacttcaaagggtttgcatacatttggcagggctaatacaggatcttcaatcatggcctctttcacacttcaaaaagcttcttcacacttctcagaccacgtccatataacacccttcttcaataactctgtcaggggtgctgttcttctcgaatagccctccacgaatcatttgtagcaattggctaaaccgagaaacgagcgtagttgtttcacattggctggggtcgtccactcttggatcgcctgcaccttttccaaatccatacggatcttctcgtgttccacgacatgggctaggaacttgatactttcttgagcaaacgagccttctctcgtttcacatataactgctctttcctcaacttctgaaacaccgtagccaagtgttcccgatgctctttgaaagtggcgttgtagaccacgatatcatctaggtacaccaccac

SEQ ID NO: 235086 - DNA, 584 bp, Cannabis indica
attaaggaaggaaggaaggaagaaagaagattaatttgactatttgagggaaaacaaaacaactatggtgtggtatattataattaataatattattgttggaattgattaagttgcacctcagtagtagagttttttccaaaatttattatttgtgttatatgataaattagagtcaatcattaaaaagttttttttccttcaatttttactataattcaaactttcaccgaaatgaaaaatacatttagtttatttttttaagaaaatcatagtattctctatcggaattcaaaatagcttatggaaacatataaattttttattaaggtaactaggcaacgataccgcgcctcgcgcggttatttagaaattttttgtttatgttataaaaaataaaatttatatttaatatattaaaagaaaaaaatattaattaattaatatattaatattctataaaaaaaattgtaatttttatatgttaagatattaagtcattattgaattgaattattattattattattattattattattattattaatatctatataataattacaagtataattattttt

SEQ ID NO: 235087 - DNA, 4824 bp, Cannabis indica
ttttgatttaataataaatttttttaattttttaagtatataaaatcaaatttcccatcttaaaacgaaaaatggtttggcgccctttccgtacgatcggagaagagaagagaaaggtatctccggccagaaaagttggtcaaaatggagttgattccgtacaaccacagccggaaaagcactggcagtatgacattgcagaatcaggtaaatcagtagaaaatcgtacctttgattttctctgttttttctttttccatttgtggttgcccgttgccttgttctttaggtccatgaattaagaactttccctaaacgtgaatgacatttatgtactgatcatttgattttaatttgtattaatgcttttcaatcactccatcacagactacgggtaaagctgataccaccaaattactgaaatcatttctctgtcctctgaatccctttcaactgttactactagtgttttctgattggtttattgactctttgaaaaggcttcacgctttgaatgcttttgtttcatatacatatatatatttatatacctattcacgctttgagtttgagtccatcatcttaaatatacattttatctcttactttgtgagatttagggattttgtgaaggttctcaccatcggagaagtagagtctggtatactaaatcttgattcttgttctcaacatctcacaaacactgttatttcccttaatttttatttcattttatttgttatctcttttctcaacagagattataggtgtatatatatgatctgtaagatattctctttagcaaacaaaccagcagttagtatttgttttacttcagatttctcaagagttaattagttaagaccattctttatttacttatgtttgtcaatcttttgctcacttttaactactttctaatctattattggtctttgtataggtgagaatccatcaagttttgatcttggtgaagttcttcagcctcacaatctgtttgaattgcttgtatatttatatttaaactttaaactaaggcagaaataaataacctctcttaacagaggaggttagctgttacaaaattgctagtaatctatgtagttaatagattccttcgaaactttcataacctcatgtattatagaattacatagtctggccattggaattttggatttttttttatgaaattatcttttatatatatggatattgcatatgctctggtcttactgtgttgaaacaataggctagcacttgctaagaatagcaagtctttttttttgaataataatagcaagtctttaagccaactgatttaacagctttctgattttggttggagtccaagacataaatttttaaccaatcaaattctaaaatgtagctgacttggagaatcaaaccacagtatgttttattctctagatttttgttttatgaagtattcatggttcaatactagtttttctatttcattttttttgaaaaaagaagtctgagtattggttatgtatgacaatgtccattacttttatttggccttgtttgttatagccagctcccccctcttccttttccaaaagaataattgtttgttattatgcttattgcatatcatgtatataattttctaactactacaagttaccatgttgcattcttagatcaccaagtatgattaggattagaatgaaagtttcatacatttattatttaattcaacccagtacaatttcactttctaaacagattcaaaacgaacaagaaagagggttatcttgaagacttgaaccatgactagtttttgctttttcaagattcatgatgactattcaatgacacaatgggtaagcatgttctttcatggctttatagttcctatattgtttttatttgtaatattttgatgtatatatagatgcaattagttagtcaatacaaaaatatgcaataaataaatttttactggcatataatagatcatgtattggaacaagtaatatcaaactttgcaataaactacacactgcatagtttgaatacagatcaagagactttttatcaaccatttcattaaagctgtctgttaatatattataacataaaaagatcaaactggcctgattgaaattatacacatgtatgtttgcaaatgttaggcctgtgattagtaagtgtgcttgcatatattaaataaaaagggtagagggtatgcaatgtattgagtaaaactcttcgcatcaaaggggcctaagggctcccatctgtttgtaattggttttctcatatattcaatatacatttcctacagttttgcctagtgttctgctgctattttggctactggtttgaatattctgaacaggttcttatcagcaaactctctcatgtacatgctgtgattcatgtaggcacttccaccaaagtttgtgaggctgcaaggacacacattggccgaaactgtatcgtttgttcttccatgtagccataaatggaagataggtttggtttccaaagatggcaagttatacctcaaagaaggatggccggaattcgtaaagcattatcagctatcttatggatacatgctgaaattcacctatggagggaggtcaaaatttaatacatctatctatgacacaagcacttgcgaaattgactatacacgtttttcttctccaaatttcacaagggagaagtctgacacagaaggtatagttcaaacttaaaatatcttataaggcatgagatatgataattctttgcttttgttgattgtaggcatgtccaagaaagctaaagctgaaaatcacacaaccaagaattggaagcagagtaggcatgtaggcgcgtataatacttacgaaggtaccaaagcttacgaagaagctagccgctttccttcaaagcatcctgttttccgcagaattttaaggactgacaaatgccatcgttataaacaggtaagtagtattagtagttgaagatcacatttaaattaacattatacagtgttgagtcaaaaacatcgatcaccctcgacaggaaccaaccttgctttaatccagaaaactaagtagcttttattactttgtgtatctattacaattgaatgatttaatgtttacaagtgagccttggatctatttatacacttaggctgttagaagtaaactaccgaacataactgtcaaaaataaacagttaatacagttggagttcatagtacacatggacaagtattagtaggcacacctaaactaacatacagttattcaaaatttatgcttttcttctgcagcaacttccagaacaattcattcggagttatcttgaaccaaaaacacagcaagtaacactgaaagtggggaccaaacagtggactgtgactcttttaaattgcagttctgggttcagtttctgtgcaggatggtccaaatttctggctgccaactccctatgcacaggggatgcttgtgtttttgaggtactgaaacggaagccagcaaaactaagagtgacaattttcagaaatgatgatgtttagttactgaattatgtacatcttttttttttcttcttcatactaattggtattttagtttgtcatgaaatgttgggatttggtattttagtattgttctgtgattttggtatatgtggttagggtagactattaaaactttgacttgtgctaattatattttatgatgcttaactattaaatttggtattggtgtaaacatatatggagttgtcgatcaacatagttacgttctttttatcactctttttttttacaccatgataaaatttgtgttatatagtatatactatgacttagatattattgtagaactctttaaagtcgtgggatttttaattagttaacttttcgaaaggaagccaaagaaattgaaaattttctttggtaatcttgaatttaggcactaaaagtcaagtttagttcacaattctctaacctataatcatcatcaaaggacactaatctaatagatagcaaaaaatgatcacaagtcaatgtcattgctagaaattagaaagtagataatgatcaaattttgaaactcaacaagcattatttccttaacaaaattcactatgattgtggcttgaacattatgccaaatacatctcattcattttcaaacttacaacacttaatttgttctgaaaggcatttcttagatgatcacaaacaatggagactgagagggtataaagtttggggtatttattttgtttcttttgaaataatgggcaagattttgttgatgtacaataacagaacatggtaagagatcatttaagccaaagacattgaaaaattccctttggtaatggggtagtcttagagaaatgtagtggttagtcttggctggtaggagtgtttataaaatatccaattcaatctaatttgtacgatctaatttaatctaattcgcaaagtgtggatatttgcacttgtgcagattagatgatgaacgacatataaaagtaaccgatccatcttgatgaaaaaacttgtttcttggtgatttttctagtgatttttttagcaacaatgccaatttcggcgttgacagcaactccagttacttttttgacactgacagctactccggcgactatttcgttgccaacatcaaacttcagcgacttttctaacatgagtgacaaataaaatttcctaaaaacaaataaaacattgaatatcggctttggaaacctaattcatataggaattattttacaaatacacaaaaataacaaaaaaattacaaaaatatagtttta

SEQ ID NO: 235088 - DNA, 1053 bp, Cannabis indica
gccactatggtaatgttattagtgtaatttcatattaaaatcttaactattttattttgaataacatctaaaagaaaatgctactattgtaaagtcttatctcacaatagtgttaagtacaaagcactctcaagatcttctttactttatactttaaaataactcaacaaaactctaattttttttattttaccttaactttttacgtttcaccatacaatttctctatatttttctctacatcattaaaaaattatatctttaaaaaaatttatttattaaataatagaaaaataaataacaaaaaaattaaatatgtatttaaagagaaagaaataaatacatatacatttagcaagccactaaggttagcttagtggtgagggagggatagaaaaaaagagaggtcatgggttcaaactcaaaatctttaagctattaaactattaagttattaattgattgtaaatactattatgctacactcaaacaaaagtacatatacatttaactcacttgtagaaggaagaccaaaaaaaaaaaagaacatttaactatatatttaactttagaactattatagcttatcagttgggaccgctctaatggcatgctcataacattaagactcttttatttttttcaattattaatgtttaaaagttattatatttttagtattattccaaaaaataaattagattaaattaatgtactctttgtttgtttttgttttttttttttgtttggtaaagaaaaattttgaatactcatttagttttgaaaataaacaaaaatataacaccgagctataaataaatttttgattttgtcatgtcgattcattaagtcaagttataattatattagtattagtatatgacaagttccaattgtcatataaaagaaaattctacacagagtgcactttctctttgtccacgactagagaaggctctccgacaaccctcgtgtggtttgggattttccttgggactgggaggttggaaagtcttcacattttggaaagacaaagttggttattccttctct

SEQ ID NO: 235089 - DNA, 795 bp, Cannabis indica
ctcccattgatatgagaagtgctttaaagtcggagttgggaattgggctcccggaaggcaacatcaaatatttaggtttgcctctttttcgctccagacaaaaggacgccgattttaattttattatggaaaacttgtcgtcaaagctccagggttggaaggctaagacgttatctaaagctggacgagctactctcatcaagtccgtcgggctatccctaccgatgtatgccatgcaaacgaccaagctctctaaccggcttgttgggaggattgatggtatggttcgcgatttctggtgggggtctgagaaaggtaaccacgggctgtatcttaaagcttgggacaaactttgcctccctaagtctcgggggggtctgggttttcgcaagtccaaggaaatgaatcttgcctttctggcaagatggggttggaacctgttgacaggtagtcaatccctttgttgtaagatcttggaagcgaaatacctaaaaggaaagatgttccttaattgtacttccaaaaattctgactcctggttttggaaaaacgtggtgaaatccaaagccatcttgaagaaaggagcttgtaaactggtgacggatggcaaagacactaacgtttggagtgatccttggattactcacaagaaggagttcatccctcgtcctaatggtatccccaggggtgaagtgaacaaagtagctgagcttttgttggaaaatggaacctggaatgttcccaagctaaacagcctttttgacaaagacactacttcagccatcttgaaagggg

SEQ ID NO: 235090 - DNA, 1837 bp, Cannabis indica
tttactcacaaatctggactagacttctaagccacacctgctcgctagattggcgagaatgaaatagtacgttgttaagtaaaattaaagagagacacaataatttatagtagttcactcccttgattggacagtaatggagctacgtcacttttgagatttttctcacgagatggtattacaaaaataggctatgtgtcaaagctccaattcctagagagagaaactagagagataagctctgaccttgtgggtagttttctgaatgtgtaaaaatgaactaagggagctatccttttataggcgaatgaggcccacaaaaataggagaaaaatacaacttagatgtttttgaccgtagatgatgatctaatggtgaaaattagcttctcaaggtgatagtcattttttggagcccagcgaaaccctctacgagtaacccatagcttattttcataactctcttggggtgaaatttgaggtcaatagctttaaaattgcagttgaagtgttagacatgacttgattaagcattgaattatctttgaaacaaaagttgaattgtgtcaatcaaatcaaatgagttatggttgttttactaaaaacaattcataacctagtacccaggttgatatccagcgcccaagttgacctcctaacgcccaggttgacatatgacgtcaacctgggcgctgggtaagtggaaaaatgtccaagtaatgaactttaagatgcctaagtggtattttgacatcacttaatcagtttttatgttttggcaaagctggtcaccagttctcgaggatgttgttgttctgtagaaatgagagactcaaaactcctcattttcgagtgagtttcccatgtcaaaaatgagaaataggaagttgtgaattttacatctctaacttcatggatctcagctattgtaaaaaaactagacagatggttgaaacaagaatcaaaatcggataagcataacccaaagccccaagccatttgacaacttgggcgctaggtaccctgtttctgagccctcgagttgtcgtgttgttacttccaaggctcttgaacttgaggacggggtctcctatcctatttttaaccattccatattcaatatggtggaatagatttggcatttgaatgaccgaaaccagcgcactaggttgattgtcaactttggcgctaggtctagcaccaagtcaacctaggtgttgggccctatttcaaggggtttaggtttatagttttcttcccgagttttcttgatataaaaatatccaaaacagcccatgtttacaatttgttaactagtgttgtaagttcgtgcgtgtcgtgctcgtccaacccatatttatttgtacttttcaaaaaaggagttgtgtcgtgctgtgccacaaaaaaatatgggtcgtgccgtatcgtgtcaatatttttaaagggtaggcccgacactgctcgtaagcctaatatttttgtgctgtgcttggattcatgtcgtactgtacttgctcgtaagcctaatgttttataaaaaaaactatatttttagtttaattggttagataatgccatacttagtggcatttactttttatggcatatttatcataacttaataatttttctcatatttttgaaaatagcccaaaatattgttaatagaggcataagcaaaaataaaatttttgatacaagaaggatatttaactatctttgaatatattgaactttgtatgaaatttgttaatttttcaaaaaaaaaaaataaaaatatatgcctcgactacaatttctctatcaaatttatattaaattacacacaaacttaacat

SEQ ID NO: 235091 - DNA, 802 bp, Cannabis indica
ggtgctctactgtgcaggaaagggtaaagctgtttcttatcagccatgagtatgcgagctggacggcgaatgtacatgttcgggccacactagaccaagcgggttggagtccaccagtgatgtattcgtgactctgttttgctgcctaggtcggctagtgaaaacgaacttgtattattattttgtaaaatacttttgggatcccgatacatgaaacttttagtttataaagtttaaattattataagtttgcttttcttccatttgtaattaaagtttaatttctgcgctaattttattagtaatcccttttaggggattaggatttcttaagtttattgggtagcgtgcctaatagttagggcgctacatcactctttagaaaaatcactgttgaattaatatcttttttaccctccaagaggtcccctttacaatgagttcaagggctctatttatagtgagctcttcacactttacaaccttatcagatctgtaaatcttaggatgtcaagtcactttcacacctaataatacaatatctcaagtagcctaatgtatcaaacatcctaagttacactaaagcttcctcttctacttgtaccttggattaactgaaccttgtctcctataccaatatgcattgtgtagttgctatctggtctgcgatccctgacttaaacatctctagcctcaatatcttctccttactttcatttgtatgagtagaccagatatgtgggaatcgaaggttgcaggtgtgcaagttgaggaggttacttgctgctgcatggagaaactt

SEQ ID NO: 235092 - DNA, 1058 bp, Cannabis indica
ggcctttagagagtcgtgtttagttggggaatcataattagaggttagaggtgttagaatttttggggattagtaagtgactaaattacccttgggagtttttatttattttaacttggtcaaaggttaaataggtcttttccttaattgttgtttgtcttgtagtggatttgggggctggttgtatttttatttggttaaatataattaaaggtaaagttaaaggaaaataaaagaaaaacctaaaaaaaattgatcaactttcttctctctctctttcgaacctcactctttctcagccaaggttttgatttttcatagttgaattcagaggtaatcaagggtgttggagcttgtgttcaaggtattgtgctctagcttgctctctttgttgttctttgctttttagtacaagttttgatgagtggttttgaattttaaggggctgtgagtttattgttggtttgattctcttttctggagttaggtgttgatggttttgagtgattagggctgaattagttggttattgtgaggttgtgatagaattagagtttaagagctcaagttggagctctaatggtggattgagattttgtgtgaattgttgtattctgttgcttggttttggattattacagtgcatataggtattctggaagttattgcaaagtttgggcttgatttgaagtaaggggattgaattttttgttcccagctcagaaccggtcgaccagttctgagaagcctctagcagccggtcgaccggttggtacccaggaactgggattccggttgggagtcggtctgacggttggggctttttcccgagccctagtttttcccgtttttacgtaatttaggatattggcatcctatttatcgatagggttaatcttagtttcaattttaaatccccgataagtgttttagcgtgtctctcatacaattctgaacattatggtttagggccctgtaaagcgtcgagctgcgtttccactcaggctgaccggcacacttgagcacgaaacgaggtaagatagcataagaatatatat

SEQ ID NO: 235093 - DNA, 1079 bp, Cannabis indica
tcagaacaatcaaaagtagaattttttttatgtatatacaggtaatcatcatcaatctcttaatcattgttagcatcatcatttttccactctgtatttccactcattgttactgtaaccatgtaattaatcgagcaaaaacgaatattttcatttaaatagtttattgatttttgagtacatgcatagaatagtggaaaatcattcaagtgatatatttgccgtacgtgcactgcattttgtaggacaaaacgaccggagttcactgcttggttggcagaggtgaaacaggtaattttaatcacactcgtcaaagccttttgcaggtttaatttggtgcagttgatgtagaaagaaagaataattttcacttgttttgttgagaattgttctatagttattacatgactggctctctttgtaggttaatttagaaagcttgcccagttgaaaataaaaatagatgtctaaggagtaagccaatattttctcgtcgaacaaataaaagtcactcccttattatttttgtttcaagtcaaagcacttttggtgaattctaatattgctccatgttattttgtacagattcatggaagaccacaacactgcaacttttctttctaaaaagtgagttaagtttgttagttgtataagctttatctgtgtcctgttttaagaggttttgtagaaactataaatgcttgtcaaacgatgttcatagagttaatctgtttctttttttcttgtaatatttgaaggccttttttcatacagttgtttcctctgtttaactgtgtagtttgggatgcatttttctgttgcttccatattatgtgactccttttgccaaactatgctttccacacatctattttatatttcctgctttctttgaagtattattatagactggcatcatccaaaataggtttgcaagaatgttatcaattaccaatattatatgtgtcaataataaaataaaggcgagataatagcttttagtgtgttgggagcttttatatcttattattcactgactcaatttgactttgtattattggcaaggataccaacatgag

SEQ ID NO: 235094 - DNA, 719 bp, Cannabis indica
ttagtccatttctgtgttttggtaaagttggtcaccggttttcagagatgttgttgttctgcggaaatgagagactcgaaactctttattttcgagtgggcttcccatgttagaattgagaaatgcaaagttatgaatttgacttttttgacttcatgactcttatttattgtgaaaaactagatggacgatcgagaaggaatcataatcagataagcagtacccagcgcaccagaccatttgtcaacttgggcatttggtgcttattttggagttttcaggatgtcattttgatacttccaaggttacagaacttgacgatgaggtctcctaccccatttttaccattttggagagaataattggatcaaatttggcatttgaatgatcgaaactagcgcaccaggttgattgtcaacctgagacctgggctcagctttgaggctcttaagtttgtggtttcttcctgagtttgcttgaatcttcgttatttctaatgacagaaaaaaaaaaattctggaacactttttcaagaaactgataggaactagcccagaatgacatcaacttgggccctgggcccaatgccaggtgtcaacctgggcgctgggtcccagttttggcctcctggaagttccgtttggtcaccaaaaatagttgactcttaatctttgctgaaaaagaagtttatgcccctgtttctcccgtgggttataggg

SEQ ID NO: 235095 - DNA, 1128 bp, Cannabis indica
cgctctaggcctaaccaccccgacatgtacaatcttcatctgctcgtactcacggctcctcaactttagcttttcccttacctagacatgaaaatatcactgtgagtcgatagactcactaaaaaagcataaacaataacatagctataacccgtattatgatcggatgcccatacccccaatcataaccctatcccgtgagccacacagtactgagtctagaacattcgtacaacagtacttttgacatagtaactacctatactcggtacactagtcgtactctagctgtattgatgtgatactgttagaaagtacggtactatcgaccatagtaatagcctatactcggtacgctagtcgtactctaggcgtacagatgtgatactgtcagagagtacaaaagccaacatacatatctaatgtaatctaaaaggcttactaacatgcacactaaacatgtaaatacatatgcatactgttatactaatcttacctcaattctgaattcaggtgcgctggccaacctgagacgaccaactgcttggcgaattacaggctcctaaatcacatcaatcataacataggtaactgacacactcatggcaataccctaaacatcacaaaaatgggaaaaactagggttcccaaaattgccgcaaccggaattccagttctgtggggtttcctggggactaaccagaattccggttcctacaggtccccctgaactggaattccggttcaatgcaggaaacttctaaaattccataactcagccaaaacaaccccaaatcaattgaaaccttccatacctattttatagaccacgtagaacatatctaaagcaataaaacacctcaacatgcacataataaaaatccaccatgtgagagcaaagtttgagctcttaagctcaaaccttgagcaaacctcataaaccacaaccaaaccagctctaaacatcaattctaaccatagttgaacttcagaaaacacaacaaacaaccatagcaagaacaacaactatcacctccatttcatgcaaaatcaatctcttaaaactcaagaaaactagtgaaggaaaagctaggagcttacccttgcttggaaatcactaaacttgct

SEQ ID NO: 235096 - DNA, 1023 bp, Cannabis indica
ttacctccaaacaagagccttgcctgaaaataaaaacgaggcaaaaaagatgagaagaaaagctgctaggtatcttatcctagacgaagtaatgtatagatgaggcttctcaatgtcgctcctaaggtgtgtcactaagacaaaagccaagcatttattgataatagtgcatgaagacttctacgataatcatgccgtggggcaaagcctatccaaaaagatactccgagaggggtacttttggtcaaccatgatagaggattcgatggactatgtcaaaaatgtgacaagtgtcaaagattctcaaagatctcgagagctccacccaacgagctcacattgatgcagtctccttggccctttaccatatggtgaatagacgtaattggtcaagtccaaagggaaaaagaggagtgcagtatgtcgtagacgctattgatctttaccaagtgggcagaagcttaacccctaccaacaataacttccacataattcctcaactttgttgtcaagaacatcatatgtcagtttggactgccacaaaagattgtgtcaaacaatgggaagcagtttgactatgacaagttcattgatttctgctatagacatgacatcatcaaaagcttttctgtcattgctcaccctcaaacgaatgagtaggtagaagctgtgaacaagacccccaaggacactttgaaaaagcatcttgaagaggcaaaaggaaatcgtctaaaattgatcccagtggtactctggtcgcataggaccactgagacgatgacaatcgggcaaactccaatcactttagcttatggttataaataaatgttgcccatagagctggtgccaccatctcataggaggataacctatgaccaagaagctagatgagtcctttgacgaggtagaagaaagaagagatcaagccaacctaaagcttcacgcctaccagtaaaaggtagcaaggcacttcaacaaataagtcagggaaaggaaattcttcataggagacctagtgctccg

SEQ ID NO: 235097 - DNA, 1305 bp, Cannabis indica
ttttgtttcttactttttaaattacgtaagaattactactttttttgggaacttttttcctcttcacttggtggattgtggatgctattaagatataagatatttacattgcatgtttaatgttgaacaaaaactaactaagtaatgtgcttgaatgtgaaactataacatgtcaataccaatgtaattgatttacgaaattagttacttgtagtaatttttaatgtgaagtagatcaattacaattttcgttataattacaaccttttgattttctatctttcagatcataatgcctatgcttaactacactttgaattacctttacaattacaggcattgaaagacggaaacctttatagacacaattgtttctatttatccgtaagctataaacggttgcagcaatcatcctttaaacttcctattctggtttttaaccaattctgccaactgacaaagtcaaggtgcctagcattgaaacctaacaagcttaaaaatattagcaacaatttctttgaataacaacaatcaaagtaaagatgcttgtggctctcctgctgcaaaccacaaacacgacagctagaatctgcaacaaagatgttaaatcaagaaagtcgatcctttattttatttgtcttataaatttgttatattttattaattgttattgtttatttatttattttttttttggcagaatgaattggatcggagatgtaatttcattatgtggatagaggcaagtggacgaagaagtagaaatgatttaagcggcttgtttaaaaggcttgaggaaattgagaccaatgttaaacatttagagcttaagattcaaggaagagatgaagaagttgctagaataattaagccattgaaaaatgtcaaatttgctatatatgtttgtgttggaatattatattttctattgtatatgttatttagtgtttaacaaatgtagctgaacaatttaacagtttaacaaatagtgtcaattggtaatgtgattgttcttcaaaagtattatcagttttagtattgaaatggttgtcaatgtttatattgaaatctatgtttgaaaaattatagcacagaactcagttttagtaacaatcagagaatattgttccatctagtcaagtgtaaccttctaattataaagggattatatgtctagtttagttattaagtgtgttacaatctttgtttgtttatcaagttaagctggatgaagaagacttgaaatacaaaaattgatcttagagttctcaaaaaatttcccttttcaattcatttagtcaaggc

SEQ ID NO: 235098 - DNA, 718 bp, Cannabis indica
aaattgtaccatgttttttttttctattttctaagggtgcgtttggttaaactacttttaataaattttttgttttttaatcagaaaagtaaaaatattttctaaaaccatattttataaaattgtttttacttttcaatttttaattgagaatcaaacttttaaacattttgaaaacaacaaaatgtcacactcaaaattttttaaacatttttttttcttaatcaatattttggactaccctaacatagatcttgagacccagacctgaatctggacctggaccccaccctagatccaaacccgaacccagacctagacctaacctgaactcaaaccccgactgcaaacctggaccccgaccacgaactcgaacctcgaaccctgtccttggccctagtcccatatatggttaccaagactatgacctaaatccgaacccagtcccaggcccagacctaaaccctggcctgcagccccaaacttgagttaaattaaattaacaaataaaatttaaagaatacatttttattttttatttttaaaatttaaaaacaaaagtaggtacagaatattttttatttttaaaaataaaattttaaaaataaaaatttaatttctatttttttaaaaaaaattaaaacaaactaattaccaaaaatcacctaaatttttattgtgttagacttttgatttaaatcctgtaagcctaactacc

SEQ ID NO: 235099 - DNA, 1026 bp, Cannabis indica
aacaagcaaggcatcatgcctttttgattgagcaagtttccattgttcaagtgaaattctagcagataacaccattgttgctgcattagatgatttgtcattctagacattctcattgcaggcactccaaattcctgaagcaaccacagcagcttcttcaaccacaccagtacttgaatgagacatcaaattggcccaccaatttccaaaacttcaagtaacaatacccagagaaattgaagatcgaagctagcaagatcttacaaaagtgtatccaacaagaacatgaaaaatagattcagcataggcattacacattggacacaaattaataagctccacatgcttagttcttagttgagcccgagtaggaaagcaattagaaatggcacgccaaagaaagtttcgagcttttgggggaattttcaaatttcacagtttgcgccaaaaagtctacattattgtctaaagaccacgacccttttaactcctaaataaaacaataggcactcttaactaagtagatacctaaagtttccttcttccaacactgcccatcatgtacagcagtagagctcaactgaatgtctaaaataagctcacaatctcgagcatcaaacaaatcatgaagtatattagtctcctaaactcgctcattcatctaaaataaacttgagacaaccttgtttttcaagcatgtgtgattggaaatcacatatgggtactcattatctggtaaccaaggctcattcataatgagagcttcatgacccccaccaatggatctacgaatactagctcaaagaagttgttgtgactcaaagatgctcctccaaatgaaactcgaattatcaccaagtgtagctgaaaggaacgaaccatgtggataatatctagcctttaaaccttaccagttagagaattacatggagttaataaatgtcagccttgtttgcctaaaagagccaaattaaaatcatgtagattacgaaagcccaaccctccaacatgtttatgacgactcaa

SEQ ID NO: 235100 - DNA, 1590 bp, Cannabis indica
tactttactgagttaaccatagccaaaacaaggtccacgaaacgagtggcgaatcccattctctccatcatagctcgaagaaaaccccattcaactctgtcataggctttgcttagatccaatttcaaggccatatatccctccttacccttacgtttcctcttcagataatgcattacttcaaaagctaccataatattatcggagattaaacgaccaggaataaatgcagattgagttagagagataacatttggcaaaactactttaaggcgattcgcaatcaccttagaaataattttgtataggacattacacaaagctataggccgcagatcactcatagaaacaggctgctttttctttggaataaggacaatatttgtatcattaagagcatcaggtaaaatagcagtatcaaagaaacctctaacctgctaaccacatcatccttcacaacattccaatatttctgaaaaaacccaggcgtcataccatcaggtcccggcaatttgtccggatgcatatgaaacagagcacgcctcacttcctcctcagtgaccggatcaaggagttgctgattatgagcccaagtaaccgcactgggagtagcatcaatgaccggagagaactgtaaagctgatgtcgtaaatagattcttgaaataacccaacataacatcaggaagtctatcatcccacgagacccaactacccgaatcatcttgaaggcgagaaatcgtattatgctttttcctagcagtagctttagcatggaagaacttggtattactatcaccttcacgaagccataattgcttagatctttggcgccagaaaatctcctgctggtttagggtctcacttaacttcaattcagcctcacgaaatcgctgaacagaaagagagtccctcccttgcttccatcgccgaatctctcttttgcactgagagatttttttcttgaaattacccgtatactcttttccccaaacagcaagcctctcaccacaatacttcaacttcgcacaaattgatggccactacaatgctcccaacaatcagacacaacttgtagacacatgggctcacgcaaccacgcattctcaaaacggaattgtcgaaaaggaactataaaattattcgtgattggctcaagtaataacggacaatgatccgaagctgtgatttcaagattagtgagcttagcaagattaaaccgttgataccactgagaacttaccaaagcacgatccagacggacctctatccaagtatcagtacctctcccacgctcccaagtaaatggataccccaacaagtcaagatcaatgaggtcgcactcagctagaacatcattaaacccatccagtaaccaccgaggataatcgttgcctcccctcttatctatctagatgactagtaacattattcatgtctccaataacacaccatgggagagtagattccgacttgagagttcgcaacaaatcccaggtcttatatcgcatactcctattaggctcaccataaagacccgtcaacctccaaggagaagaagcagcgtcagaaatctctatgtcaatatggt

SEQ ID NO: 235101 - DNA, 2154 bp, Cannabis indica
agatctagtcccgatctggtcgtctggttccatttcgggtgtcgggtcatgagctaggtcctatgttcaagtccgggtctggggtcggctcttgggtcccggtcctagttccgttgcctaggtctctatcccaattctgggtccacgtctcggttctggtctgggtttgggtctcaatctaggtttaggtctgggtcctcatggcggtttgggttttggtctcgttatgtgtatttttttgggttcgggtttgggtcctggtctgtgtcctggccctagtcctagtccggttccaattcaaattccaattgtgattccaagttcgagtttaggttcgagttcgggttggggttcgagttctggtcggggttcaagtcctggtccaagtttgggttcgggtttggatctcggtctaggtccggatcgggctccgggtgtgggttagggtcctgggtgtgggatagggtccttggtctcggtccaggtttaggtccaggtcccaagttttgatctcgaactgagttagggtttagttttgtttctaagtcctgggtttcgatcacagtttgggttcgtgtttgggtccgggtgcaggtctaggtttgggtctgattttgggtccgggagagttcgggtcccgagttcaggttttgtcctggtatgggttcgtgtccaggttcctttcctggtttgggtccggggaaggtttcgggtctaggtctaggtccgacttcagattcccgggtctaggttaggtcctagttcgggtttgagtcccggtttagatctggtctgggttccggggcctaggtccctggtttaggtcccccatccaagtccatttccaagctcctagtctaggtacaggttcgtgttcgggtcccgagtcttggttttagtcccggtcctaatccgggttcgggtccaggtctcggtcctagccttggtctgggttcaggtttgggtcctcatcagggtctggatcctggtctaggtcgcgggtctcatgtcccggggagggtttaggacaaggtcaagtccaggtcctagtacgggtatcggtctaggttcctgtcctggtctcaggtcctagtcctagtcaaggtctcggtccaggttttggtctaagtttgggttatgttttgggttcggttctggtcacaggtccgggtcctagtcgcagttccagttttgattttaggttagtgttttgttccgggttcgagtctaggtccaagttggggccaaggtctgagtctcagtcctagtccaggtacgagtttttcagatccctatctgggtccaagtctgagtccggatctacgttcaggtattgggtctggtcccaggtttgggtttgggtatgcgtctgggtccgggtttgaggtcgtgtccatgtcaaggtctaaatcccaatttaggtcaggggcttgatttgggtccgggatcgagtcccgagttcgggtttaggttctagtctaagtcccattcttggtccgtgaccaggtccaggactgggtccgagcacgagttccggggctaggtttcgggtcccagtccacgtgtgggtcatggtcacgttcccggtcctgttccagggtcctagtcataatctcgttcatgtttgagtttcgggtcccaggtctaggtctaggtccaggtcctgagccagcttcgggtcctaatccagttacagttttgggtctgtgtccaggtcttgttcctaggtcccgatccgcttctagtgccggttccagtttcaagtcacggggtacgggttcgactcgagtttgggtccgagtctgggttaagacattatttgggtctggagctaggttcaggtctgagtttcggtcttggtaagggtccaagggtaggtccaggtcccggtcccgttccaagatccctgtccggttacagttcaagtttcggttttggttccggatgtgggtttgggtcttggaatgtgttcgggtcctggtatgagttcgagtgtgggttcggggttcttgtctaggtcctagatccaaataccgactacgggtttggtccaagcttcgagtcctggatcttaagtcccgaggtgggtcctaggtccaggtttgggtctggggccgagtcccagatcgcaatccaagttctgacgcccaagtt

SEQ ID NO: 235102 - DNA, 1283 bp, Cannabis indica
ggtggggtggtgagaataaattccgagttttattgttcaaacaaagcctttattctttagatctttggagaccttggaatttttaagtttggataagctggaagagtggtcatttatcgaaggtggggtatttcctcgccttaagaaactgaggattgaaagctgtcattatctccgatgcttgccgaaagaactacccgcttctctttctgatctatgcatccgtacttgtccattattgctcacattccaaatatcactgtcgatggcgagaatatataggtattactgttttctcttctcttctgtcctaattgtttaaaagctttattgaatattgaatcaaatagtcttcaatttgtgtccgttttaggttgtgttgtgctgtgtgttcaagttcaacactcccagtcccaggtattatattttgctaaaaataagtaataattataatggttgtgagatgtttgacacaatcaatttatgtttttattgacaaattttgaaaacacaagaaaatgagattacacttgataaaatctgttaggtttgtgactgtggtctcttgttttaaatcaatttagaacattctttctagcctatttgacaccatcaatttttctgtttttattgaaatatttaaaatacaattgctcattctgtttcttttcaatctattaattagtctgtttttgcaggtataaatgcttctgagtgatttgtatgtttgttgctgaagaatggaagaagtcagttaccaccaaataaaacgtgagttggaagagacactggggaaattgaaacttcttctagacaacaaagatcttggtttggaccgtgtgaaaaattataagaagccagagagggtatgtgaaaaattatggtaggatatgcgtctgtggtcgttaggaaactataaatgatggaagaattttcaacaccagactcaacctctgtagttgacttcgattttgatgaatctaaggtaacttgaatacatcaacaaatcattgaataagtgttaactgaaacttgcttacacttatagttcatgattttctttcctatgctagtgacattgtttacatttcatagattgttggcttacttggcactcgtatatgtataaggaggcgagatggggcaagaagtgtatttcctccccgtgagggtaccttttccaaggctttatgtatgcgcactgcgcagtggcggacccagaatttaaagtgagggggggcgtaaataaatttaaaaaggaaatataaagtgtagttaatggg

SEQ ID NO: 235103 - DNA, 997 bp, Cannabis indica
tgcttgctgtgtgtgggcacttactctcactactacaaattaaactattcacgtcagtcaacgccactgttcatggcgttgaccgacgtgaatagtaatcaaataattggggcgtctttttaaaaatgacactaatactatgttatttgcgtcatttaggtaagtgacgctaaaagcaaaaacgacgagaataagcagaaaattaaaaaatttacatttcattttgcgtcatttattaaaagtcgagtattttattagcgagtttttaaaaacgacacaaaatacaataatgacacttaataaccaacacaacaaaatgtgaaaaccctaaaattaaaaaaagcaaaatcctcagccttctctctcgtgctactcttcagacgcttcagcctctttctctcatgtgattctcttctctcttcggtggtctgtggtctctcttcagacgacggcaaggagatatatcggatgcaaagatctaaaggtttgtagagaatttttggttgctgacaagtgataaaagaaaacttaatagtgactaaatcttttaacttactagagaggtatgtacaaacaatggtcgaaaattgccttcaaaatctaaatcatcagatcgaagatctgcctttttctatttctatttctatttctatttcttgctcttctttcttactctcgtgtctgaaattttctttcttcatctttttttcaacagccttctcttctattttcgttcgctttccactactgctttaacctcacacatatatgtttgtcactgactcaaggaccccagaccgtgcctctctttctgtaagttcttcacagctgatttaatgtatatacaggttttcttgttctctgtgtaattcatttcttgttattgtactcattgatctttttagaatgttcttctaatcactcttattagaaaccagttccttcttgatggaataataccgaattcatttgttttcttagatattgtacatgtgtt

SEQ ID NO: 235104 - DNA, 1057 bp, Cannabis indica
gaagcgatcaatagagacaggaaacttttacttgtttcactgtactttttgatatggggggaagctgcaaatgtccgtttccttcctgaatgcatttgttatatattccacaatgtaagtctccagctttatcagtgaaattcattgtagtgtttttctgataacttaattagtctcattttctataactgttgttgttaagtgggatagttattacgaaaaagaaaagaaaacattttattgatctgaatgaattgataaaagaacagatggagtacaggactttatataggacacagccacaaccaacttaacattaaaccagaaagttagttaaagaaactaacagatacaaccgaaacagaacaagaaaggaaagaaaagatagatacagtaataacagaattaactgtaactaattaactaccaaagacaaataaacaaatcctaatacccccctcaagatggagcgtagatatcgtagatggacatcttggaaatgtgactggtgaggatggtggatgatagaggctttgtaaaggtgtctgcaagttgaagtgaacccgagataggaacaaggcgaatagtggagtttttgatctagtctcaaacaaaatggcagtccaattcaatatgtttggtttgttcgtgaaaagttgggttgttagcaatgtgtattgccgactggttgtcgcaataaatgaatgctggatgaggttgaggaatttgaaaatcgtggagcagatattgtaaccaggtgacttcactagtagtagcagctaatgcacggtactctgcctctgcaaagctttttgatagtttgtttctttgttttccaagagatgagactatctccaaggaaaacacagtaccctgttgtggagcgtcgtgtaacagggcaagaggcccagtcagaatcggagaagccacggagtgttaaggctgatgtagacgagtatagaagaccttggccgggttttcctttgaggtatctgagtaaatgatgaactgcttgtaggtgaggcgttcttggtgttgccataaactggctgaggca

SEQ ID NO: 235105 - DNA, 1173 bp, Cannabis indica
ctaaatacctggtaaaataacttctaataggaggatctcaatctcttcctgatttgtgttataaaagagtatatatacatatattaattttttaatataattatctagttttggttgttgttattatttagaatagaaagaaaaaaaaaacatctatgtcacatcgtgatctagagtttgggtgattagcaccgattcctgatgcttgacagaccactcgtcataagtacggcaaatgatgggtgactgacattgcaagagagacatgggtatattctttaaaaaatatatattctttatatgttttgtctaaataaattatataattaacttaaatattattgtgtaattagagaaaatgactaccatacgtgagacataataaacacagtttacccaaaatattgaagggctaggcaattcatgaatcatgaagacgaagatctatcacttgtgcaaactatttttggaaaacatcgtgggcacctaaaagattatgggcatctaattagcacaagagagatgacatcaccacctacgttatacctagcctcctcaacctccagttggggtatatgttagagttgatgtcataaatgatatgcatgagtatattagacagttggaggaactggttcggacaaattctgtgacttcgagatcacaaattttgatttaacaatctgattatcccggtgatgaaggactaagttggtagttatgtttatatgtagtgtttatttctttcactcttttattattatgtttaagatttaggtaactatacttataaccttaataatgtgaaaaaaaaaattagggtatatttattaatgaattttacttttatcattatttgagcaatattaatgtcaaaatgtagaatatatatttaacatggaaattaatatttattatccatatttttggatggaggatatgtgtaaatctaagatagtttcagcttagatgctctagacccaatcacaggcgcaatcaagatacttgattggatccatagcaaagttaagtgttctgaattctagacagatgactcgtccagataagatacacctccagcacaacatatgttcgaatggcattggacagatctttcaaatgagtaattaatagaaatccagatatccagctccgtatcaaagtaatttattc

SEQ ID NO: 235106 - DNA, 2253 bp, Cannabis indica
cgcttgtacattatacttgcatttcgtggtaactttctcaaacataaattcctaattggggttgaaaatgaagacaccaaagcaaggattgtaacaacattttagttaccattctcataaaagggtatagcaatactaaattcaatataagatacatatgaagaagaaaaaaaatcaagtaaaagttgtaaaataaatgcaaagagaaacgagcatattttcacctacgaggtctttgaaattgattttgtgaatgcaaaactgttgttccattttccaaaacaggctttgtagaggctgtctacataaactcaacaataaaaacaaaacactataaaaaatgtgtctatcacaccttttattactcttcattcctccacttggatacatcccttctcgctaacatagataccatcgagaaacttacgaatatctttgttcttgacgtggcatttctgtaccaacaaaaaaaaaagatctcgaaatcttagaatatgcatgcaattaaggttaacaaaatttcacttattcaagtctgtccaatacataggcaattatgaaaatgaataagcataaaactcttgttagacagttatactgcatagttaaaaaattatatatgttgaggaaaaagcatagacctggtttatcagggcagcagaccgagacacgagctcaatatcgttgccgtccaaaacaagttcatctttaactttttcagacctgagaatagaaactccatcaagcatgtccacctttctcacctgattgcagcaaaaacaaaaagcacatataatcattataagttaagacatatagtccataaatttagataatcacatcgcaattagaatgcaaaagacttccaaagctgttccaggataaaaagaagttaaaatagtaagaacaaaaaaagattccattgtcaacaagtgtccttatatttcttctatggacacaatgattcagatgcatagcactcactgatgcaatcttccaccaaatctcagttaacaaaaatacaaaagtagcatatcaacttctctatcttaacaagaccccaaaatttcaccatgctgaatgagacagccgtggttaatatacattgatagcattctacttctatacacaataagatgatgttatctttgaacttgtaatgttaaccaactcctttcacagaatgaccatcatgtttcatgattttaaacaggcttaggcttttaagatgccatatgcaaatagaacctcttaacttcattactcaacaaaatcaacctccaaagggctttctcatcaagaaaacaatcacttggacgctaacgaagtgatgatactacaattgggaactcaaaagtataatttatatgaaactggtaactaattgtaatacttaaaacacagacattcagcaggcaaaagaattaaggcaagccgtttgataagaagcaaaagagaacaatatgaaaacaacccatttcaaatggaatcaagtcaaaatgtagatgtacaatatacatatcacatcttcaaaactaagctggtaaacaaaatcaaagactcacatacaataacacattaaaaatatcaaatatacaaatgtacatgaaaatgaactgtacgagtaccttcttctcgcccaagaagtttcgaatctcaatagacgtgccggtattggagatagaggcatttatgggaaaatgggcgtagacgaatcgcatcttataacggtatcccttagtgacgccggtaatgagattatcgacgtggctgagagccgtacgaatagcggcactggtcttcctggtgccgaaccaggattctatcttgagcttacgagttccggtggcctgatcagtgatgagctcgaaatcgaggtttagatgcttgaaattgcggacaagctttccccgaggaccttcaacctcgatgaccttggcgtgaaccctgatctggactccgtctggtatgtccatcgtctccgatgagagaatagtcttcattttagccctttcttttacacactcttctctctacttacgttggaacagagaaagaggcggctccttctgcttctttctacggctaatcgatgaaacccttgtttataaaccccggaattctttgtattatactttcgcccctaatttatgtcaaaattattatggaacccttttacacaaaataacattctttcccacaagaccctaactaggactgaatattggatgggttaactggattttgagttca

SEQ ID NO: 235107 - DNA, 2206 bp, Cannabis indica
cctatatacaattataatttctgtcccattagagggaccccaatcctcaattagaggtgagggattaaataagtccccataattatacattacttttttataatttctttttcctcttgaggtgaaacaacatccgcacaagttcaatccaattcgagcatatctgcatatgctaatatcctgaattgaattgcttcatttattttttgaacgcttagtcttggctacaattgaaaaataaaattggttgaacaccaaagtttacttattgcttctttctacaccactagtttcctttattgtttttatatgagctggaaatatgaacttgttgcttcttctattcattaattattatgatgttcaaataaccaaataatccatctttgatgacaatcatattcatagtgatctcaatctgaacttaacttgttagtcgtagtcaacaccgtgtcctacaagcaacttctcagtcgtcacggctcaataatttcacaatcaaactttacaactacaagggtctctattgcctgtacgttttaaaaaatcaagtacaaaccaagtgccagcaataaaaaaaaaatgtgggctttcactattatattagttttaagtcactttaacgcagcttcttttgcagtaattgatactatcaatgggtttcacgctatcaacgacggtgccaatttggtttctgacggagcaagctttgagctgggtttcttcagtcccggcaactccaagaatcgttacttgggaatttggtacaagaacgtaccagttcggactgtagtttgggttgcaaatcgttgcagcccaattaatgattcttctggcttgttgaagataaacaacagtaatggaaatgtgatgcttttgggtcagaacaagagtgtggtttggtcgacaagcttgttgaaacaaccgctaaagactaagcttcaactcctagacagtggagatcttgtactgagagatgaaaactcaaatgccgttttatggagaagctttgattacccttctgatacattgttacctgacatgaaaatggggtgggacttgaggactggtgttaaaagacgtctctcggcttggagaagcagtgatgacccttgtcctggagatttcacttatgggattgagtttaatccaaagcttcacagttttcccgaagcttatattcgaaagggtactgctaaattctaccgtactggaccttggaatggccttcgtctaagtgggtcaccagagttaaggcctaacccactttatgattttaactttgttctcaatgatgatgaagtttattacgtgtatggcctcaagaataagtcagtgatatcaagaattgttatgaatcaaaccacaagtattagggagcgtcttacatggattgaagcagaacaaacttggcggcgctattcatcggtaccaagagatgactgtgatttctatggtgtttgtgggggcaatggtaattgtattataggagataacccaatctgtcagtgtttaaaagggttcaagcccaagtttcaggagaagtggaataacatggattggtctcatggttgtgtgagaaatgtgccattgagctgcgttgatagatataaagatgggtttttgaaattttcaggggtgaaactgcctgatactacaaatacttggttgaacaaaaagatgaatctaaaggattgcagggctatatgtttaaataactgttcttgtatggcttatacaaattctgatattagaggtgatggcagtggctgtgtcatttggtttggtgatttgatagatatacgacaatttccctctggtggacaagacatttatatcagaatgccatattcagagctaggtatatgagccgctttttggcatttgtttatttaactatgtataataattaactacatattcatattatatgcttttctttgtcaaataggtaaatctgaacgaaagttgcgagtaacacttatagttgtagctgccattggaggtgtttctgggattcttttactgatttattgcttttatacgaggagaagaaaaggtgatggtttctgtttctctgcttcagtcacttttcttgactaatggtccatatgttaatcattaagtcaaagaaagaaaggagagatatcttgaattcctcaataataaatagtttagtgggtcaatgccttaatttttttttttt

SEQ ID NO: 235108 - DNA, 1326 bp, Cannabis indica
atttttattttttgaaaaaaataattaagcatttttctaaaaaaatgtttataccttagcgggagcctatatggcatatgactagtaacatttacaattaatttatattagagcatcttttttagagagcaataaatatggtatattgctaaattttagcgtatttcaaaaaataaaataaaaataaagcttcaatggtgatgaataaaaagtgtgccaaatttgacacatgctaaaaccctttctaatgggagacactaaaattatgctatatttgacacaaaaaatactttatgatatattaccatcaatttttagtattgtactctaatgtaaaattacaaaacttgatgtaaaatttaataattttattaaaagcattaaaaaaagggcatttttcatttttatactttaacacagtttttctttgcatttttacagaattttacatagaaactcctattgcaactagcgttgcctaaatcgcaacaaaaaatcgtatagcaacccacatagaaaccaccagagaaactactttagaaacccaaaccttaaatttagaaaaaaaaaaaatagtatatagggtaattcccctaaaaaagttatcattagttttatttataaaaattacaaaatgtgattgaaaatcaagtctaaagcttcaagcagtttttttaattatgttgcgttctttttgaggaaaaatattgtgaataaaagttctagacctctattttatctctataaaacatcttgaatcgttgaatttctagcaatattaaaagagttatagccaaaatattatcagtcatcgcaccagaaaactcgatgccaaaaatcaagcttcaagtgtcgcgacactataaggtagtgtcgcggcccgcctattctaaactggaaaaaatttgatttttttaatctttttttagctatataaagactccttttcaatactttccagatgatgagtttgggagtaagaaaattagaagggagaagtggctctgaagactttcaaaatttatttttcaaagagttcttccttttcttctatttttcttatgttcttaattgttataagatattttaaatgaatatgagtagctaaaatttttattagggtgttgatggagattgtttgacactttggtggcgtttagttgggaggaatgaaaacataagaataggaatgagataagatatgaatggatagataaaattaaaatgcataaaaaattgaataaaaattattaaaatttttctcatcatgaattggataatgtttccttctatttcaaaatgtaatagtcattacaccaaaatagt

SEQ ID NO: 235109 - DNA, 1266 bp, Cannabis indica
cttcttctccttcacgggcctcgacataaagtcccctgggaagagtttgtacttaacatagttggcctcagtggccagcaaagtgatgttccgagcagcttctgaaagttgaagaatattttgtgccctttccctgagtcctaatgtgaaaggagggcgacaatacgagggaatttactggaaccgagtggcgacagtatccatgccctggacgaagtagtactagtccacaaaatgtcatactttgttgacatcggtgtcaacagtgcccttcagccacttttcatccagttgagagaagtagaaatacctcaacttgctctacttaggagttaacttcaggtcgaaaaagccagttcgtgtcgtgcggggatggctcgctccatccttgcgaggcataaaggatgaatagggcggataagtatttgatgcccttaggagtaaattgggtcagacaaaggtggtagtagttcgtaatcttcttgaagtatggaggcaaaggcagcattgaaccctgcttggtatgagtgctgatccaggcacaaaacacctaccttggactagttgcccgatgatttagagaggggaaaaagcagtcaacatccccaaggtagccgcttctccaaactcttcatcttggcttgggttactatacatggaggagaaacccactgagctcctatggcaccttgtgttcactgaggatcagcctcggtgtattcctcagtaaagtaatcttcaccctctagcaagacttcaccagcctcggacacgggttccccttcctcagtgaaacctccaaagggcaatcctcaagcaactctgtcctcctcggctttagatggagtatcaggacagacctcgccctgatcctccacctcttggacttcgatgtctccctcattgtcttattcctcagcagcacgccgggcctactcagcactcagcattgtggcaagccgagccacatgaggatcagccaaagtagatcttctaactgtttgtttggtacgcgccatcattctatctctgaacggagcttgattagtgtgcttggtaacggtcatagtgaaagtggctatacgtgtacctacagcagcagaaattgggcgacgtacgggaatagtgtcaactatgtctggtcaaacatgtatgtccaattggacgcaaatatcacatccaccccttcctgacgctcccaagctaaaaatgtccgtagccttcacctgcgatctggcgggataaaaaatggtgttgcaccttggg

SEQ ID NO: 235110 - DNA, 1007 bp, Cannabis indica
aagcattattgcaaaatacatatatggacaaacaagcaggctcggctctgggcataggcgggctaggcctgtgcctagggcccatccagcccaggagcccaaattttttttttcctcttttaaaattatacatttttttattgattttgaaaaatctcacattttttctaatataagggctcaaaaaaaatttttccctatggcccactttgtttcagggccggccctgtgaacaagcattgtcatatagtgttgtatggtattgtcttaataatgttgcgatttcagctcatgttaaagatgaaatacactatattcttgcacatattagaaagatgtgcttggtggtatataattcgatgactccaaaaataaataaggaacttgttgagaaaattattaaggcattctctatgttacttacaccacagtcattgtcaatatgtatgaaaatcctttaaaaaacaataatatttcaaattaatgaaaaagctaccacaaagaaaataaaacttgttacttaccaatttagttgtctacatatagacattgattgaagtttatatttgtccttgtattatagaagttgatacactccataaaactagcaaggcattatgtgtgttgattcctttgtttatggagtatcgatcgacttctatactacaagagcaaatatagaagccgatacactccataaaactatcaaggcattatgtgtgttgattcctttgtttatggagtatcggcttctatactacaagagcaaatatagaagctgatacactccataaaattatcaaggcattatgtgtgttgattcttttgtttatggagtatcggcttctatactataagagcaaatatagacttctataagaaaaaggaaatggcattatagtgagaggagagaaatcacaatctgaaaggagacgatgaaaatgtagaagagactataatatgggaaatttacatggtatactaacttttgttatttttttacaaaa

SEQ ID NO: 235111 - DNA, 1830 bp, Cannabis indica
gtgcgtgaaagatcactggggttacgacacatcttgaacattccttcccgatatggaaggactcttgatgtttgtctcactcctagtgatgttttcaccctttgatcttttaaagcaaagtcatctcttgaatttttaagcaacttcatccttccctcgcggaagtcgtagcttgcctcatcaaaattcaacatgactctcgcatggacgatgttttttgtgcgttaaagatcattgggggtacgacatttcttcaaccctccttcccagaatggaaggactacttgaggtctgtctcactcctagtaatgttttcaaccttaggtcttttcaaatgaagtcatcgcttgaatttttatgaaacgtaagcctttccttgcggaagccgaagcttgcctcataaaaattcaacataactctcgcatgcatgatgtttttcatgcgtgtaagatcacttgggtacgacacatctttagccctcctttatttagacctcaaatgagtctgctcagtccttcagacccatttgaggaagcaatggcctcttcaagtaaactgcccctctaaagtagatatgttccattagtttgttggggcattaatggcccaattcgcaagtagcttgttgtccatgtttgggccaatacttatagtcctgccaggttaatcctgacccgacctacaggggaggtctggctgcctaaggcctacacgatgaggtctgctcaccaaatgattaagaacgttcttaatggaagtacgacctctgtaccacatgcactgaagtaccaactctgtactagtgttggtagggccatattgtacttccgggagctactgggtgttgtatcacatgcactccgtactcacttgtactcgtgttggtaacatcgtaacataaccctaaacgttatatagtgtaccaacaccctcaatattataattatcctatggttggtagtgtaaaacaatataatagtatgcattcacttgcatacacacatacatatacataatttatgttaatcttacctcgcttcaagattcaagcgtgccgatcgacttgaatggaaaattcccgagctaaacggagatcctatgtcacattatatatttgggttaataacttgagtaaacctttcccaaaaccctaaacttacaaccaagggtaaccttaaagacacgcagcatactattgccctaaatacaaggggaaacacccaactacacgctctgaaaattacacaaactggaaaaatggaatttttgggagtcttgcttgtgaattaactggttttataggtcctgtaaaatcagtagacctgtttgcattaaaaatcccaaaaattccagaattcggtcaaaacttccccaaattcaaccatagcttccagaacacctgcatacacattctataataatttctaagcctcatcagtaagaaaaaatcgcatcatcagcaggaacatcacaaacaaccttatcaactctagcagcatcaccaccatctttacccaactcatcaccatcatcggaatcagaatcaatattctctggatcaggtaatcccttgtcatcatcctcatcagcatcatcatcatcatcagaatcttgggtgagaaagtcatcaaatgacttaacctggatcaaaaacagtattggaactgaaataaaacaggaaaaaaataaataataacagcagaaaaaatatgaaacaagaactttgtaaataaatacctcatcagaaggtcgacgatgaatgacattaactttttcttgaatatccttaattgcagtcatgacagacttgaaattaaggtcaacaaaaca

SEQ ID NO: 235112 - DNA, 1938 bp, Cannabis indica
tttacgaggattttaatagaagttatactacttggtattggcatggtaaacatttagctgatgatccatatccattaggggagcaggggtagatgatattgagggtaatgatttcgatgatcatccattcgacttgcttgatgaagaacaggagaaatttcttaatgatcctaaaaaattcgataatttttaagtgatgcagataaacccctattcgatggttgtaaaaaattaagattatcaataatagtaaagttttacaacaatggtaaagttttaattaactaatgaattgaaatgttaatataatttttaaaacagagcataccagattatacggacaacaaatgcgtatcttgggccgtggccagaaattgcactagcaaattgtccaagacaacctaaaaactaagaatgtagtttttatgttttgaaatacatgactgacatcgttgcacgtgcaaaccccaaccgttatatacaagataaaaaatctgtaagttttaattattaattatattatttattatattaagaaataataatatatataaattaatataaatttttaattctttaaaccatttggagaaaagcagacatacgattcaaaaaccaaattattaccattacaacgacagtggataaaacggttgatggcggtgattcacgaaggcttgcacaaatgatgctgaaaggctaaaaaaaaattcttccctagcttatttttttaggttaacttgtaattagatttattaacttgtcaatacttggactaattttataatatttgtgtaatctataattgtaatttatttaattgcttctatgaaatgagattaagtatattgaccaatcataaaattaaatttaaaaatatttaatttagatttttcaaaatatttaatttatatttaaactaaataatatttaatataatttaaataaattaaatttgaggttttgaactgaaaataataattattaataaatatattattttaaccctacaacgtcggtttttatccctacacgtcggttattttggcaaatagcatcaattatttgtgaataaccgaggccataggatacatatggcatcagttctttaataataactgacgccataaggtatcatttagcgtcggttattttcaatcctacagcatcgcttggatcagcatcggtaacgaatttctccgaaaccgacgttcaatggccttaaatactgcatctaaagcctagatttgtagtagtggcagcaacgtatgcgacttgatgagtcgcgagtttcctgttcatattctaacacattggctcgcagactttaggtgtatttatatttgcaggatggcttgctggcctaacttttagatgtttgtgttctactttgatcgtataaacaaacatctcatgtgttgacaacatgaaacatgtgaattcttaacgagttatcaaacacattcgtcacttagactactcctatataaagaatcaatatttactaattgtaggagagatctacttggtcatcgcataaaatcgatatatgcgtgactagtatcaaatcttcttgaccctacttattccttatgctatacgaggcatagcatgcgactagaccatgtttcagtcgcatcatctcgcgagttctcttcaagcgaggttatctctatgggagctatctattaagacatcattctttctgttgggaattgggtgcacatgtcaattttatacaaggctatactcgtacttctagaaaaaaaaactttacagtataacacatgctcctagtttctcaatcacaattgtttgtcaaataacaaaactacttatgagagacaagcaagttgttctgtcacatgacgacgacttttgattgtcttgtcgagggttttgaagagacgactgcatttatttctttatttcctgaag

SEQ ID NO: 235113 - DNA, 807 bp, Cannabis indica
ctcccaagttcgattggaagaaataaaaatgctgcttttggttacgtgaaagataaggtgcataaacgaattcaaacatgggacaacaagtttctttctagagcgggtaaagaagtgcttattaagtcggttgttcaagccctcccagcttacactatgaatgtctttctcatcccagttggcatttgccatgatattgagcgagctattagccaattttggtggcgatcttcctctaaaaaaggaattcattggatgaattggaataagctttctgctcacaaagctaatggtggcatgggattccgagactttagagactttaaccttgcgcttttggccaagcaagggtggagactcctcacttgtggtgatactctgatgggtaaaatttttaaagctcgctacttctctacggggtcttttcttacggctactcttggtactaatccaagctacatttggagaagtgtgtttgaagctcaagcattggttcgggctggggttaggaagatggttggtgacggatctacaaccaatatcttgatggacccgtggcttgttgatgaattgaacccatttattgaatctcgacatccagctcttgttggtaactatgtaaactccctcatgaaaaccgatgcaattgaatgggatgatgaggtgattttggatgtgctaactgagcgtgatcaagctttagtcttcaaaattcccctctcacaacactatgttaatgatacttggtattggatgaaggaggaccatggattattcacggtcaagagtgcttatggcctacaacaa

SEQ ID NO: 235114 - DNA, 846 bp, Cannabis indica
aattagtatgaaccatacaacaaataacaaatataacattgcctcttcaatctcggccagaaccacgaactatcagaaaccttaaatcgccaccatcactgtcagcttgcaaagaaacatatgaattaatcacatattaattttaaggatattaattttctttttttggtaattggaaggctgaatgcaaaattatgtctaataactcaagtacagcaacaagaaatttcataaagtgaaagaagtaaactcacaggaggcacatcgtagtgagggtgaccctttgataagttgtaaatttcaaaaatggtgcaccccataatgcccacgtatgttatctttttccactttgtagtctcatctgtaatgaacaagagaaagagaagcacagaatcaatcaaatttccaaggaaacaaataataacaaccttcaatatcgagcagaagaaaacgcaaacaataccaaatcaaaagagatattcaatgttggtcttcccaacttatggtcaaaacctaaatggtaatggtcatacaaataacaaactataacgaaactaagccgacagtaggcgatacaaagagaattacgaattcgcaataaacttaaagcatgtgaacattataaactaacatccaattgaagtattcaatcccctgcttctcgcgtttcaaaccatgtaccaaaaatcaaaatcatagatcgtttttcttttacgaaattccctctataacaaatacaaatctaaaaaaaaaactcatagtatgttacaaagaataacaaaacctaacaagatcacaactgaaaacaaagttatctataatggcagtatgatctaatatttggaa

SEQ ID NO: 235115 - DNA, 842 bp, Cannabis indica
ataatgttgaagattggagctaagcaaaagttcaagttccatgatagatgtgctgaactcaaactgaatcacttgatgtttgcagatgatgtcatactatttagccatggtgattttaagagtatttactatatgttacaggggcttaaattgttttcatgttcatctggcctgcagccgaaccctaataagtctgccatatattgttgtggtatggaagactctgaaatgcaacgcattcttgattgctcgggtttcaacaaaaagaggttcctttcaaatacttaggtatccctatttgtgtgaaacgaatctcaggaaaggaatgtatggttctagcagataagatgacagccagaatcaaaatttggagcactagaaacttgtctttggcagggagagcagttctggttaactcagttctcatgtcaatccatgcatattggagccaagttatggtgcttccaaagcgaactataaagggatattgaagccatctgtcgagcatacttatggaaaggaaatcaggtttctcaagggccgggtccaattgcctgggatcatgtatgccaaccaaaagcagctggggggatcggtttgaaaagaatagcagaatggaacattgctgcaatgacaaaatatgcgtgggcaattgcttacaaagaagataacttgtggattaaatggatacaatgtgtatacattaagggagaggattggtggacttatcaagctccacctcaggctagttggtattggaggaaattaaattcggttaaaacacaaatcaaaggtgttatggacatgcagcaatttgtaagcaccaaatacagcatatcaaa

SEQ ID NO: 235116 - DNA, 1159 bp, Cannabis indica
gtaaaataatttccaacaggttaatggctgctcagagatcttcctgatcatgatgcaaggtgttgttatggccttgcatgagcccaatcgcttcttaaaagttttgaagttcaatgtcatctccacctgacctttgagtattattagtggatgagactttggtgttgggagtggtctgattgacagtcgtactagtatttccagtctcttgtacgcgtggtatgatcccaactagaggggaagtcactctatggcctattgtaggtggttgtgtattaacttgttcggggtttgtccttagtggtcctctcatgtttccaggattcgcatgtttggatttgtcaccattggattaccttgatcagtaaggcctccctttcaagtttgtacaaccatcctgttaacctgtcaagattaaaacaaatgcttatgtttttgctctcaatgaaagcaccaaaatattaacctcgcttctagccaacgatagtgagtcaaaataaagcgatcaaataagagaaataatagaaagcaaaaatagtaaaataaaaagaataacaaatattaaagaggttcgaccctataagaatggtaatagcctactccccttatatttgtattgacttgagagaaggaataaagtgttcttcctctctaaagctcttataatggatgtctgagttattttctctcttagatcactattctcacttgagtgcatttccggattaattctttcgtcccccttaatagagagattatgccactatttataggggcttaatacatgaagaatggtttcccttaatctataataaataaaacaggaaactacagtaattctataattacaatgtaaagaataagaaactaaggtgtattgtctttattctctagctcaatcccacatttatagggattattttcgtgtcttggaagtgacgagactgatctttggaactgccaacttatacgacttgctcggcatagatatatatgtatcttagtcgaacatcttcttgattaacttgtttggacatccgagtgttacagatatttagattaaccattaatgggctgctaggagtacttccctctgcccaggtaggaaatatgtgggacacatgtcatcctttctcattgccacgtcaaggtgcaaaaa

SEQ ID NO: 235117 - DNA, 816 bp, Cannabis indica
gggcaagcaggaatctctcgtttacaggtagagctcaattaatccactcagttctgcttggaattcgtaattactggatgagcatcttcataatcccccaaaaaattgttgaagccgtagacaaaagttgtcgagatttcctttggggcaagaaggagaataaaagcaaatttcatttagctttttgggagaaagtttgtctccctaagaagttaggtggaattgggtttcgagaagggaagaagtggaacaaggctttgatagcgaagtacctttgggctatatcaagtaaacaagataacttgtgggtgaaatgggttaactcgatctatctcaaaggtcaatcaatttggagttaccacacaaagcaggatgctacttggtactttaagaagttgctgaatctcagggtatcaacgagtgaagctgaattgaaccttgttgtcaatggaaagaaatttcatgcctcaaagttttacaacatgcagctaaaagagaacaaagtcaattatgttggtgcagtgtgggataaacttgtgttgcctaaacatagatttatctattggcaagttgtgaacacccagcttataacccgagacctgctgaacagatttgtgtcaattcaagatgtaaactgtccagtttgtaatcaagcagaggaaaaccataagcatgtgttttttgaatgtcctttctccaaacaggtggctgccaaagtgaaagagtggcttgggcaagtgcactggccgatttctgtcaaagatctcaacgaaaaatgctcgacaactcataataacctccggaatagagtgataa

SEQ ID NO: 235118 - DNA, 1786 bp, Cannabis indica
gcttcccacgagaagctcaaagatatttcagcttgtgcaagcaaagttagactaacatccacaacatgtttgtgttttctttctgcacgctcttgttgttgatgtatgaggacaagggtgcctgaactcaattcttagatgttgtagcaatggattcagaggtctgaactcacccactagtcagtttgtaaagcttttatttttgtttgaaaactcctctcaacatagacattgaattgtttgaagattgtagtgacttcatatttgagtgtcataggaaaatgcaagtgtatttaaaatagtcattaatgaaactaatatagtacttgaaaccttctgttgaattataaaacaagaggccccatacatctggatgtattaacttgatgtattaactgaaaaatagcatttgtcttaggtacagaactggaaaaagacatgctataaagtttgccaaattgacaagcttcacaaaaagaaatgtcattacattttattttaggactgagcctagttacaacagttcttaaaattctagatgaggggaaactgacactccaatgcgatagttgggagtttgtgttagctgtagttgagttcttggtgcaagtaaaggcttctggtgctccaatagatttggttgatgttgtggacacaggtagggcctttgagagatcaagattgtacaataatcctttaagagtaccccaaagaagtacttggcccaaagtcttgtccttgataagacatgaataattagaatcaaaaagcaaaataatgttattatctgttgtcatttttgaaatactgagcaaatttttggtaatatcaggagcataaagaatgtcatttaaggctaatgatttatttgaaacatgagtagaaatttaagtagaaccaattttttaaatatggatagaggacccattaccaactgtgatcttggctttacctttgtaatcagttggatttgagagctactgcgaatctgaggtcatgtgacgtgtagttccactatcaacataccatccattgttgtatgtctgtcaaaattgtggaatcagagagtagcgcttgggggttgttgttatttgaacttggatttaaagtaggattagcaggttcagaatcatatctgtgatagcacttgtatgcaacatgccctatctttccacagatttgacacacatgtcgattgccacgtccacaaccatttgcagctccatgagaagggccacttgagcttcctcaaccaaaaatttaaccacaaccatgataatttccacgtgaagatgttgaaccccttccatttggaacaccctattgttgacttgagcaagattttcttgaggcagatcaagagtgagatgttgattttgttctatccagatgttgattttgttctatccaaatttttgattttgtaacatgtactgaacttcttccgaggttagagaatctacacgggtagtgagtagaacaacaacagtctcatattctggaccaactccaccaagagtgtacatcgcaagttcttgatcggagagatgatgacctgctgcagtaagagactcagctagatttttcatcttgaggatatattcatcaatgttgagtgagcctttcttggtgtttgaatagcaaacctcggctgaacctctctaactttagactgagtggcgaagaggccagagaagctgttccagagctgtgatgaagattggtaatgtagaacatgactaatcatggctttagacaaatatttcatgagccaagacatgatgag

SEQ ID NO: 235119 - DNA, 736 bp, Cannabis indica
accacaattaaaacacataaaggtaaacgatcgtccctgtatgggagccatattttttgaccttcaaacgggaaaaggaagccagggcatataggctttgatatgtcatacagaactttgaaattgaagaagcctttggaaacaatcttaggaatatcgatcttttggatctctagaacttcccctgcaaaccccgccagtctctccaaattccctttagtgatcgatcgagcaggtagattgagaatacgtccactgataggaactctgtaagataaatttcccagttctgaggagttccattgaatctttccattatcaatataccattgttgagaaaccaaggattcttggccaagatcctattcaaatccttagtcgatttgaaagagaaaaccaagaaacttgctgcagccatggtgaatttgatttccacagtccactctttgtccgaaatgccccagacaagtccaagaatcgttctcaatagagaacgactcattgggcgattcgaacaccaacgttccatagcacagagtgcgtttacttcagatcctccagcttcattgatttcccaaccgtcttcatcgagcacggtcaaattgttagttctgttcaacagatcttccatggtggtatcaggattcatcatcttcgtaggcttttccagcatctcaggaaggctcttctccaagagagagcaacgggttttcaatataaaaatagctttcttttt

SEQ ID NO: 235120 - DNA, 1521 bp, Cannabis indica
acaaactctacaatatggtttatgttttagagccagaatataagttttatttgagtatttatgccatggggtttggtagaaaaccctagattatcttatgtgaatattaagcagtttttttgggataaacacttattggtttaccgctgttgtgactgctgggttttgtgccctaaataaaacccatttcatgttagaaaattacaatattattactggttacaattggttactggttaccatttaattatacactctgcttgttgttattttgtcttctttcacatgtaatcattgggaaatgattccctctctccctctctcctttctgttaggattcaaagtatatttttgttattgctaaaggtgcttttgtacggccaatgatgaggtgtaatcagtctagaatgttcttgtaatatctatataatgaattgaagttgcagaggctcattgagctgcattttacaaaaacctagtatctctattttttaagttgctatcagagcaccgccggcagtatggccaccagagaagaaacccctcaaggaactactaggtctgcagctccctctccaagaggcagcaatgtcgccaatccaaccatgactgcacaatatggtgcatcatcctccagccctgttgttccacagtttggaagcacattgaaccaaccgtttgctctcaaactggataggaataatttttccttatggaaaacaatggtcactactattgttaaaggccatagacttgacagctacctaaatggtatgcgagttaagccacaggagcttgttccagccccaggaatcgatggacagccaggatttgggtttgaaatcaacccagaatttgaacaatgggttgttaatgatcaactactaatggggtggctctacggatccatgactgaaagtatagccatagaagtgatgggctgttcttcttctgcagaagtgtggactgcacttgagtctttgtttggtgctcactccaaagcaaaaatggatgagtacagaacaaaaattcaaacagtaagaaaagggtctatgactatgcccgattatctcagacagaaaagacaatgggcagatgctttggccttggctggtgacccttaccctgaagctttactagtgtctaatgtgttatttgggttagatatcgagtatctacctattgttttgcaagttgaagcaagggataaaacaacctggcaaacacttcaagaaatactactgagttttgatagcaaactccataggctgagaactctctctggaaacagtaagtcttccaacaactcttcccctactgctaatcttgctaacaagagtggttcgagtggtcaatacagtcccaaccaaaccagtaacagaggcagagcaggctacaatggaggaaatcgaggtagatctggtggtggtagaggaagaggcggcagatcgaatggtcctaaacccacttgccaagtgtgtgggaaatatggacatttggctggccactgttacaatcgct

SEQ ID NO: 235121 - DNA, 809 bp, Cannabis indica
gtatgtgtatagatcagatcttaacagatctgattttggattggtgtttgtgtggtgatttctgggattcatagggtttggatttgagtttctcagagagaaactctctgctagggtttcgagggaaacttaaggaaagagacaaagtgttgagaagtttctcgagctttggagttttgttcaaacacaaaacgaaaccgttttgatattctgactttgaaaagtaaagtgaacagggaaaggtcgaaattgaccttaattattgatttgtttgttttgttggtgtagggcagaattgtaaaatacaatcttaaatttcctacagtattgattgcaaaaatatgcatatttttcaaatatataaatatatatatgtatatattatgacaaatatttaaatatatatataaaaatataaagtaactcattacctcctgagttaactggttatcttagcgatttttcccattgtttttttttttttgttaaaaaaaatctcataaagtaattttttttaaaggaaaaaaactatattattccatatattatataaaaactaatgaaatttgtaattttctcgtataacattttgaaatatttaagatctattataggtggtcctaagatttggtaggcctaaggaaaaaaaattactaggctgttatttaaaaaatgtgtgattttcaaagaaaaactaaagttcaagtgagttctaagcataaatctaacttgtttaaattgagagttgaccctacttatagcaaagaaagataaaatgaaaatataggaatgaagattaagaaaaagaa

SEQ ID NO: 235122 - DNA, 1813 bp, Cannabis indica
agaggaccgtgaaggcttcaatgaaccgcccttactttaacacttttagttttacagccaccacaaatttatcttttacacaataagatagaaaataattttttaagtaattgtttgctaatatattaaaaaaaaataaattctaaataattagctagcatatatttatagatgactttctttatgacaatcagatgttatttatttaaattttaattatcattataataatataatttaaaatatttattacttaagtattatagtttagcctctttataacattggtataattaatatatattaattatggtataatttaattaatatcaaattttatatattttaatttaataattattgtaatttttttaattatgtataagatatatggtctaaaaataatactataaacactatttatacttcaatgctcaaatctactattattaatgtgattaatataattgggacccattattattaatgtgattaatataattgggacccattattattaatgtgttgcatgtgcatggctccaccgtacgtacgttgcggcagtgatggagtagttggcagtaataaattcacatataataaattaatatctaataaatatgcatgcatgcatggtagatatatatatgtacggacacgtgaaattgctctccctctcactctctcgcgcgtacgtagccatgggacttaatgatgatcagaaatatatatatatatatatataaagagcattaatattttatgactggaaaaatatatatacctaactcatttgatgaattaatgctgaatataataatcactaattaaaaaggattaaaagtaaacaagaagaacaccagcaattatagaagttcaccccctaagcatggtctctagacttgtatttaagacagataacaaaactaacgaaagaactgatttataaacaataacggactcagaatttttgtggaggcttattattattattaaaaaaatatttatacatatattataatcactctaataaatttatttaattttgtatgaacttttactattttgctctataattattaaattaaaaaattacattaaattttttaaaatgtaattttttttgttagtgagagctagctatgcccccagtacatgattactggtgggttgtccttgcctgtaaactattgaaattataatgtaagcaaaattacttacaaataatggtgacactattaacacactaataaaaagtctagctacccataattattgtaaacacatccgataaaaactaaataagaatataaaaaaaatagagaaaaaaaagaactacttcgaaaaataaatgttgaaagtctttagagccgcttctcgcttctaattttcgtcctccttaattgtgtgttctaaagtgttgaaaaaaatagacctttatatagctaaaaaaagataaaaaaaaaacctaattttttcatagtttaaaataggcaggtgctcaatttttggcagcgagcttcctcgtgagacgcctgataatattttggccataactctttcaatattattcagaattgaacgattcaagatgttttcgaaagctgaaagagatatctaaattttttattctcaatatttttcctcaaagtgaatgtatcatagtcaaaaatttacttgaagttatggtaatgacattattattttatagtattgatataattatgttatgagtatgatattaaagttataatttatatatatatatgtataatgtaaacagatagtatggacctatatgataaaagtttcc

SEQ ID NO: 235123 - DNA, 818 bp, Cannabis indica
gcattgatgatccaaatctaaagaaagccttcctttcctttataccagagccacttggcgaagaaactttcaagctactctcaagatcgggaaaaaacctaacggatgcaataattggagaaattctccaactagtcttaaaagcccttgaaaaaatgtgctcccagaagaaatttctccaagactttataaagcaatccaaacaactaggaaaagtttgtagcaaacgagatttactcatcaaatacccttttgaatcttcgtgttcatagaaaaacccaaagaacaaaaataagttcaaggcgttcaagttcttaaagcacaaaggacgcagaataaaatttttgcgaaggaagcgcgattttcagaaaaaatctgatcgatgctatgtgtgtggaaaaaatgggcattatgcaaaacaatggcctaaaggaaaaacagtcaagcttctctcacatatccaataaatgactgggatgtctcttaaggaaaacaacatagagtcaatcttctccacaaatgatgaattcaactcagaatctctttgtgcatccgaacaatggagtgattcagacactctagaatgttatcaaatgtccactattcacacaatgcaaccatcccatgtcatcattatgtaagttcttctaacaaaatatgccaagccaataaaagtggcagcattttttgacatgggagtgtcatacacgataatgaaccccaatattcttccgaaagaatattggagaaaagagaaacaatactttcatgctgcaattggaagtatttttcgcacagaactcatcagcaaactgatt

SEQ ID NO: 235124 - DNA, 693 bp, Cannabis indica
ctgcctcctcaccatgcacgacaccagccctcccagtacgtctccgcttactgtccagcaacaccaccaaatcttcatcatcattattctcctcatcagatgccaatgattgagcatctccatccccaccaagctgtagacacatcttcacactttccatatatatttctttctttttttgccttcctaatttcatgggatcatgatcaccaccatggtcaacacaatcaacatccatgatttttggggaagcatttactttagtatcatcaccattcgaacggccggcgctaccaccagccaccgctccaccatccagatcagtccgacgtcattgagagccaacacgataatttttcctcctcatatccgcacgcatagcagcaccgtacggcttcaccaactgctcaacaggttgttcaaatcatttcggacatgaacgttccaaatgtccaataattccacacacaaagcaaaaggtagggaggtgttcatatttaaagtttgcccaaatccactctccattctccttacaaagcttcatccttctctttagaggcttagcaatatcgagtgtcgtacgaacacgtaaatattcttgccaaatgccattaaaattcttcggatcagatttaatatacgtacctatatagccacctgcactctgaaataccctctccaacatgaaacccg

SEQ ID NO: 235125 - DNA, 1373 bp, Cannabis indica
caaccattccagctggtttcgctacttgtggttgaacaaaatcaactctattttgacaaaattttgtcgccggagataccttttcttctcttctctgattataggtattgcttaaacatgatatctccattttatcggtcattgcgcgagtctcattagatccttcaagacgttatctgctccataaaatttaaccaatttattttttgattaaaacttcatcaatctcaaagtttggcaaagagtaattaatttttcttaaaattgttgcgaaggagaagctttggaatatttgactaattaaactctgatttttcacaggatcccatagttttagtaaatcggttagggttaaagaaataggttttgttttctttaagttaacggttccgttaacttcacgttaactttcaattttcaaaataacaaaaaaaaaaaaagaatacgttaaagaaaatacgttaaactaacaaaaaaatacgttaaactaacaaataacgttagatagacacttttatatataaagatatatatttgtctaaagaacgtgctattatatttggctaaggttgtttacctgttattacataagagaggctttctaatatgaatttataagaatgttttttttttttttaaaaaaacttttaaaaaaaaaacgtaaactaaaactgaaagtggtatttctctctctctctcttccctcttccctctctctcgtgcaccactctctctctctaggaaaaaattgaaaaatttatgaaaaaccgaacctaaatccgtcccactctctttatttgctgttgcatggttgttttctcggtgggtgttggtggaaaaccgaagcacaatacaacatcactcaagaatcttacaccattataatgggtaagttgcattttaagcattttgtttgactttatgtagtttaaaattgttatacgtgtgtttattgttggaactgctgttttttggtctgaaattgttgagatctggcagatctggttttcagtcgatttctgggttttccagtgttatcgatgatatgtcgatgatatgtcgatggtttgtcgatgattacaaaggaaaggtcagtgacgaccattatcgacgttatgtcgacataatgtcgacatgttgtcgacatcatgcaaccaactttgggattaactatttgtcgacattttgtcgacagtttgtcgacaacaagcatttttctttttttaagaagttgtcgatattttgtcgacatgatgtcgacaaaatatcgatgcaatggaaaaataccgtggataaaacataaacataacataacattaacagaaaataaagttcattaaaaataacataaaaaaacataaaaaaaaaacaga

SEQ ID NO: 235126 - DNA, 719 bp, Cannabis indica
ttttttttaaattttttttactaacttgtgcttctagttgtggttttaattttcagatcttcctttagaaatatggcaatgtacaatcaacaatcctatgatccttattatacctcaccacaagagtaccaatataatccctactatgacacttatacatacaatcaacaatggagagattattctagcacttcctacaatgggattaatcaatatgttcaaccaatttcttactatcatagtcatgttgcaccatatagtgaagagccaactactgctgaggtgattgaaatgttcgcagctgataccttgtagtttcagcaaagttgtcatgaaattatgcagagccttcaacaatctctgcaaaagttagagagtcttgcggagccaatggaaacatctatgagtgagtataaaattcaatgttcaaactctatgccttcacatgtagaaagtagcccaatggagaatgtcaaggccataccaatccaaagtggtacacaacttgaatcactaccacaccaagaagttaatgatttgattccaagtcatgaagtcaaaaattcatcccttgaagagtcatctccaccaaagggtgaatctcctattttagttggtccaccatcaccgaaaaagtcatacaaacaaattgtaccaacttatgtccctcttccaccttttccaagtagattgaaaaaatcaaagaaagaggagcccat

SEQ ID NO: 235127 - DNA, 1809 bp, Cannabis indica
atttatcgttttagaaagttcttatttaggatgttaataaacatacttgtgagtagatctaagatcctggtaaaataatttccaacagaaatctatgtgaaattggtagtatttggtggtatccctcttgcacatatctttcttgattagagggggtctcttctacggcataacccactgggttgccataaaaatggtttcccaagcatcaatgagtacaatgaaggaagggaactttgatgctttttctcgagggttttattttttggcgttattatttaacttctctttcttttttgttttttttttggttattcccattatttgatcttttacaaccatttccattgttgttgctagtttgaggttggaaggtctggatggactgaacggatgtattggcaacatccaagggggtgtgtgacttgggtctacttttccttgactgatcgtgtacactagtctcctgattgcttcttcgagcttcataaatccatccgcccagtccagaatttctctaattgaacctacagtgagtctcgtgatgtcttttcacaattcaactttaggttcaatacctcataacattgtgaataacctttcttcttcattaagccccttcacctttgttacctcagtcatgaaatgattgatgtagtccttcagaggatctcctggtatttgcttcacttttaccaggtcttttgtgggatggaggctccagttctacaggcaatattgcttcacatccataggctaaagcaaaaggagttttcctggtagtcgtctgctcagtggtcttatacgactatagtactttgggtacttcctcaggccatttacccttagcttcttcaagatgtttttttagaatgtccttaagtatcttgtttactgcttcaacctgaccatttttcagggggtgtgcagctgctgagaagcttttcgaaattccacgtgttgtgcagaaattagtgaacgtttggctgtcaatttttttccattgtttgacacaattttttaagaaagtctgtacctacatataatgttcttctgaacaaagtctaaaactttcttggagttataatggctagtggttcggcttccgtccactttgtaaaatagtcaatagcagcaactgcgtattgcactccacattttcccttcgagagttgttcgatcaagtctattctccatatggcaaacaaccatggactttacatttggatcaattcattgggcgaagccctaggcactttaaaaaaatttaacacttgtcacatctcttcacatgtctcacctaaaagcaccaaatatgaatttttgacggtaaaagaaacaaaacctaacagaaggggcataattatgtaactattatattttaaggagaatttttaacaagccgtatattttaaggtgcaaaattaggtagtgctaaaagttcaaaagacaaaaatattaattattcattattattttacgagtgtcaaggctgctatttagaattttgttttcgcatcataaattatatgaaacttttataaaagtttgctactataactacacaagaacaataatgttgttaaaagaaatattgaattaaaaagaaaaaaatgtttattttggagtaatgcattatgtatgggtccaattttttaacgcgacatgaaactgacatgagcatgattcgatacgaaaaatgtgtttagacacgatgtgacatgaaaaaaatacaagtttaagcacgacacatcacgatattatgaattggcacgacattgcacagaaagtataaacttagatatgaca

SEQ ID NO: 235128 - DNA, 986 bp, Cannabis indica
aaattattttgtaggctgaccagcgtaggggtagaactggaagaacttgtgatgtgtgggtttatcggttggtaactggatcatttttcagccagtttgaggactatgagcctccctctatactgaggttgtctttgaggcagcaagtgcttcaaatttgttgtgctacctctaaagcaatcaatgacccaaagggtatatgcactaaatctggatcattttatttttcactaagttatgcataatgagaagtgcttgaattgaacattgacatggacaaaactgcactaattcgctaaatatgtgtttgctccacaaaagggtttcaatttctatttgtcaaactttgattccagttttgctgtagagggctccagatcctccacgcccagaggttgttgaggatgtgttaaatttgttagttcacatgcgtacattggagaaaacatctccaaggggtcggtatgaacctacattttatggacgaatgcttgcaagcttttctctatcctttgatgcttctgttttaatacttttggacacattgggatgctgaaggaaggcattgttttgggtgtaattgatggatacacaacccctacccattctgcgtccttttggtgtgaacttttggtaatttctcaacaaacaaatgaaattcgtagtgtttgggaaccctgattgttataataatatatgtatatattgatagagacagttgtgcaatgcagagtacagagtatatggactgctatttcgcggaagatagtgataacactggcctaactggcaagaaggagataatactaatggaaaatttatgtgcatttcagttttagcaacgggtgttcaaggtaatattagacaacttttttttaatgtccttacaatggatttgtcttacattatgaaggataagctacccgttgaccatttgaagcaaattttactatttaatccaatcaaagcttctacttcacttgcta

SEQ ID NO: 235129 - DNA, 1884 bp, Cannabis indica
catttaatatggagtctgtcatgttgaggttctttctattattctgtatgcacagagaacccttagaagctctttggacagtgtgctttagaagattgaagcttcttcttcaacgttgttcaagatcttgtttatggcttacacttgtccaattgcttgtggtctagccacaactaaaaaactttgttaattttgtgcttgacataatatttattgaagtgatcactttcaaatattttttccgttattaaactcaattttgtgtagaaaccataacaacaaataatatttttgatgacaaaatccaagtccttctttgatgttaccgtcttcgtaggctcatcttccacccacttggttaagaagtcaataatgacgatagagattttgaatcctcctttttcagtttgaagtgatcctactaaaatgatttcccaaatagcaaaaggccacgaactgtttagggttatctatattggcatagctctaggatttttaaaataacactgacattgctcatatatctgaacatatttaatacaatatttcttcatggtgggccaaaagtatccttgacaaatgatcttcttggacaaacatgatctccactaaatccttcatttattttgtgcatgacattgcttatctcagttccatctatacatatcaagtatggcattaacaatcctcttttatatagccttccatccatgagcacataccttggggcctaatattaaatcttctctgaagttgctctgtcattttgaagtgtaccagattccatgtacatcttgatttgggccatccaggaagttgaatgatcaattaccattacctccaatgtttttgtccttagaatggatagatgtgtgatgggcactaatccttatttttctatctctagatatgttgctaactttgctaccatatcagcaaaggcattttgatacctggggattttcttgacgtaatgatgcttaaaatattacaatagctgtgaagattttgttacgtaattaacagtctttcccctttagtttggtactctctggaaacttggttgactaccaattatgaatcactatagagctcaatgttctgggctctaacttctttagctaagtgtaaggcatctatcattgcctcatcttgtacttcatcaaactcaaagtgcactttgaagttgatgtttttgtagagaaataatattgattctaactcaagaagctttcttgtatgatgctccatctacataaatcttccacacttctaactcaaggatgggttctttagggtttttgttcatccctgtaccctccataataaatcctccaaggcttgacctttgattgagagtcttaggctgatattgaatgtcaaactcgcttaactacatttcccattccaagagtcttcaaaatgtttctggcttttgcaatacttggaggagaggatgatttgttagtaccttgatcgcatgggcttgaagtacggtcttaagttctgtgaagaatttaataataaattcgaaagctttttaatcactcgatatatggactctacccctagcaatcttttgcttacataatatctagaagttttacccttccttcttctcacactaagacggcacttatggcatgatctgacactgcaaggtaagaaaataatggctccccctcgaatggcttggacaatattggatctttggtcaaatgatctttaagtttctagatggcatcttcacactcggttgtccattcaaagttgttgtttccatggaggtcattaaagagcaagatacaatttttcattgatttggaaataaacctgttgagtgctgcaattgttatagttagactttggacatccttgtgcttt

SEQ ID NO: 235130 - DNA, 1192 bp, Cannabis indica
tggagattctttgtgtcttagattaagtgacaagtaatttttctattttttttttcaagtgggggtgggagctgaaaggtgagtactattgaattagcttaataaattttttaatgcgtgtggatgcaaataaattttatgtaatatttcaaatacaatcagttggacccaaatcatttttagcatataaatttatatttttaaaactatagataaaaataataatataaaaaaaatcaactatagaatactaaaataggataggacctccacttctatatgatttttatggtgcttagccatttgagattcaaccttctcacaaaaaaaaatattttcagaaataagaaggcttccttcttcaattacagttagctttgaaggttaaaagaaattttttacccataacaagaacaattttggaatttttttttagcctttttgaaaaaaaaaaaataaaaaaagggaaagatgaactagaactagttacaactataggttgtaaacaatgtatatattaactatataaagtgatttttaaaaaaaaaataaaaaaggagaagaaaaagttgatatgacgtgcttgtagagagtaattatattgagagaaagaatgtacatagaaaataaacaaaaaaacaaaaagtggggagagagagatagacaaaaattttgatgtaagtccaaatcgtaaaaatgtaattaataaaaagttaaaaggtaatgatgaaaataatgaactgtacaaaagaaaaaaataccgagcacaaataaaaatgtaaaatactttacactttagtcatgagttgtaaatttcccaaataaataatcaaaacaaatttattattaataattaattataactatgtataattgatatgtacatacatgaatatatattattataataggtggtatatatctattaaaatataacaattattatcattacaaataattataaataaaaaaaataatgtatattattttatgtgttatgtataccctcctacaccaatatttatatatatttctctttacttacaaattcatagatatatatgaattatttcattaatctttcttattaaattaaatagatatagtatgtgaaatatgagataataaatattattattactttcactatgtataaataaattcaacattaaaatagtcaattagatttcta

SEQ ID NO: 235131 - DNA, 999 bp, Cannabis indica
gctggcagatctcgttccacctatagaccgtattctgccttcttgatcattgttgcaacgagtattctctcctccatgcattgatcaactatgagttattgtgtgcctcgtggtaacactttcctcttcacgccccgctctcctctcttgggtatgattcgtctcttccccctattgagatttgtgcaagcttctttcttataagtttggaaagaacgttggcgatctcttaaagatgacccatgtactcctgtttgtgtctccagatttcccttatttctacggggaattttcgaatccctggtttctggttgatcatatggcatctcgccttcaggtatcccccaatttccccaggttgtctttcttgagcgttctagggattcctttaggctgcctcctgccccctggtttgcgagtctcgaggtttgcctcgtggttctctctctcgagggtcaagttcattttgggagctattcccttgcgccgcccggactgcagctgcctcaagctctaatttagcattacgccagtttgccttccaatcgacgcctgagatggtggttttctaattcgacaactggtatatactttgttggatcatatgcgccatcctcatcaactagatggggaagagacctaccattgttcattctaggcccttcaagtctagttcttagattgtgtgttttcccggagtttgtggtccgttcaaatgataagtcgaaagatccttggagactcattggctcttttctaggacgatgagttgtttcttcgtgagaattattttcttcgttgtcagccataaagagaattattattttttatgtaaggaggattttttcttagctttttcacgaaggctctcagtgaaagcaccaaactgttaacgtagattttcgttaaccaaatttgagcctaaacagtgataaacatgcacagaaaaatgaaaacagtaaagaaataaaaagaaaagaatgaacacgaaggtttttt

SEQ ID NO: 235132 - DNA, 1722 bp, Cannabis indica
atttttttaaaaaaaattaatgacctcgaccaatcagggattgctacgtagcaatttacttaacaattaactgtcaggtacttacaaaattttcagaattataacttaggtattattactaccaaaaactaatcttaggtatttatttgcaatcaggagttaaacttagctatttataccacaaattactcttattttaatggacgtccttgcctataaaaggagagctctattagcttcttcttttttttttttaatattcagaaaagttcctacaaggtcagagcatctttctctagttttctctctagaaatctgagctcttgccttagctaattctcttataattcttgtgagaaattaaaactcgaagtagacgtagctccattattgttgaaacacgaagaataaactactacaaatcttgtgtgtctctctcactacttacttaactcatatgtcatctcgccaatctaacgagtgaatattggctaattttcagtatcaacaattagaagaaaaaatatataaaattctaaaagaatccgagaatacaatctaatacatgtaagtagaagttcaatgaagctagtccttttttttattgatgttaaaagtaaaaggtatatgcataagcggtgcacaaggcatgtaaatgtaatagtcaaacccaaaaatgtaaaagggttgggttagtactaaaatacctaacaacaaatcttccttcccaaaaaaataccgaacatatctatctttttcttttttaaaaaaaaataaaaaagataaaataatccttaagcgtacaaaattcaggtcaacgccaaaactctctttttcctttaaacacaatcaacggctctaattttctgaatctctagacccccaaaaacgctggacggtctccgatgtgggatcagcagtccaatacttgggcctacacaatttaaacctttcatcactaattttgttctaagagttgtttttggttctaatggccatggcatgagagggagaggaagcgttctagagagagagagaaaacgtttttgtaagaatcctgttattacataaccagaggtagatcccacggtagtggcaagctgcctttcttcgttttcactcacagcttcgaaattttgcctttttaggggtctaaggaggttctcgctctgtgttttattctttatcacctttgcctctctctctctctctcaagctcgttttacagtattttccccccttcttttcctttctgggaaaagggtttttgattttttttcccctgaatcggagttgggttagattgaaatttgggggattgggttcttcctattgagtgatctgagtctgagcagaggtggagagaaatggaagagtctcttctgtgccagtggagcgtgattagatctcttttggcaattcttcaatggtggagtttcaatgtcacagtgattgtaatgaacaagtggatcttccaggtcatactctttctccattcctatggacttttgcacaattgatatttttgtttattattcctttcttttataaatggaattattttatctcgatgtgtaatggtttttctgatactctgtactaagtgtggcccctcttcagtaattgttcttaacttttgctcacgattaatgttctcctaaactacgaatttcgatttaattaaagtttacttttttttttctatatcattgatcaaacaaa

SEQ ID NO: 235133 - DNA, 1287 bp, Cannabis indica
catagggcccagaaaataaatgtccattagagttaaaggtggtattaactctcagcccaagacttggacccatcggcccattatgaactaacgtaggaggcccaccagatttgatgaatgagttcaaatgggtcggccccacttctttatgtgccacatggtcaaccaaaggggtcaaccttttgactctattcatatgacaccttagcccctcatcagtattatcctcgtcaccccctctaaattcaaaatgggttctttaaatggaaaaggtgcagacggctttccatcgtacaatttgggtgaaaaggagtgaacacccaaatgaggaccagtcaccatctcgacgccagccaccttcggacgccacgcagatcgaaccagacttcctctctgtcccctcgaagaccggcgccgcatagatctcgaggcttcagcacaggttaacggacccgctcccatggtcggaggaatcgcgcctttctccagaagcggagtcggtgctttcgcctggcacactaccaccgtgccgccatcaagctcacggtcagcagaacctccgcccacaaccaaagccccggaattcttctccttcatcttcccagcagcaacatccatacgattaacagagaaacagcaatcgtacttcgagaaggggttcaaccatggtccgaacagcggaaaaggaactcccttctcattttgaaccgtaacaggagaaagtagcgagcactcactacgctggtgacccagtaatccacatttgaagcaaaaaactcccagcttctcatattttaattgaatccacctattgactccatttatggtcttgaagtagcaaccgcaacaaagcggtctgttgacgtccacctctaccaaaacccgaatccacttcttccaggtaactggtttggattcctcaagatcaatctttatcactttgcccgccaatgcccccagcatgttggcattagttttcgaatagtagtcatgaggcagcaggtgaatttggatccaaaaacggatcgagttgaacgaaggtgtactggcaccgaagccagaggaccacgagagaagtgccaacatatctcctttaacacaccacaggccatgctcaaggatccttttgcacaccacaccagactcaaaaatgaaccgaaagcagtttgcaccagcaagaacaccattagtaggctccacacgaacccgagtattccataggctagagcaagcaatttccacatccctagcaataaaagtcctggctgaaataattttgccaaaaag

SEQ ID NO: 235134 - DNA, 1369 bp, Cannabis indica
atagacctaatccaccttttggagataactaactctcggccaggcagtagggttccaaaccttgtatcataactatcatgcggtctatccaatttactaaaagttctggccgccacataagaatgagtggctccagagtcaaacaacacagagaaataagagttgttgaccgagagctgacctgttaccactgaagggctggcttctgcatcagcctgagttattgtgaacaccctagctggagtgggtttcgctgcagtctttggtgcctccattctgagcttggaacaatccctcttgtaatgccctgacatgcctcactgaaagcacccttgccctttacattccccccaggtggtgctttttacaactggggcactctgtgtaagtgtatcaggttttagtgccactctggcgattggctcgaccctggttgccccgaaacctcttgttttgacccgagccactggttgcagtggatgcctttcttttctgatctatggccgaaccactacctcccctgctaaaacttgaagcaggaggggtaggagccccgcgaacaaccggagtcccaccagactctaccatacatccaactgcgccctcagctcgcagtgccttatctaccatttcagcataggtggtactgtcatcagtgttggtcattaggtcgtgtctgatcttcgtatttaacccatccaggtacttctcttgcttactaaaatcggttggcacaattcccgaggccaacctcgccaaacagtcaaattgtgttgtgtactcagtaacactcataaggttcaagattctagtaatcactgttagccattgctcgacttttataacacccagacctcccagaaaaactggaggtgcttgcttacggaacttttcatacagaggccccattcggttcactacaactacaggttcggcctgcacagcaggggtaggagctactgatatttctgcagcaggcactgcaggagctccctgctgtcttaaccgccgaaactcatcatcttgttcattgatcctggcttgcatcgctgcaaaccggttttcccaatcatgggcagcttgggcagcctgtggcgggttaacatcaccccgtcctcgtgccgtacttctaaggcctctgcttcggcgacatcatttaggggaatacaaactttctgatcgccactgaatccgacagagttaccctgactccaagtgttttgcccggcgtccatactactagaacagcccgcgtaaccaagagctagtctggtcagattgcgatcaagaataacttactaatgccgcttactggaaatttaaaacatgcgcctattcagctatcaggctactaacatgcttcctaaca

SEQ ID NO: 235135 - DNA, 840 bp, Cannabis indica
attacaaactatagctcacaagaacagatatctatacatgtaaatttgaagaaaaattataatccactaaacgaatctatatccttttgatctacacttttgggcattacacaagtaattctattttttactaaccacttgatttcttgcactagtatattcggttcagtatcctcattacaccagaattttttgttccttgcatgccatattttgtacactacaacagctacacaggccgtatagcaattcttcttgaatttgctctgtcttgctctattaatccccctcaacatgctcagcagtaaggtattctttgacctccatcccagccaaattttcaactcttgcaggcagtattgtgcaaatttgcattcaaaaaacagatgagacatgctctctgctgcagtattacacagcaggcaactcgtgtcagttgcaatattaaatctctgcaatctatcccaagtcctcagcttgttttgtacaacaatctataacacgaaattatgttttggtacatttagtctactccaaaccagcttgttgaggtgaaaatccctctgttcctgcatcattagtttatatacaacagatatttgaaaatatgatgttgcaaattgggcaggaggaataatttgcttcaccagctccttcgtgcacactactctcctccaataccagctgctatggttgggagcctcatacccccaccaatcttcatcttcgatatatacactatgcacccacttcacccataggttatccttgttagtagcaatcgcccacacatactgtagcgccctgtccaacagggacgccacgtgtgtgcactttatt

SEQ ID NO: 235136 - DNA, 1345 bp, Cannabis indica
aattaaaaaaccagtattcttagatgtgatttattagaaatgtgttgaatactataaagtataaaatttatgtggtgtaattaatgaaattacaatataattaaggaaaaaattatattttagctatgtaaattggaatacaaaaaaaaaaaaaaattaaaatcgttatcaccatattttatttgtagttatcgctatattcaaagtcattatcaccactgtatatagttattactatattcaaagttgtcattactgtgtatctcatttataatcactactaaatttaaaaaagttatcatcaccgcatatcatttatagttctatattcgtattcattgtcattagtcatcactatattcaaagttatagtaaacaataattataaattaaaaaatcatagttaactgattttgaaaaattagttgtagatatttaagttttttttgtttaattattaatttatttatatggacctcacaaaattattatttttatggtgattatttttatagtttgttacacatataaagatatattatataagtattgtttttctttctttctttttttttttgtttagatagatctttagaaaaaataagctcacggtgatcatttatcatgcatcttcaacaaaaaaaaaaaagaaatatatgatatttgacatattatataaatagacttcatataagagacgtaatacattaaacatttagacgggaaactacactctcttctttattatttcaaagcaaataatatgaagataaaaagagagagatgtttataataaatccaaggaaatcacatgcacttcatcaaactacaataattaaaataaaactaagattgtatatttggaaactcacaaggcacaactttgttgaaagcttaagaaattcaggtctataaactaatctcctattcatatgactcacactcaaaaaaatatatatatgccataaaccttaaaaaagaagtctagaaaaattttgaagtggctaaacctaaagaaaaatagtttagaaagaagaaagtaatttaggtttatatacttagtcttgagatatacggttaagagaagcatgattttatattttttaactaatttataataataataataataataataataataataataataataataataattttaaaaaaatttagaaattgtatacgtaataatagctttatatagatttttattattttagtagggtgaattctacaattacggaatttgggcaccagcaacctgtcaagaacaaagagagagacaaaagttcaattgggagcaccggtggggtggtcagccaaagggactccgacgctc

SEQ ID NO: 235137 - DNA, 1184 bp, Cannabis indica
aaccaaaccacacctgcaaccactgaagcatcagtcccctaatccaacaaagcccttccctggaaccactccccccaatccaacaaagcccctccctggaaccaccgaagcatcagtcattagagcaaaggaattaggaagaggtgatatccataaagtaggtccgtttacaaatgggttggcaaggccgagtcccaaaagaagaccccgttgaccatactccttaaactctgacaggttactatgggctaaatctggagtaacatctaatctcatctttattaccaaacaatactgagtttcgatcataccaaagtaaccaaagagtagtcatcatcaattcaaaagcctcacaagatagcttatcaaagagaaatatgagaatttcctgcattggtccatgtacacaacgacggagcaccaaccacacccccaaccactgccacacaggaatcaaatcagagtaggaaaaaagagaatgctcaggagtttcaaattcttctccgcatcatgaatagcaacgaggtatcaacaccacatttgaattattaaactgctgcaccgaagtaccgtcatttaagattgcaagacatacttggttgaccctttgacccacaatatcctaaaatctctataaaaaaaataaagcatgattatcatctggtcccgaagctttagtgccgccaattgccataacagcctggtaaatatcctcctgagtaaatggtgttgtaagacactcattattagccaccgaaatatgcgaattaacaacttctgtaccacgatggatttggttatttgtcgggttggatgtttgaaaatatctataaaatatctctccacttcaccaacaatctcttcctcaacacacaacttttgagtagtttccatcataatctcagcatttttcttcttcctcgccgatgttttgttatgaaagtatttcgtgtttctatcacctatcaacatccactctgatcttgatctctgtttccaataaatttcatctctactcataagattatccaatttaagttttagagtttttatctcatctattcgcacattgagagcattagcattcaaaagtttatctatctccttttgagtttccactacttgcttagacaatgacccaaatctttacttattctaagttgacaggagatttgcacagtatt

SEQ ID NO: 235138 - DNA, 1399 bp, Cannabis indica
tgatccacttgacaaacttagcagggaagcaataggccagcagatgcttttcaaggaagtcccaattaaccgcatcataagctttactgatatcaatttttgatagtgcatctaggggagcaattcttccttcgttagttctttaagatgtcctgaagaattagaatattgtaagcaatggatcgtcccttgacaaaagctccctggttctgactcactaaagcaggaagcacattagcaagccaggaacaaatcagtttagaaacacacttgtataatgtagtgcatcaggcaataggccggtaatccatagctttagaaggactatcaatctttgggataagagagagagttgttctatggagctcttccaagaactgattagtgtcaaaaaatgagttatatccctatggatatcctttcccacctcaggccaaactgacttaaaaaaccccgaaccaaatccatcagggccaagagatttagtattagggatactaaacatcacggctctgacttctttgagagagaaaggttttaagaggtgaacttgctgatcaagggtgagtttggagcccgtggctatgcaatcaggttgtatctccatggtggtaggcttagctttccccattaggcctttaaaatgtctaagaaagtgttgcacaacatcaggaaagtgatcatttatgaccccttgctcggtagtaaatgaaacaatcctgttatcttccttccgcttcttcaacatggcatgaaaataagttgtgttactatctcctttttgaatccaattaaccttgcttctttggtggagaaagttcaagtatattttttcctgaatgtgaaattggttagcagccgcctgctccaattcaaggaactgattgttgttcgggtttgcttgacattggaactgagcctctttgtaattatccttggccttctcataagcatctccaatgttcctaatcgagtgcctattgaaagcttttagcttgtgtttgagcctcatggtttttaaataaatctccttcaacccaccacatctaagaggcttgccccaactatctaacacaatgttcttgtaatccagatgattaatccagaaattatagaaccggaacggcttgcttccaatactttttgtagcaaccgaatgaaccacacaaagacagtgatcagaacaggtctcccaagtgaaatgagcaaaagtattcggaaaataatcaacccactcctcattgtgaaatacatggtcgattcgagaaaaaaatcctattatcttgcttattagtccaagtgaaagtcgaacctgtgcgcttcatagaccccacagaagatgttggaattattttaccaggatctagatttactaccaagtatgtttgattaacatcct

SEQ ID NO: 235139 - DNA, 2255 bp, Cannabis indica
acagatacaaagtatctccatttgtctctcagaaatatataccaggatcaaacttacttctcttcagacctatcttggtcgcataatcatcgaatctcctgttccactatcttgaagattatttcaaaccatacagagacttccgcaataagaacacctaagtgttctttccatcttcttcaaatcttcagatgtttcattagaattctttcattcatatgtccatacaggaaggcagtcttgacatctaatcgttctagttcgaggtcttgacacgcaacaagtccaacaaaattctaatcaatttgtgcttaacaaccaaagaaatacctcacttgagagaatgtaatgacagcttaattttaatccgagaattagcagataattagggtttaatttagaattagacttttaattatgatttgtgaatttatggagatatatttaaattctaggtgtgttatttatgttatatatgaaacttcatgtttttcgtattttacgtctggtaatagtggaacgcgatgtttgatcgatagagtcacattttcacacggtgtagtatcttagaaatagtggggcaatttagatagacatttgaaatgtcaggaatattggtgattttagaattgaccaaaatacccttaggtggcaaagttgcttcttggtgaagcaagggcaaaatggtcttttgccctaggttagcttttgtctttttgtgagttagtgaattattattaagttttataatctgatttttattaggtttgatattagatactaccatagcattatctcttttaattaaaaaaaaaaatagaaaattagacacaaaacactttctctctctcttgaagcttctctctcgactcttcttgaaacccagcaaaaaaatcaaagcttgattactcaagttttggtgtattagcagaaattggtaggtttcaactcaaggtaagctcctacaccctttttcctttattttcttaagtttcaagttaggtttgtagcttagttgttgggttagggttgctgtaagatcttattaggtttgttggagtttttcgatgtttgtgttggatgactttggtcaatttgagctggaattgatgcttagtgttgtgtttgagcaaggtttgagttttagagctcaagctttgctcttctatggtgattagtgtttatggggtttgtaccttgttttattgcttgaattttatttgttttctctaattaggtactctggaaagtttgggatgatttaggattgatttgaattgtttagaaggttttttgggttcctgcactgaactggtcgaccagttcagtttggacctgtaggaatcaaaattctggttgatcctaattctaccaaattttcggcggcataatggatgtaattgaatgcttccaaaaattttaaacatgcctatataataataaataacatagatataacagttatttattcatccatcccaccgcagcacatatattcatgataacctacttttatggttgaatattcaagatattcaaactccacatcattaataattaatttataaaaaaagttacctcggttgttccaattaggtatttaggccaaggaaggaaaatgtttgctactttcttaacatatctacacccctcaattgagattgagatttcagcatcctcttgcagcatttctgaaatcagattccggacttgtgaatcatcgtagtatttgcagtaaattttgattcgaccctcatgttcgtacagatacgcttgggccacaatgttgtcaatattgtcagagtaaagatatactagctgatcaagggccctccgttcttcgaaattgtacaggagaggtggctcgttaagggaaacaaacttctcagcataaatttatggtcgaccctcatcctcacgagcatattattgtggaacatacgcctgatcagccacctctccttcttcctcttgttgggcaatattttacttctgtttaagggatttgattttggttgttaatttatcaatctccttttgtttttgagccacaacatcaaaaacttcccttttcttcctgccatagtactatcctttatcattcagtttgagtgccattcttttttccttggtccatgagcttggatacttcattcatctgagtagctcctcgtgtaggtatcgccctaggatactctgctactgggtctgaatctgatcttgaacctaattagccatatctacaccattaacaa

SEQ ID NO: 235140 - DNA, 823 bp, Cannabis indica
acacattaatccgaaaaatcaccacaaatttcagatttgaaaaaatgggtttgtgaaaatttttgagccttaaaatcaataactttggctcttgatactaattgttgaaaaaacaattacagattatgaacattcaaaagcatgtaccaacaataatccataatgattaaacccaaaatctagtatttatttagtgcatcaaaaacaaaatacacataccaccaagatccttgagctaaatctagagagcacttgtggagctaaccctttttttcttttaccacacaaaacctaatgacccttttactacacataacacatatatatacacatgttattacccttacaaccctaaagggttattaactaatagggcttttggggtcttttatggtatactataatttaatgggtcaactatagtattaagggtgctctcatgtgcctctaacacataattaagttgttaaccatcccattatggctattagcaacattaggcacatagttaatgattgtgtattatgaaattaaaccaatgattgtattagtccattataataattctaacatgaaattgtaggtccaatgatgatgtcgcctctctctcgttcattgccacttggatgcttgcttcattgggtcttaggtgtttgttgaagaaggttgaagggcactaactttgacgggatcggttttggggtttagagtactggtgatctcaattgtgggtcagagttttcgtcgacggtctaggcagctactcgtgcgacaaaccaaagaaaaagaaagagtgtgataaaggagatagagagagagagag

SEQ ID NO: 235141 - DNA, 1096 bp, Cannabis indica
tgaagatgtagcaacaagagtttgcttttgagaatgccatgatattgcagtgtctctatatgtgaacacgtatctagtttgagatctagctttatgtgaaactgataaataacctgtatctacaaacccaactaattcttggtttgagtttttggggaaaattgacctaaatcagtagttccccgtaaataacgaaatatatgtttcattccattacaatgcctcttagtaggtgatgaactaaaccttgataataaattcactgcgaaagcaatatcaggtcgagtataattagcaagatacataagagctccaactgcattaagatatggtacttctgtgccaagtatctcttcattattttgacaaggatgaaacaggtcttttttgacatttagtgatctaacaaccattggttacttaaagggtttgctttatccatattaaagcgtttcaagacattttcaatgtagtttgattgatgcaacattatcccattgtcggtatgtttgattcgcaagccaagacatatttggttttccccgaattctttcatttcaaattctttcttcaagtacaacattgcctcatgtaactctttatcagttccaatgatatttaaatcatcaacataaacgacaataattacatatcctgattttgttttcttaatgaaaacacatggacaaattggattattattgtatcccttctttaataaatattcacttaaacggatgtaccacatgcgtccagattgttttaagccataaagggatctctgtaactttatcgaacatatctctttaggcttaaaggttagtgcttcaggcatcttaaaaccttcaggaattttcatataaatatcattatcaagcgatccgtataagtaagttgtcactacatccataagatgcatttttaagttttcaaaaactgttagactgatcaaatatcgaaatgtgattgcatccattacaggagagtatgtttcttcataatcaattccaggtctttgagaaaaaccttgagcaacaagcctagctttgtatcttacaatttcatttttctcaattcgttttggaatgaagaccca

SEQ ID NO: 235142 - DNA, 962 bp, Cannabis indica
gggccgcgacattataacattgcgtggcctgaccctgattgcccctaacggtccccactccagcctcctgggtggggaattttaggcataagtgtcggatagacgtaattgcgccaaaatccaccagggccgaccgaccaaggattgcgttgtatgcggttgggcagtctaccaccacgaatgtgcagtacttgaaagtactatggggtgtgtccgggcataaggtgacgggcaacctcacttttcccatcggggtaaacgtggttcaattaaatcccgtaagctgggaactgcttggtgatagatccaggtccgtgaggcctattgctgtgaaggcttctttaaatagcaaattcacagaactctcattgtcgatcaatactctagccacgatcttattggcaatgggagtttctatgactaggggatcgtggtgagggaaacgcaccagccttgcgtcctcttccttgaaagtaattggctgatccatgagtgaggacctttgagcttgaagcttagtgacttcccataccttgtcatgtttaatggcctcagcatatcgctttaattcttttcgagtggtcccctcaatatggggcccaccagagatcatagccactcttccattggatcttggtggcaggctaggggtctgctgacgaattggtcctcttgagggtacagttggtgccaacgctccgggcgcacttcctggtgtcccttggggcaatggaccccttgccggaaccgggttgagatggggcaaccggttccttatccactcatacaggtgacccaatcggatcaagttttcgatctcatctttcaaatttttgcactcattggtactgtgtcaattgtcgttgtggtattcgcatcttttgttgggatcccttcgcgaactatctctgtacagaggaggcggccttcggtagtgcatatttttcctcgtggcgaaatac

SEQ ID NO: 235143 - DNA, 1197 bp, Cannabis indica
gcttttaacttaagatttttttcccaattagatgtgttaaaaacaatcaaattatatgtttggtttgtccagtttttactggaattactatctaagtaactaaatgtagtataaactagtctaacacaatattatttattcacataattagcagtagaatttgactcaaaattttcaaaaaggtaagaaatttaacgaacttaacgcaagaatatactcagtacccttaactaaaatgagacagtgtcatcaatgtctaaataagtatatgataagaacacgagatgagaactgaaaaaaatagagaatatgcatagtgatagatgttgatttctaaaaaagaaaaatgacagaaaagaaactaaaatactaaaaataaagaaagcaattaaagataggaccaatagtgaaagaattcactgaccttggtaaatcgggtcgtgaaggagcatttcctccacatcaggtggtgttaattctaaaaataatttcaacctttggccattgactttgaatatattaccagttttagaattttcagtttcaacaactccgtgagaaaaaacagtacgaatagtaaatgaaccaatccatttagaacgtaacttaccgagaaacagatgaagacgagagttatataaaagaactttccgacaagtggagaaatctttttcgcaagatgttattatcatgatacaactttgtacgttctttgtaactttttgcacaatcgtaggcatcatttctcagttcttccaattcatttaattggagctttcttttctcacccattttgtctaaagcaaaatttagttgtttaattgtccaaaaggctctatgctctaactctacaggtaaatgacaggcttttccatacactaggtggtaaggtaaaattccataggagttttgtttgcagtacgatatgcccgtaaagcatcaattagtctcagggaccaatctttcctagttggatttactgtgtttttctaggatatgctttatttccctattggagacttcaacttgaccactagtttgaggatgatatggtgtagtgactttgtgtgtaatgacataatttttcataagatttttaaatgacttattacgaaaatgtgtacctccatcactaatgatagcgcgtggtgtgctaaaacaggaaaaaatattttctttcaagaaacgaaccaccac

SEQ ID NO: 235144 - DNA, 1233 bp, Cannabis indica
cagaagttataatgacctgaatttcaaataaataaacagaatctattcagctaatagtttggatatcaataatactgcttcaatgatattagcaaagaatgtggcaggcatattcttaagctgatattagttcatgaatagaaaaacaagagtttacagtgtttgtaaagttccacagtagaaaaggagtgagtaatagttagaaatagcttccgagatcatttgacataaactgaccaaattcgctaacgaatacagcagtatagctttgtatgctcaaccaaaaaagggagcgagtagaattcgatacatcagaagcaaaagaaaacatcaaattaagtcaaccacttgattttggtttagatttgttacaaatttaagaaagtgcagtgggtgggtgaaattttgggttttttttttttttttagttgtacactgagggaggaggattcgaacttgggaactcctctttgtgaggagaagtgtggaaccactaggctaagcctatgaccacagaaattttgggtagttaatttagtcaatggctgggtttaggaaagtataacagtttaggaaacttttgattacatgagaatctgatttgtttggaaatgtttaaaagaaggaactgcaagggaatgatagtgtgtaaggtaggttgcttcttatttgaattgagctacagctctagggagagaacaggctatcggattccctgtgtaaggtaggttgctttttatatgaatgccctgtggtacccttcacctgtgataggaggggaactagaccaagtggacaagggtaagtgtgtctactaggctgtatgctgttgaggggtgtttttggtgttgtctttgtggggtgagctgctcctatagtatagagctcgtttgtagtagagtgggtatgctagatttgagagatatcttagcattgcatgagagacccaggctctctctttaacctgttgaaattgtgacccaatttccgtagcaataagacagctcatctcttcttctccatcaatttactatttcattgaattacttaaactactgctctgttctataatgttcttgctgatttgttagtgactgaagcagaatcgtatcaaacactatatttctctcaataataaaacttgaaagtggtgcctggggtatatcacttgtaagctgaatcatgtccaagttatcctaacaacaatattgcttagaaattgataacaattat

SEQ ID NO: 235145 - DNA, 922 bp, Cannabis indica
tggtgaatgtgcgaaaacaaagtaagtgacctcacccgcatataaactaaaaaatcaccttagggggactgatttgaattcttgcgaaaaccaatcagtccaccaaggcacaagaagtcaaatgtgcgaatagaaggatatctcaaaaaacggctgggtgtatcccagtaacctaagcgacatgcgttttcgagcatgaccctgaagtgactgggagacacccaccgtttcgaggaacctaactaatcacaacctgcgagtatgtcacgcgtctccagctagcgatatacctcaaaaaacggctgggagaatctcagtgactcaagggacatgcattctcaagcatgatcctgaagttactgagatactcccaccgtttcgagaagatctgccagccaaagagtacgcttatatcagaatattggcgcatgccacaaatggctgggggtttcacagtacttcaaggaacatataaacgcatatatgagcattagaatactgtgacacgcccaccatttggaagacttaaccaatggtctcgcaataaaatatacatagtataaaatcctaaggtttaagacaacgactagaaataataaagtctatgtgaaacctaagcagacatgcgagtattcgaagtgttcatccaaatacccgcgtgtattccaagaataaggatgcgattattcaaacattcttcctaaagtccacggttatacaaatttcaggtcaatttttctgaaattacccagttctatactgaaaaaacatagccctatgtgtatttcctacaagcatgcattcctaaaatccctcaaaataccaaaacccagaaaaaagcagtgttgcatttcaaacaaactgaaaatgcaatggaattcgaaactaacctttagttttgataagttgttcctgcgattgc

SEQ ID NO: 235146 - DNA, 672 bp, Cannabis indica
caactttccctcttttgtatatgcatgagcattaaatatctcaattataagacccacacgatccaacaccggtttgccccatgttctctgccattcattcgaaggacattaaaagtataagtatcttaccaaatgcaggataataaaatagttagtaccaaaaacttgcctccaaattcctttgctgaaccccagacagaattgtgttcacaaaaacagcatccacttcgccctgttaaaccgatacaaatttttaaaatttgagaatcacaagctattgatgctgtgatcaatagcaagaaccagaacagtcattcagtcattggaaatgtatgttaaaaaagaaagacaagaaaagaaagaaagaaaggattagtttagtgcctttgattccacaagatttaggtggatttttatattgtccactgttccaggaccaaaatatgtgtctgcgcaaagtaaaatacaaaaaaatctgcatcagaaacagaacaagagggaaaaagaaactaatataaaagcagccatcgctcaagttcaagctaatataaaaagaaaaactttagcacaaattctgaagcaaatggatttttattattattttgcagaattcacataaatgggattaattcttacacgaaaacagtaaattcaacgattcaaggctcacct

SEQ ID NO: 235147 - DNA, 1572 bp, Cannabis indica
atcttgggagggccacatattgcgggggaaagcaacaatgcccaaaagagatatgtgaaggaagtgaagaacgagcagtctgcctttgcttcggaaccttccaagaaagctaagactgaagaacctttaatcgtcttctcggaggaagatgaaaaaaaaacgtgagatatcttcacgttgacccactggtaattatcatccagctcgctaataaaaggataaaaagggtgctggtggacaacagaagttcagtgaacatcctttatagggatacactgagcaaaatgggacttgaaaaagccaaactaaaaccttgcatggtaaatctgtgtggatttacaggcgatagtgtcgcccgtaaatcgagctcccattaacattgggcaaagcacctttatccaccacgatcatgcaagactttttggttgtcgaactgccatcaacctacaacatactgttgggtcgaccagcgctaattagactcgggttagttagttcatttaagcacttatcccggaattttagacaccaatgggagtgggagtagtgtgaggtgaccaaatactagctcgtgaatgctactgcatagagttgcagaacataaaggtcggtcaccagctaatggcagtcttggctgaagaaggcgagaagaaggatgaagatcttgatccttggattcaagatgaaagaaatttattgaaaccaattgaggagttggaagtggtttttctagatctaggaaatcccacaaagtttgtatatattgggaagaacctggatgaacaattgaaatagcagctaataagctttttgagggtgaaccaggatcagttcgcctggagccatggagatatgatagggatcaaccctaagattatctacaaccacttaaatgttgatccgaattacccaaccaaaagacagaagaggggacccttggattacgagagacaaggggcactcaagcaggaagtagataagttgttagttaacgactttatatgcgaggcattttgcccagatacaatttggccctaaaaattgctaaaaccaaatgagataacgaagatgctgactaagaaattggtaattaaacccagaaatacaacataacaagcatgtaagaaaattaagagaaaagtcacttactgtttggagttggtttttgggcaatggacggctctgcaatctgcaaatcaacgaacggcctgaagatccctccaaatgcttgaagtcaaaaattaaatgggatgaaactcgtaggaaaaatgttaatgacaatgatggcatgcaaggttttgggcaaattagagaatgattttttctgcagaaaagcttgaaaaattcttagagtttctaaaatggcgaaggtaatgcaaagatggttcctttttctattttatactgttgggttaatctccgttagatcagggagatcctatgagtagaatttgaaagagaagtggagaagatggtcattaaatgttgatgtacctcgaaactacaaaactgccaaaatcagaggacatgcatttttttttaaaagggattatgacaaatataccctctgta

SEQ ID NO: 235148 - DNA, 830 bp, Cannabis indica
gaaccccatctccctcatttgatcgcatacagtcgccacattgtagtagcactatgaccgatagcccctttgacgactggacctcactcttctctcctcctccttctcatctacttaatacctaacagcaagccaaggcagcagatttttatctttttttttgttaaacctgcctagccacatgtcgtggctcgttgttgagaaatataagtttctatcacaaaatcaattggtgatgagtagagtaacttgtgttttcatatatgactcaatatttttacatttaattcatgtgagataatattttcgaatgttctttctcaagatgatggttgtttttgctcaccaatcttgaatcactttatcacaaatcatgtcatttgctcactttatttttgttcagatctcaagcgtttttgtaccatctaaatttgatttttatttgaatctcaagtgtcttcgtactatctaaatctcgtacgactggctaactatctaaataagtgtgcatcaaaaattcatttttttatggcacaaaacccgcaaaactgtgtagaccgaattttaaaccatgccctgagcaatactccattttgagtgagcaaaacattactctcatgtataattagcaataactctcttgctctctcgtcttcctcaaaccttaaattttcactgatccttttgtctattcctcttaaaactaataattattaaaagagtagttagcagcacgaaaggtggtccacttctcctcttcacttcatttcatttattaattaacactctgacttaattaataattaaatgtacacaatattttattgaga

SEQ ID NO: 235149 - DNA, 1560 bp, Cannabis indica
ttttgaagatcgtcacgacatgtacaatcattatcagtgttcagctcagctgagagtttagtaaccctttattgctttagtagtttattttaatactagtttattttaatagtatgttttatgaaaacctgattagaagcatgttagtagcctaatagttgagtaggcacatcttttaaatttccaaataagcggtaattagtaaatcattcttgatcacgatctgactagactagctcttggttacataggctgttctaatagtatggacgccaggcgaaacacaaggagtcagggtaactcagtcagatccagtggcggttagggagtaaaaattcctccaaatgttcttggttgaggcagaggccctataggcaaggcacgcggtctgggagaagctaacctgccgcaggttgcccaggaataggaaaacatgttttaagcaatggaagcaaaaattaatgagcaagaggaagaaatcaaacgcttgatgcagcagggtgctcctgcaatgccagctccagaaatacagctagcccccttccccactgtgcaggcaagacaggttgctgcaatgcactgaatgaaaccactttacgaaaggttctgcaagcaggcacctccagtgtttctgggaggtcccgatgttatgaaagctgagcagtggctcactgttattacaagaattcttaatttcacgggtatcactggcaatgatagactggcttgtgccacattttagcttcaagaagatgccttggtttagtggaatatggtgtccctgacctgtgatgttactactatgacctaggaaaagttccaggaagtgttcaacgcaaagtactacaatgaagcgatcaggagtcaaaaagaaaagaatttacccagctgaatacacaactcagtttgatcgattggctatgtttgcctcgagaattgtgccaaccgattctagtaagaaagaaaagtacttggatgggttaaatccgaacttaagacatgatcttatgattattcttgacgacaaaatcacctatgctgacatggtggggaagtcactacgagctgagggtgcagtggagtgcactcaggagtctcgagggactcaggttgttggtggggcccctactcctcctacctcttgttatggtagggatggtagtggctcaaccactaattagaaaagaaaggcaccaactgcacccggtggctcaagttagaataagaggttctgagggaaccagggtcgacgcaaccgttagggtggttctgaaacctgatacacttacccggaatgccccagttgtaaaaagcatcatctaagtgagtgtagagggaatgggtgtttccagtgtgggttgttaggacattacaaacgagacagaccacaacttaagagaaaagagcagaagatagctgcaaaactcgctccagcaagggtgtttgctataactcaagctaatgcaaaagctagcccctcagttgtaacaggtcagctttcaatcaacaactcttacttctatgtattgttagagtgtggggccactcactcttatgtgg

SEQ ID NO: 235150 - DNA, 1681 bp, Cannabis indica
aaaactcctttttattcttttatgcaaggtctgctgattttattcaaagtatttcttttacttaaactacgtaaaaatcctttttctcttttacttaatcattatttaaattcttgaagctctcagttatttagtttctaaaaatatcgataaataaatgtaattttaaattcctcaaaacctgcattgatgagtaagctcgattttaaggagtaaatctaagcctcatcaatatgttgtttagaagctcgtatgatgaggcactaccctccaagctgaagaggatcatgcttcacatgtgcatgattggcatgcatgagccatgcatgcatgcacgttgaaccagaagaggaagaaagacacaacgtgatcgggttcgggttttgtcaaacaaccactgaagggacaggaggtctcgtagcttaaacaaggtggtcgaccgaacctaagcatctcatggttgatgtcgaggacaggcagagaggaccgcaagctccaagagccttcgagctctgcccagcttcgtttgtggttataggttcgagcgacctgattttgctataaacagagctctgctccgtgcacctccttacaccaaacccagacgattgttaaactatcggtcatccctcttcacaaccagccatggtggctggaccaccaccccaccaccaccttatatacgtatattatgtttataatattaatctttttttattataatttaaattttagaaaattagttaaaaaaatatttaaatatctatcctaaatatatgtattatttttattttaaatttgtaaaaaaaatttgttaaaatatctttttcaaatagttattagttttcttattataatatatacatatatattttatattttaattattaaattatttaatttatttatatattgtatataaatatataatatattatatagttatagaacttattattttgaaaagtggttacttgtcatatttttgaaatatgataaaataatattttgtaaaaaattattataagtctataactatattattagctattttataaaatattattatttttaaaactaaactaatttttaaaagtagaattatagttataagtggttacaataatttattattaaaaattattaaaatattatttttcaattaatctaaatgcactatttttcttgtctagttagttaggatattttaatgttttaatataaatcttaactatattttaattttagaaatgaatactttataattaattaaaatatttatagaatttgattatttaattataactaattgaagataaatgtagtttaaatttaatttatttcaaattaatttaattaaattagaaattatatttctaattacatggtggtggtacatggagtatggtgttgaattcttaaagctatatgaatggaaaccaggagagataacaagaagagtttttgaaaagtagacatgtcctaatgtagtttatttcttttatttcaaaggttgtaatttgaaaaatacgcaatatttactcagttcgcattttatttatttatttttgttaaatacttatttgctaatagtttattagtacatacatgttgtatgccatacataaaatctcacataatttgctatttgataatcatgcatctcattctaaaaacataa

SEQ ID NO: 235151 - DNA, 2039 bp, Cannabis indica
taactcctcagcatccttagtcagtcgtgtgatctcctttttagcatcattccattgcttggcaacgacttcgcgttgttcaatggatttgcgaaggtcagcttccagttgttggaccttttggagaccctgatgttgtgccacatgagataaaaaaagatgcctaaaagggaaaaatatatatatatatgatttcttttatatgtaaatttgatagaaagataaaaaaaatgaatgaagaagggaactaaccgagaggctaaagttgagactcctctaaaataattcctcatagctaccattgttaacaaaatcccagtcgccagactggaagaatttgaaatggcgccaactacaggtggcatattgcgagcagtactcccaaccagtgctccccgcttcgttgggcaaggggcaagaaggttcaagcagaatcatttcaggccttttacctgaagacgtagcatgatgagttgagccctagacttgttcctcaacgtgtacaatggccaaagtgtgagcttgaacctaatcttctgctgactcgggatttataggctgcgaggcacatttcttgtggcagtggtcttccttgatctcttcagaggttctatattcaacctcgatgaggtttctgaggcaacaatcctcttcttcccttttttgctagaggtgttgagaaggttttctacatccatatctattaggcaagtaaatatgttaacacttgttcaaaaatagataaaaaaatggggaataaactctcacttaaagaaaagttaccataatcataaaatgatgaagagggaggactatagtaattactaaactccttagaccatgtgatcattaatatatcataagggtttattaaagataaatcccaatttgaatctggatggctcgacctatcaaagttggtaccatacggcgtggcaatcctgtaatatgagctagtgcaactaagttggacgtggaacctaggataccaactatcaaacttatgtgttatacagtttatgaggaaattattccaagtatagaaattatattggttatcctgaaaagttactagtgaagtgcactctatctttagtatggtaggtgaccatccacattgattacctcaggatgcttcttcttcaccttcccgaggggttactttccagaggtaatggacgcgagcaacgtaatcttggctttcttcattagctgggactgggaccttctctcacgaagagtacttcgggactttgtaatcacaagtatactcgtccgagcaagaagattgaccgtcgtcagattggcctcgttcaaaagaaagctgctaatcgcaatccgaatggaagacccagtaggattttgtgatgctcgaccatcttaggggtggggattggtcttttggagaccgccgtcaacacaataagtgtattaagtcagcgaactcaaagtctaaatataaaaagaactcaaaaccatgtttttgagacaaaaattacttacgtataatgcagaatgcagttatgttgataggacaaagaccggttgtccagaagaaatcctccttgaactcggttatttcgtaacctcacgatgatcatgtggtcatttgtgtgggtaccgaggtaataaaagtcccttgaacatcacatccgtacaagaatggccttgatggagtaggtataaactatctcgaggggagtgggacactcccagcctaaagtatggtacaaaacttataggccttccagaattttgtaagaatttggaatcgattggaagggagaaattccaagataattacagaactctttgtagtactctctcaagaggataactgctccagccttgatgtgctcgaggctctaaaagcctatcccagacaagccgctagtattagcaccatcacattccttgctgataaccctttttggagggaagcaactgaattctcctagagccacatgtctaatacggtatcctcgcgtttgcttgatgccacgagactctaaaacaccaccaacataatctccaatggc

SEQ ID NO: 235152 - DNA, 1419 bp, Cannabis indica
ggggcatggatgaggccatgaagagtcttcgagacttggcggctgagaggaaggctttccgggaggaggcccagcagagggaggctcaggctgagcagaggtgtcaggaggcgctgaaggccaaggttgaggagttaaaggctaaggatgatgccctgaaggcccaggacgaggccgtgactaaggccaggcgtgagcttagggaggccaaggaggcagttgaagatctgactgcaaagctaaagtccctggcggagttggaccaggctgacttgaagacgacagccaacctaaccgttgaggttaaggagcttcatgatttcaaggatcaggctcaaaagaaaacgaaaagagatgagctcctagcccccattatctgtcagcactgcaccaaacgcttcgatgatggcgtctttatggccaggcagactaacgggcaaaaccttaagctcgacttctatccaaagcctgaggaggttctcgtccacttctaggagaagaagaagagacttaacgccttgctggaggagcgcaggggtcctcgccttccaccccgagttgattaagccagtcgtttatcaccattgccattatcattatcttctctttttttttccttttacatatttaacccttctcccctctttgagacaatttacttatgtttttatatatttttcttaaggggagacacttaaggcccgtccccaggccttatcttttttagagcttttctttgggatttgaacactttacattcatgcttgaatacttttggtctgttttacatttgtcgtgtggtatgccttactaccccctgagtgacatgaaaattgtttttaggtcacttagtttttacaaactttaaattagaggttgcatatatttgtctagtacaatttactttacagagcataaacttttattttttcgactgttggtgatactttcaaaggtgatcagcattccaagccctaggcaccatggttctgtccattctttttagcttgtaggttctggagccaatttcatcctcaatttcatacggtccttcccaattaggcccaagacccccacttcgggttcttgagtagccgggaagacccttcttagaaccagatcaccaatagtgaacattctattttgaccttcgaattgaagtgtttagccaccttcttttgataagcttccattcgtattttctgactcatcccggagttcctcaattcgatccagtgcttcttgtaataaagccttgtttgatgttggatcgtaagtcgttctcctgtgggatgggaataacatttccatcgggaccattgcctcacaactgtacgccattgagcatggcaagtggccggttgtcaattcttcaggccaattgtttttgcaggccagcaactttttctttagggtgac

SEQ ID NO: 235153 - DNA, 607 bp, Cannabis indica
gtaaacaaaataggcgaaattttttaataaaatgtgattttttaattaacccttataggcaagggtccattaaaaaatggtcacctacttctcaccacatttcccacgtgcccacctactttttttctattttccacatgcccacctttttctgatcacctgtttcttctccatttcctacatcataaaacgaaaatcttaactctccaaaaccccacccacgcctccacaccatcgttcccctctcttgtcgtcttcctccctctcttgatctccctttcttctcgtctctctcgtccatcgatcgccacccacccctcctttagtcgatctccctccactctacatcacatacgtcggaccaccaccacatttcatcggtgtccctctcatcttcgtctcatacatctgaccaccacaacctcccgtttgtctccctctctctctttctctcttttcgagctccgtataaatacatttatttatttatatacttttttatttaatatgtatatttattttgttattgtataaatttaatgtgttttaaagttagttgttattgtaacaaaattaattagttgttttatttaaatttaggtaaaat

SEQ ID NO: 235154 - DNA, 959 bp, Cannabis indica
cttattatcatgttacttacctagaggttttgttttctttctagcataaacgagtaattgttttacataatatgttggaaagattttggacttaatgtaacattccttttgcagacaaaaagcgtcagaacttgtcaaaattctcaaaaatcctgcttaccctcaatctatcattgctggagcatttgctagaaaggtactttttatttattttggatcagcttctgatctctttgctttatttggtgattgagagagtgaaaacaaaatttgagaatatgtctcttttttcacatacatatatatgatatttggttcttcatatcaaacgctagagatatactttctgagagcagcgtgttgaattttattcggttgtatatataggaatcgtgtcgggattcgggagatcctatgttattctgtagtcatttcatttagtggtttatgtttaaaattgcattttgataggcaactagaatgcggggtaaagtggttaaataatagaattagttcatagtatatgtgtaattgtagtattgagtactggatgtgaggaaatagagtagtatatttggaataggttaaggaggagaggatcatgagaattatattgtaattgagcttttgctattgggagctcattattctagtgtgttctatctctttaatcagtaacaataattatcagagttgcctattttccatttacttccatctctgtttttttttggctattgatttgaggatcacatccattaggcaagcaagctgctaagcgttctatttgatgctttaaatatggccactgtggctatttaatttcaatttacttgctttgctcggagtggatatttggataaatgccagattcaaatactgaaacaaagttttggtattgcaggttgtttcacattatgcaagacctggtagctctgcttttgcatgtggttatgtcc

SEQ ID NO: 235155 - DNA, 663 bp, Cannabis indica
gatgtacgtggcttgggaggaataatttaaaaatccaagtcacctggttcaaaagcaatcgtgacattggctaaaaacaagggctttgccacatgaataaaggacacggtagatggttctggccaggctgcttctcgcaagaatcggcgtttgcctttggagatttcttgcaagaaacgcctatagcgactagcagtatcttcctgttattgggttctcactatgtgttccctaaccctagcatcgttcaactctaatttggaggtgggttttgaagggttacgtttatacgggatggctgattctatagggaactcaaactctaaaacttctggatgattaattcttgaaccagagtgggacattgctgcaagcaaaaacgcagtcgcgatcccttgagagaattttatcaaacccgaaggtaatgagttggagatcttaaaacaacctacatattgcctcaaccctagtatgaacctagacacagtctaaatcctaaaaactaccaaaaccagatgagatgaaaacaatacaatcaaactaagtaacaaatccacacaatgtaacaaacatgagaaagaagaaagcagcttactgtttgaagttagggcttgaggcaatgacttgttactctgtctgtaaatcttcgaacgaagcaaggat

SEQ ID NO: 235156 - DNA, 1215 bp, Cannabis indica
tgaggggaggaggggaaaggatgattcgaggacattcagagaccatgaccgatttacccttgtctatggtagtgataacagaggtagtcaaaagaggggtggtggaaagaggacaagagaggctaggaatcccagccataaagttggtggtggccatgacagaggagtgaggtggggagggagtggatcgactaccatcagatagaacatccagagacagagacgtgttgaccatactggggatgaggaattgattaatggcatcttgcaggctttggttggaaacagagtggcgtgaggatgattcttcgaaggggacagagttggagagatcaaagatactttttttataagtggttttggtaggagctcttaagatatccttataaggcagggaagggggaacaggggaaacatcacagtatttcagaagtttttcacatctattgaaggtgtgatcaagcattccacaataatagcagtaattttgaagcccctcatacataaatttcagccatttaaccgaaggcaatgatcgaaatttgatgttcataccacggcgaaggggttttgtgacatcaacaaggacgcggatacgcataaaaggagatatggtatcgtacagagaggctgcatgaacctcaatgagatcgccaagttgaagagagagaaatttagcaagatcatgggagcgcttgccaaaggggattaggtggatttgaacccagagtgggacatagctaacttgagagggaacaacagtatcaaaagcatcagggatagccaagaggataaggttacggtcaaagtgccatggctggccttccatgactcgtcgacggtcaccttcgcagccgaaccgaatgaggaacatacccgaatgataatcagaaaaagagaaagggcagcgaaccatccaagcttccttcatagctttggcaacccagtcagactttatgagcttgggggagaggactttggcaaccaaacagtaggattgtggggtggaatcgtggtggacggagatgttgtcaaactcatgaacaagagtttcttcatcagtaaagtcagagggatgttgttgggattgaggggtaaggtccattactcgtggttggtaggtaaagacagcaatataaaagaggaaagaatgcagggaataaaagggttgtgcagaaataatcaggagaaaaaaccttaaatagacaaaaaaag

SEQ ID NO: 235157 - DNA, 382 bp, Cannabis indica
gatggttccctaagaatgtgtatggattattgggagttaaaaaagctgacgatcaagaacaagtatctgttacccagaattcatgttttgtttgatcagctttagggaaagagtgtgttttcaaagattgacctacgatctggttatcatcagctcagaattcgggaagaagatataccaaaaactgcattttaaactagatatgggcactatgagttcttggtaatgtccttcggattgacaaatgctccagcggcctttatggatctcatgaacagagtactcacggatttcctcgataactgtgttatagtgtttatcgatggcatcctcgtatactctcagtgagaagaggagcatgagcatcatctcttaatggtat

SEQ ID NO: 235158 - DNA, 893 bp, Cannabis indica
acaaagtaaattcaaacccttacctatcaaggccataagaagatagccaagacaatcatatgtccgtcatagatggctttaaggctaaataatagtagtgttcgaatatagagggccaataggccaaagcaagaacatgaaagccctaaggccggatatgagatcagttcacatgcatgaggccaacgccctgctagaactgcatagtcagattagaactggacaaagcttctataggggccacgtaccaggctacggctaaggtagagttccttacgggaaccaagccatgttgagtcataagttaaacatccgactataacagactcaccattaagcttcatacaaagtttctaaggaaaccacgtatgaggctaaggttgtatatgcctacagagacaaactcttaccgaagtcacaagaggacagaaaactggctatccacttggaaccaaggcccatgatacccaaagttctcaagccttaaaagggtcagctagggtcccatgactcagaaagaactggccaaggtcaccaaacccaggcatgaacagacaagctttatagggtaaaatcctaaagctggccaactcccatgattaagccttaaggccagccaggtctcaagcaagacctcctaggccggccaaggtaagttttgcatcccaatgtgtatttttctttcaaaactcgaatatgtgcctcgtattctttatgactcaaagagtcaagaatcatagaaaaggccaaaattgaatcttttctattaaaaagtcacacatcacacattccaaaactatcatgaggatcaatataccaaaaagattacaaactaacatgaatcaaaaagtttccaaaagcttaaaaagtttgaaacttgttaatggtaggta

SEQ ID NO: 235159 - DNA, 869 bp, Cannabis indica
caagtgttatacttctggcacttaatctagagcaatcattgtatcttccatttgatttattcaaatatgcagttgctaattaatcaaggaaaataaaagaaatatgtagagtagaattatctaaaaactaagcattttttacttttgccaattctgcattttttgagaattatttttcaactgattattatttatatactgcaatgtcttcagagatctgtcttacaatttcttatcagggcctttaccgagatggttaggctcaatatcacaactgtatgtcttcttatgttttttctacatttctaatgcttagattattagttaccgaataggatatgatttaaacaactttgtacaggaacttggtggctaacaatttcatatttgatgattcaaacaaatcgtgagtgaactaacctacacacgatctaaaaacttctgcagattaatcactttttctattttctgtttctttctagtctttatttaaaagaaataaataaataagaagaagaattatctgttctttatttgttgcagagtttcccctgggctgtattgtctccagagaagttttccctgcaatagaaataccccaattcgtaagccccttcatttgactcttcttgttcaatatcatattatggatacaagatctgtttgtatagcactttttttctcaaagagaagttgaaaaattatatgcaataaagaaaattcattaaagttctgaagtctctagtgttatgattatatgcctatgagcatatataagaaaaagatccttccttttacatatcaactaataaaataagagaacaacaatttttacaatttgaaataaagggtattattgcattaaagtg

SEQ ID NO: 235160 - DNA, 1095 bp, Cannabis indica
tggcattattgtttaaatagtataatgagcatattaatattgttatgattatatactgtcttgctgggcttggctcacgggtgctctactgtgcaggaaagggtaaggcattagctgatcagccatgagttcaggagctgggcgaagaatgtacatgtccgagccatatcagaccaagcgggttaagggtctaccagcgatgtattttgaaactctattttgccgcttaggccggctgaaagaaaaagacttgtaataaagtttgtaaatatttttgggatcccaaatgttataaagtttaaattattacaagttttatttccattccgtttatttcaaaagtttaaattctgcgctattttgattagtaatcctgcttaggggattagggtttcgtaaataactcgagtagcgtgcctaattatttagggcgttacacagtgcctctaaaattgatcaaatgaggtacgaagggggtttgaactcaaggatgaaaacacatcgaacaccataattaaagtttcgattgggccaaggaagttaaaaacgagaatgatacaggaaggagcaagaatttttttcaagaatcagcaagattgcactggaattccttctcaaaggagaacaccttttctagggattcaaagcttacgttcacagaaccattgatgaaaaacagagtcaagatagctcaaattgatccagaagaggttgttgaacaagcagtaaattggaactcgactgtgatatgtatggtactgggagcaaaacccctatgtaagtcttcgagagattcatcaagcatatctggggacacctaggtattgttcaagtagctcaaatgaccatgggcttggctatggtcaaattcaacgatgaggcaacaagagataaggttctggaatcgagagtgatacaatttaataagaaaccagttataatcaaaccctcgtctacgaatctaaacacgattaagctggtgcaaatagtcatgctatggattcgtcttcacgacttaggtcttcagtattgggaaagcaatcgcttaagtgctttagttgtatgattgggaaatcgattttttgtggtaccaac

SEQ ID NO: 235161 - DNA, 932 bp, Cannabis indica
ccatcaagctaattttttcgaagagaaaaataatgaaagtaatctcttatgtatctgccaagctgcatcagaagaaggagaagatacttggcatcttgatagtgcttgtagtaaccatatgataaaaaatgagagcatcttttgcagtcttgacatatccaagactaaagtcaaaatcgattaggtgacttcatggaagtagtcggtaaaggcactatttccattgaccttaaaaaggcaagagatacattaatgatgtacttttggtattcgacatcaatcaaaatctacatattgttggccaaattattgaaaaagggtactctttacattttgaaggagattcttgcacaatctatgataagcaaaatatatcctttcaaattataaaggtaaaaattagaaataacagatactttcccatataatggagatatgcacttggaagcaatgtggcaatacaagcgcaaacagatgagtcgtgactttagcatagaaggtttggtcacttcaactttcacgggctaaagatcctcaaatagaagaatatgatgcgagacatactaacaattaaggagatcaacacagtttgcgaaggatgcatgcttggaaaatgacatcgtcaacttctttcgtcaagcaaagcttggagagccaaaaagccactgcagttgatccatacagatgtctgcgaggcaatgcgcactccattaaatgatcaaaaataagtacttcattctcttcatggatgactttactagaatgacatgagttcattttatgcaacaaaagccgcaagtttttgatattttcaaaagaaataaagcccgtgttgaaaaacaaagtggacattatatcaagacaattagaagtgatagaggcaaagaatacacttctaatgaatttaataagttctgtaaagatgaagggat

SEQ ID NO: 235162 - DNA, 1317 bp, Cannabis indica
atgagtttgggcggtatgcccagtagcaattttttctataccgcccagtgggatactagacgcggtagctggttgctgattagtaatctgataggctctttgtatcattatggtagcctgtcttgtgtggtcatcgatggctgcttgttgagcctttaatgtttccatctccctgtccctccactcaatgaactagtcttgctactcatcaaacgcaaggtttattgcagcacgaagatctcctgatcatggtgcaaggtgttattatggccttgcatgagtccaagggcagcacggaggttttggatctcggtatcatgccccactaacctctgagcattggtggagtacgggacttcggtgctgggagtggtttggtcggctgtagaactggtatttccaatctcttgcacacttggtgtgatcccaaccagagggggagtcacactgtggcccacaataggtggttgtgtgttgggctactcaggattggtctctggtggaacccttgtattcctagggggttgtacaataggtttcgtcaccattggggcactctgatcgaccaggcctctgcgagtttgcaccaccattctgtatgcctgtgaagatttaagacaaagaacaaacttgggtttttgctctcaatgaaagtaccaaaatgttgaccatgcttttagtcaatgacaatgagtcaattattaagtgattagaaatgtaagtaataaaagagagaaaaaaaaacaagaaagtgtaaaagaacaccagattttgaagaggttcgcccctttagtagagtaatagcctactccccttagattgtattaacttgagaacaaagaacacaatgttttttctctcaaagctcttacaatgagatctctaagtaattctcttagatctctctctaaagcaattctctcaatccccctctacagtgaagctagatcactatttatagggccttaatgcacgagggaaggtttcccttttgcttataatgtctataataggaaggaacattcattacataaatagaatacatgaaatgggggattgagacagcttgtcatatccctctaattcaatcccatgattgtagggattgcctacgtgcttggactccacgatatcaatcctgaagtagtcaagtcttaacaaatagctcaaaaaaccaaacatgctctctgctcgggtagtctgccctttaccctgcttgggtagtagcgttgtgcgtgcatatatgctacttgaagtttttttcacgatattaatctctacctaggtgcaaaggatattggacacgtgtcactcgta

SEQ ID NO: 235163 - DNA, 1324 bp, Cannabis indica
ttaaggtacaaggttccaagtttatgaacccttacccttgtttcgagaagcccaacaaacccagcctcttgagtttgaatgaactgtttaatttgttgctgtttttgctggttgttggctccccgaacattccaaactagaaacttatccattaccaagagagggtcctccctcctcttttgtgttttccatttcctcatcatcagcccactgtctatgcagagttccatcatcatcatgtacccctgttaaaattgcaaaaccatttgaagtacttgtctcttttgcttcagatttttgttcctgcacttttttccctttcactacagcttgaaaaccttcatcatcaactgtaggtttctcctttcttttatcctctttaaccacccattcctgtctaactccatttttcttcttacattctgcagccacatgccccataccagaacagttagtacagagatctggcttccattcgtatttcacccctaccgtcaccatgttatcatactcatcctcaaactccagtgtgctaggaaactcttggttcagtgaaacttccaccataattctaggataattcaacctatccctatctcgagtgactgaatccaccatcaccggtttgcctatctgccccacgattttgaatagagacttctacccccaatacttgagttcaagtccttctaactgtatccagatgggcattatcttcacatcttccttcctgaaattcgtatttgcatcccagggcttcattatcaccggtcgtcggttgaagaaaatataccccccattgagcacttggtccctgtattccatggagttgaaccgaatgatgaacactccgtatgagagcattctgaccttgtcgatcttgtctttccaaagcctgttagcaaaaccttcaagtatgtgcaaagggggatttgatcccagaacataacaaacaattgaaggttgccagaaattcacctcatcttctatatcatcaattgtgatcttaactttgttaacctgttcagattgtctcatggattgctccaaattcctaattactgaactggatcgtaaaataggaggagtagggttcttaccttgattcaattcactgtttacattgattgttcatgtgaataaagtgcagcaagtcatctcgagcttcatcatatcgcttgatttcctgcagtgaggacttaggagacagaggaggtggatatagatcctgttgtggctctcgacttctgctccctgccatacctggtacatcgtcttcctcttcttctgagagctccaaaggagtaacaccaatgatttcatc

SEQ ID NO: 235164 - DNA, 1490 bp, Cannabis indica
aattaccaagacagttccacaaacccatagcctcccccacagtggccttacaaaccaagatgaggtatccgcaaagaaaatatgcaagatactagggtcattccgactaattctaatacctttgatctttcctttgttcacccgaatcctcaaaaagtctacataaaatctctgcatcccaaatgtaaagatacggggaaagaaggtccccttgcctcagaccacaagatggtttaattattccaacctgacccccattcagataaacattaagagaagtggtagagatacattggtcaatccatttacaaaatttatctgggaccccaaagcaccttaggacatggtcaacaaactgccagctaagcttgtcataggctttcacaagattaattttgattgcaaagagaccctctctgcccgttttcatgttgaaggagtggatgatttcctagacaataacattgttatcttgtatatccttttcaggaacgaaggtagcttgagtatgggagataatattaggtaggatgggcttaattctatttgcaatgatcttgtatgttttttatttatttattaatgacacaaaatctatggtatttttaatatctgcaaagagataataccacttaaacacttagaatttaaattcaatgtttacaaataattatcatttcttaagcaattattaagattttgtttaataaaaaaaatatttttacctaataggggtgaaagatgttaaaaaataatatatgcagttcaaagatcttttagatctattgaactctaaactatattcaaaatttcatagaatctctacatcacttaggggtagaagaagttattgttatatgcagttcaaattttaactttgaactctagactacgagaacttactcttgatcctataagtgtcccaattaacatgttactgtagtaatagagattgataccaataaagttcttggacatagtatcacggtaccttatcttagtgggagaattttaaaattctagctcatcattatttggatgagactagtgatagcctactatgttatgatcaagataggaactttagaataaaactaagaaagtaaaattaaccattcatatggatagaaatgacttatcaatattatgaggataagataggaaatttttttgcaatatttattcgaaagacttaggcaaaattcttaatccttatgaaaagttttatggtacttctagtgattacttaatcttaagtaattattttacattaatgataatactagaatgcaacgttgatgatttagtctagatggaacttattatttcagactaagataaaatgtcacaacaagagatccttaagcaccaatagtaagaggttaaatgcatatgtgtgtatgaatttaaccagacttatactgttgagtgggagccatcaaagatgtaatcaaacaaggaatcttgggagataatcaaggaagaatctc

SEQ ID NO: 235165 - DNA, 1371 bp, Cannabis indica
tccctttacggatcccgggactactgactgtcacagtttgcccccgactcctcaacctactttgggttgtattagtctttgattcttgtggtgaatcttaggttggtcttcacctctcaaataagttagcaaatcttcctctgtttaagtatgtaaacatattgtccctttcttccctcctaggtccccatggtggacgcgaagggcgagcgaattggttaggtggttgatcatttgtatttttgttatttctttgtctccttggttgcattttccgtgaggttgtggcaccctgattctggggaccttgaccatcaataggaatgtcccttatctcctctagttgttgttcttgggggcgagtggaattatttggctcatgttcttcgatgttgggtccttgtgcccttctggttcatgaaccacggggtttttcttgtggtcgctggacaagttgctctttctgtactggcagtgcatcattttgagttgttctggctatagccatggcccgttccaactcctcatttctttagttgcactctccgagcctccgatggagttgtcgattttctaactccacaatgggacgtatctcatggggtcgtatgcattagactctcttctctcaggaacttcttcatcagggtcacttctctcgaagttcctctcagtaggacctcttcccttgtttggtctagtttaagcttgtgctccctggggctcttttcccggtcaacgtgttgtctcttcttccacgactggttcatcatgttgagtattttccatgacgaaatggtctggtttaaacaggaggagatgtgcttcaagttctttttacaaaggctctcaatgaaagcacaaaactattaactcagatttttgctaacaataaatgaagccttgaaaataaaaattaattatttataattaataaatatatgcaaaacattaagaacttttacatggttttatagttaaaatctacatacttcacgagttattattatttctaagtattcccttacaatgtgtttagattacaagagaatttctcaaatatccactcaatctcactaggtcattccttctcccaaaaatgatcgatctatttctccttaagttctatccttatttatagattttataactgctcatgaaatgtggacaattcccacgtttcatatttacaatatgtagataatatgaaataattgttgataaccgctttttgttcttatagtttccgttgccgagataatatatccaaaatatagctcgcattcttcaaagatttttgggaatgactggtcgtattctgcgagacactagtcaagatatttgtaacgccctaatgctaaggcacgctac

SEQ ID NO: 235166 - DNA, 643 bp, Cannabis indica
tttcaaaaacaatttttttaaaaaaaaaaaaaatcttttatttttgtgattaaaaaatttaaaaaataaaaatgctaccaaacgataccttatttttacaaaacaaagaccacaattttcaccttatatcctattataacaatcatgaagatagtcaatactaattctagattttgcttaaccaccccaatctctctttgaaagataagaaagtttgtagcctgatcaaatgtcacaaaccaataatcacacaaagaacaagagacggagaagaattttattgaattaatcagaatttcaatcacgaatttccagtcgttcaggtggcttggatcactcctagagcatgaatgcttcaatttacaatttattgctgagacaaagaccacaaattatttatataataagaaaactaattgattctgatttccttgtacctctaagattgccacatcagaactaatattaaaacactgagttttttgcggctaaaccttcttaactatcactccacttgcacttaaccctctaaattcaaattttgacggtaaaaccctccaaaccactgaattgcatgcagttaattgtcaatataacttgtttatgtgtacatttttgttacatgtgtcaaatttatattagt

SEQ ID NO: 235167 - DNA, 739 bp, Cannabis indica
aatggcactttgctgcagaaaattgcagtaataagccttcgaacttgccaaaagatcagctggtttcttgtgttgcttttggtgaataatattattcctgtccgaccaaataaaccacatagtgcatataatcatttcaagatcagatttggtgtgtaattgagacagttgtattagaaagtcaccctcaaacattcggctagcagcagaataatcaaatgaaaagtctgagcacctccagacagctttagcatgcttacaactaaacaaagcatgccctatcgattcccacgcatttgtgcataaactacaagtgctagaattgattattctcctgtgatgcaagtttgatgcagaaggtaaagcattgtgcatcaccctccatgcaaaaattttgactttagaaggcaaatgcaaactccaaaattgcttccaccaagttgaagaggcacttgaacaagatgaatcttcctgagaggccatagaacaggccaaatgatatcctgaatttacagtgtaagactcggaatctgtatagtgccacacccaagaatcagtaccagcattatgtgaaagagggattttgagtatattttccacatcaagagctgaaaaatcagatgttagtttatcaatatcccactggtgatcagcagagatatagtcagccactatattaccctccaaaccagagaagaaaactggtgtgaaccgattttgagcaggtatccaaggatca

SEQ ID NO: 235168 - DNA, 735 bp, Cannabis indica
acagacttgaagtgtgttaacacgagtgacaacaataaattttgcatactaagaatcaatacctggacacgttttaggagcagttcaggtatttgtctagcgtcgttcctggcttcaacatgctttcgattgctccgattccaccgatttcaccatttcagcctcctggtcttgggtcttcttcacaggctacctctcccactcaagacgacaataacgatgttgttgacttgtagtttagttttagactaacattttatttaattttgtaattataatctaaattttagttttataatatagttcggattaaagttttttaacacctcaaagaaaaaaatctcatcttgattatttattaattttattttcttcaactattatttagaaaatatcagtaacaatttagacagttcaggtggtgcttatatcaattctctttctgattctgaatacacgctaagaaaatcgtcatccgatatcagcacaccaactgctgccctccaatatttattctttattggcaacttcacttaattaaacagacagaaacttgatccatttgttcaattcaaagatttcgtaatcacgattcacggtcaaaaagcaggaaatatatatatatatataacgagaacaaagagaataaaccattctaagtcaataatggcaagtgtttcatcattaagctccatcctccttcttcagtgtctaatttttatatgcgctgcaact

SEQ ID NO: 235169 - DNA, 2105 bp, Cannabis indica
cagcacgacttagcctccaaaaggttgtcaaactatggcttcagtaggcttgttgtccatggaatcaacaacctagttgaccactacgtccacaggctgggcggccatagtctcatccaactggccaggcaatgctcacttaacgtggttggccacctagcctgtaccctggctagcccgattcgccactctactctcgtacttttggtctactatgaccaagaagtaaaccacatcttgctagaagaattccttgacaaaagggaaaaaagaaaagacgaaactaacttaaagtggcatgtctaccaacaaaaatttgtcaggtgcttcaacaaacaagtcaaagagaggaaattattcgtgagagactcagtgctctaaagaatattccttagtaccaaagatcctgcagcaagcatgtttggacccaactgaaaatgtccacaccgagttataagataacaagaagaggtgcatacaagcttggcgaatacaataagaacttggatttgtctcttctaccaaaatactggaatggataacatctcagtaagtgctctaactagctgacttgtataatggttcctctaacatttcacaatgcaggaattcagaacagagctagtacccaaagcccttcagcgatggccttccatcactctacagtgatggtctttgcacggtaagccttgtagaggtagccaaatatgaaagagctactacccatcacttttaagcatggtctctcatcacttttcagcatggcctcacattgctttttagcgatggcctctgcctgacatctcaggcaggggtaaccgaaatgtgattttaaaagaagacattaagtttaaagcttttgttacacgtaagacgaattgtgttaaaaccacttgctaacaaagataacttcttaagttattctttttcagttccacatgtgtacaccttgtagcacccccaagaaaattcccaggcaaggtctatgaaacttggtgaattgtaagtgaccaagagaccattagtctgcgtgctcacttgggggacacccacaccgcacaatgcatcgaactagcacaaagagcttatgcatagagattttcatgcttagtattagttactaaacttgcctctaagtcaagtgcaggcatacttcagtttggcataaagaaaagcaaatctagatacttacatgtcaataaaataagaagatatccaggacagtcatatgtccatagtaaaaggctttaaagctaaacaatagtagtgtccaaaaatagagtgcctataggccaaaagcaagaacatgaaagcgtcaagaccgaatataaataaaaaattagttcaaatgcataacgctaaggccttccaagaaccgtgcatttcaaaatgcataaggctatggccacacaagaactgtacaaccaaagaagaactagacagaattcctataggaatcatgtactaggttaaatctctaaggcaaggtagagttgctggcaggttccaagccaaaaggcagagttccttaaatgttccaagccatagacaaaactcaaggaaaatgtacccaagggtacttccaagataatgtcattgtacaaggctgggtatcagcgaagtacagtctccaatgtaacaacttggacaaatgttgagtcttaagttgagtattcgactataataaactcacaattaagtttcatgtagagtttataagggaaccacgtatgaggctaaggttgtatatgcctacaaggccatcacaagtttcttaccaaggtcaaaagaggacagaaagttggccacgtgcttggaaccaaggcctaggctagctagggctcccaagctttgagaagatcagccagagtcccatgacccagccaagaactggctagggtcaccaaacccaagcatgaatcatctagcttcttagggtgaaaccctaaagctggccaactaccatgattgaaccctagggccagctagttctcaaacatgaccctttgggctggccaaggttacttttgaatcaaaatgtgtgttttttcaaaactcaaatgtgttttttatgttcttcatgactgaacgaagccaagaatcac

SEQ ID NO: 235170 - DNA, 568 bp, Cannabis indica
attaatcacatttttttcttacttatagtcacaagttttgttgtgacttaaaataaaattctttgtagtgtcttggtgggagaagatgagaatagaattcgctcttgttttgggaccactgccaatatataaactcattgctaggttaataatttaagtatttctaatttagcccttcaattacaaattagaaatatcccttaaggtatctacacatttagcctatgccactttaattgtcatgaccacaattactttatttgtgtcaaacttgaaatagcaatataccaatacattgagcccatattaagaattttaatccaacaatatctcccacccgagctacatattttcttatagtgtgcaaccttataagcgcataactttgctatcataattataaattgctatcttaaattttatccatctgacatagcatgtccacgtaattagccaagattgaggacacgtggaatacaaccttcacaatatatagcaggacaaagccatcttacaaggcatgacaaaatcttcaagaaacaagtgaaatgagttaagcaagtcgtca

SEQ ID NO: 235171 - DNA, 2401 bp, Cannabis indica
taattatagtcgagactctcctgaattttcaatttgcaatttaattttgataaactatatcggtgaggagcctagaaaataaaaatcctacgctagccaaaaaggatttggaagaacaatactccatttttgcatgatactatgaatccttcttattccgtatacctgttggaacaccataacataccggtgaagctccaattaagaaaggtagtgtacaagcttcacgagcttgacccatgaaagacccaagctttggtctgtgatagcaacaacccgttgctaactctagctcgctagcttcggccaattttttctttgagactttccttttagcattgcctttacccttcaagctcaaagcatcaagctcttctgatagtacattgcattcatcacagcccgaagagttaccaaccctttcttccaaccaggcattaagcatggcctttccgaaacgatcaatatccttatctgtgacatcccataggttggcaacaattgcaggtgaaccagctagtagataggatagtggagtaccattgggtacataacagccgttcagtgtcagcgaaccactactgcaacccatcaggagagttgcagcacagtttttcagtttttgtatttcatgccttggaatatactgtgctcctgtacaaccaaacaagtacatttaggcgatttaataattcaaaattacgaccactcaaggaatacattgacaagataaaacactaaaattaacaagtttaatcaactataccacttccgtgcccgaaatatataaagaggtcatgacttttcaatgctgaagccaattcttcagtagtgggtgcaactccagcctgcccctgcatgatcaattgacatgcaatgattcatttttgtgtaaaatttaattttagtgaattttcatttatgattttattaaataagaagagaagaaaagcaatttacctccaactgttgatctttaaaccaattctcaaattcattttgtgtgcagctaagatcaccatcaggattcaataaataaaatgcatccaagggatctatgaaggggaaggttttaacttggtcttgacagtggtaacttttatctagtcttgcggagatactccaaatagaaggcatgcgatagacctcttgggttcttagaacaggaatattctcccatggaagcatctgagtcatcattagtcagtcagttttcaggaaataataatggtgacagtgaaagaaaacctaattttccagaaaatgctgacaactacattgctagggaaggaggagaatatatctttaaagcagcttagcatgaatactagaacaacagatgatgaaacatgaataactaggctgcgagagccacagatgataaatcatgaataggcaattagaatatagttaacaagataaatataacattgacatgtctacccaaatttagtgtaccttgcattactacaaaaagaaaaatagcaagccatctacatatgcctatttatgatgagaggaaataataaactagttcgtttacttctttaatattaatcatttatgcaagaccttaactatataaattgtaaaggatctgtggaaagaacatgattcaatttttaaaatccagaaacccacctgcacatcagaatcaagtattaacactattggttggcgatccatagagccatcactttcaagctccttcactgcttcacagatttgttccaaggccaaactagacagtttctcacaaccaatcctaccaatgtagcaagccttactcaaatataactgtgaaatgagttcctcttcttcaaaggcctcactaggaaccccaagaataactttgagaacactctcatttacatctattttgcatttagatttcaaataccgagtcagcttcttctgtacagtctccatgcgcttgcagctagaccgctccccgagaagtagatatttccacggtcccaaccatatatcctctactttcctgccacaacaatagaaaattttccaatcatgaaatcaagttctgaagatgtaagccagggtaaaaaccaatgtgcatcttgtattcttcctcacatatcattggtgttggaatattagctgtatattagtagtaagaattaagataaattgtctttagtagtttcttatttagtctcttagttttatatataaatattaaatatatactatattatagaatacaatacacaagtcaatcaccatattttacatgcaaccatttatatataaatattattcaacactatcatttgtgaaacatggtactcaatataacaacaaataaaattagaacattaaaataatatatttgtaaggaaaaaaatggcttagtgcatgtttgacatcatactaaaaaaaa

SEQ ID NO: 235172 - DNA, 2007 bp, Cannabis indica
tcaaattctctttcacatctttcttattttcttttctttgtcgtttatacagtatctttgctcaaatcaatgtcgttatttgtttccaaacaaaatactttagttttatctgtgtttttttatgacacctgtaatttaaaaacttattctagattagaggtggcaaaatgtgtcatcgtgtcgtgttcgtgtcatattttatatgacctgtttttatattttgtgtcaaacgtgtcgacttgttttttttgactcgtgtctaattatctcaaccctaatccgattcgtaaaaaatcatgtcgtgttcgtattgacctactgtgatccattttactattattaaagttagaattgtagaaaaaaataatagatctaagctctattagaaaattaatgcatttataatttattataaatataataaaaattaaaaaaattaaatgtttttcatttcatgttaaaaacaattaaatttaaaatttttcaacttaacattgaatcactaaatatatacttttatataattatattattattattaattttttgtattatattttaaaaaattgtgtcaaacgtgtcacattcgtgttaagcgagtcgtgtcgtatttaatccgtttttatttcgtgtaaaatcgtgtcgacccgtttttaatccgcgtctaattttcccgaccctaatcggtaaaattcgtgtcgagtttgtattcgtgtaccgtgtcgaaacccgttttgccacccctattctaaatatttcagctccaaatgtaggttaaatcaagataatggaccgacttcattataataaagggactgagatgcaaaataatcttaacattgaaaattaaatgaattaatatttattttttaaaaaattaaaaaaaaataactaaatataataaattaactaataaaaattataaaaatatatttattacatattaattttcttaaaaaaattatacaataattaaattaaattatatacattttgaagcattagatactaatttattataacaaaaactaataaatatattgaatcattaatatacaacaacagtattcagtatattgtatgactgaaaattaatataccacagtaataaaattatataccacacaaaaatcataacaatattaaatgaatactcataagcttaggtgtgaatcgacggaatggtggacaccagtgagctgagaaatagagaacaacattctttccaactagttcagagatatcggtacctaaaacaaaaatgagagatataataataataataactacaagcaattcatatagactactaacaaagctacaaaataataaaaaaaattgatcgaaccttggaacattggtgccatttacaaaattatcatctagtgatcgtgattccagttctgctttctcaatttcagcaagagcagcaatcctctcttgtgtaaaagggtaggcatcaatgccatgttcttcaaccagttcatttgcatcggagttcacagtcttcccatctggacctagtatgactagtgtaggaatgtctgaaacatcaaactcaaagtaccgcacaagcttctcagtgatcttatccttgtatggcaaagccaaccatggaattgtttctaattctttcttgaactcatcctcttcatgattcagacatattaacacaacttcaaacttctcacctttatccttgagcgtattgtaaacctcaacaagtgtattagtaaaaaattcaatataaggttcatgagaacaactcactgagaatagaagtccaactgttttaccttcaagctcagagacaagaacctgtcaatacataaattagaaaatgaaacaccaaagtaaagttattagcacaagaatttagccatgataatttacctgattcccatcttttgaaagcagatagtttcgggagctagataccagaacagaactcaaggtttggttcctcttagcttcttcttcttgctctttcaaaaattcaattctttc

SEQ ID NO: 235173 - DNA, 1476 bp, Cannabis indica
tctctctctttctctgatctttctctgatctttctcttctctttcactttgctactgctatgatcttcaagcatgaatagaaggattaacaatcctaacatggtatcagagcttgattttcctccgttgagtgctaacatggcgactgttggaactcagaatcaagcaaatcaatcgaacctgggaaacactacgaattcgtatcctgcacctcaaagaaatcgaaaccgagcttcagatgagttctcccctgtctatttttctcacaatctttctgtaaagcttaacgatcacaatttcttgctttggaaacagcaggttcttgctgctattcgtggaaatcgcctattgaagttcatcgaagatgtcgctccacctccacaattcttaagtgatgcagatcgtgcctccaaaacgtataatcctgagtttcttgactgggatgttcaggatcagctactggtttcttggatcctttcgtcgatgtccgaaagcctgcttactcgaatggtggggtgccatacagctagacagatttggtctaccttggaaaaacacttcacgttgcaagtgtcatccaagattcttgagttcagaaccaaattgcaaaatctaaggaaaggtactcaatccctcaatgatgacttacttaaagtcaagcaacacgtcgatcttcttgcctctgttggtgaaattctcagtgatcgggatcacattgctgcgattttcaaggggcttccaagtgcctatgacacgtttgtcatttcgactaatactcgcatcgagggatacactgagggggagattgaagctctgcttcttgcctcagagtccaggattgagaagactgaccaagaacctgatcttaatgtcaatcttgttgtcactgatgctgatcaacaacaaccagaagcaaatatggcctatcaaaatcgatccagaccaagttttcctcctggcttttctccaagaagtaatatgcaatttggatcttatgttcccaaattctcaggttcaagaagcaattccactcccagaggcactccatattttcctaatatgtttactcccaggggattcaactacaatctgcctcagtataatccttctcaattccctcaatctaacagagggggtaataatcgtggaggcagggttggttcttcttcaggtcgtccctaatgccaactctgtcataagattggtcacacagtggtggattgcttctacagattcgataagagtttcaccggggtgtcaccaaacaacactgcatctccccaagctcacctgctgcatactatgaaccagaatgacaccaattggtacccagattctggtgccacgaatcactgcacccttgatgctcagaatcttgcttcttgcacagtctatgagggcccagaatagctgtttgttggggatggtacaggtttgtccatcaaccatattagccattctttcatttctaattcc

SEQ ID NO: 235174 - DNA, 891 bp, Cannabis indica
tatcttgagactaaaggaaaaaaagaaaaaagttaaataagaaccatatatatagggacacgattttgtcttatgatgtaatttcacgaaatgtattccgtgatgtatacgacagccgttagatagagaagttatttgatctgaggactggagttgatttagtgataattagagttaaaaaatggtaatgtaccctgagacccattattatgtatcctgaaatccatctaatatatcacagaatatattctgtaaaagtacatcacaaaacaaaatcgtatccatcgttcaccttctttgatctttccaagaaagaaagaatattatatatatatatatatttatttatcatttgtatatgatcctaaatatttcaaacaaaatatagaataacttggattatatacttttgtttgcatcgatgtaatttcctgtgttttattggacttggagaaagaaaaacaaatcttaattaaattccaagagataaaataattctttttttaattagtaatggttttgaacgtgcagaatattgagaagacatttttgtattctctctgctatgatcttattctctactttgaatccacgttattattttattatatatcttatatattattgacttttatctttggccggttgccaaagattaagctaagtgcaatgttgttattaataaatattttgtagcaagattaagggatgactaatgctaaggtttaacagaaagctttcatataaaaaattcaataatgagttctatttttttttttaaaatagagagaaaaagggaaattaaatatgttactttgacaaaattggtctgtcaaccaatattttaattttgtttcttgtttgagtcaacaaatgttgtatataaacata

SEQ ID NO: 235175 - DNA, 1113 bp, Cannabis indica
tagatctaagatcctggtaaagtaaattccaacagcatttccacaaaaggacaagccctagtagacttcataacgaaatgtaatgaagcaaaggccagctctaatatgccagccccgcgaatgccggcatggaaggtgttcaaggatggggtgtcaaatgaaaatgaatttggagccggggtagcaatgatagacgaactccggatccagggcgtcctgcactttgcatttccagcttccaacaatgaagctgaatacgaagcactaattgtaggactgagattggccaaagctgtgggggctgcaagggtagaagtcttcagtgattcacagttagtggtcaatcaggtgtaaggggaataccaaacgcgtggagaaaaaatggccacttacgtagcgattgtcagggaattgctccaagagttcacagaatacaaagtggaaaggatcccacgagaaaagaatgctcacgcggactgtctggcaaagctagcctcagacagcaaaatagaaaaactgggggtggtacccgttgaacaccccaaggaaacggtagctagaaatgagcaaggacggagttgtatggactccatcatcaaatacataacgaaaggagaattgcctcaggaaagagctgtatccaggaggttatagtattaggcacaccgatacgtaatgatggataatatcctttatcggagaggactcagcatgccgtacttaaggtttgtgccggaccctgaagctagatggatcatgcagagggtccatgaagggttctatatagatcacaccggaggttcgagtctctcaacaaaaatattgagacaaggatacttttggccaacaatgaagaaagattgtgtagactacgtcctaaaatgtgattcgtgccaaagatttgcgaacatatcgagagccccgcccaacgaaattactctaatgactagcaaatggccctttgcggtgtgaggaataaatctcattgggtccttaccaactggaaagggaggggtaaagtatgccatagtggtcgtagactactttacgaaatggacggaggctgatcctatgaagaccataatgttggacattattttaccaggatcttag

SEQ ID NO: 235176 - DNA, 1851 bp, Cannabis indica
taaaataaattccaacattcttgccttctttccgtcttgtcttgttgacatacaaggcatgtcctcacatacacttctatgtcttgctccattttcggccaatagtaagactttgacagcaaagctagcatcctagccacacccgggtgaccagcccacttaggatcatgggtttctttaagtaactctctcctcaaagttccactgctcggtacaaacaatctgccaccattggcatagagaagcccatattcttcccagtaccgcactaattctccctttcttgcttcctcaagaagcttcttgtaaccaggatcgagcaaggactgctccctcacccggtcgaagaaagttgaactcacctgagtcaacgcaccaacaaaaacttgtacatcctttcggctaagtgcatcagccacttgattctgcttccccggtctatgaacccacacaaaatcaaattcagccaagtactcttgccaacgagcttgcttcggagttaatttcttctgagatttaaagtatgtgttggctacattatccgtcaccactgtaaactttgttcccaaaagatagtgcctccacacatctaaacaatgcaccaccgcagccatttccttctcatgagccgaatacctttgctcagcatcctttaacttccgactttcaaaagctattggatggccatcttgcaccagtactccacccaaggcacgatccgatgcatcagtttggacttcgaatggtaaatcaaaatcaggcaactttagtattggttccgaagacactgccactttcagcttctcaaatgcctcattgcattcctcagaccaacaccatttctgatcctttttaagaagatcagtaagagcgctcaccctctttgagtacccttttatgaatttccgatagtaattagccagccccaaaaatgaccgcaactccgctactttagtggggataggccaatccatgattgccttaacttttccctcatccattctcaatttcccttgaccaacccaatgaccaaggaatttcacctccttccgacaaaactcgcatttctcctttttaatgtacaacttttcctctctcagccttgtcaacaccttccgtagatgctgcaagtgttcctctaacgaattgctatagatcacaatatcatcaagatatactacaacgaatctatccaaaaactcgtatagcacatcattcatcaggttgcaaaatgttgcaggggcatttgtcaaaccgaaaggcatcaccaaaaattcgaaagacccataccttgttacacaggttgtctttgcttcatcccccactgcaattcggacctgccagtaccccgcccggagatccaatttggtgaagtatgacgcctttgtcagcctatcgaacaagtctgccgcatttggcaccggatacttgttctttactgtcactttgttcaacgccctatagtccacacacattctcaacgatccatctgatttcttttgaaataataccggagcaccatatggagctttagaaggcaccatgtatcctgattccaccatcccgttcaattgtttcctgagttcttccaactccgaaggacccatcttgtacggcgcctttgctggcggaacagctcccggtatcaactcaatcttgtgatcaattgccctcctaggagggagttctttaggcaactcgtctggcatggtgtcggcaaactcctccaacaacccagccacttcatcgggtacttctacccactgatcttgtttaatctctatcaaggcagccacatatgcttgatgcctttcttcttaatagagtttccaaattgggtcgttgattcca

SEQ ID NO: 235177 - DNA, 2579 bp, Cannabis indica
tctatccgtaggatcaaatatttccttgatctaacgaagttgacccaggactataaaatagaaaaaaggaaccacctttatattatttctttcattttaagaatttagagaattttttaagcttctttgttaaaagactaggagtagatttgcttgaaaacttgcatgccatctctgtccttaaatttttttctacgagtttcatctaacttaagtttcgactttatgcgctcggagagatcctcactgcgttcaaggattcgcagactacagagctgttcatcatcccaaaccccaacttcaaacagtaagtggcttttcttctcaatatctcacatgtttgttatgttgtatttctgggtttaattgctgatgtatttgtacatatcattgtcatctcatttggttttagtaaattttagggctgaactgtatctgggtaaatattaggttttaggcaatacgtaagttttacagaaccttcaattcatcaccttctggtttgataaaattctctccagggattgggattgcttccttctaacagcaatgtcccaatctggttcataagtttatcgtccaaaagatttaaaaattgggttccctaccaaaattgtcgtcccttataaacctaacatatcaaaacccacatcaaaattagagttaaacgacgaaagggttagggacacttaatgaaaatccatcaagaagacaatgctagtcgccacaggcgcttcttgcaagaaatcaatgaaggcaaatgccatttcttgcgagaagcggcttcgtctgaacctcccagtgtgtcctctattcctttggctaaacctttatttttacccaaagtcacaattgcttttgaaccaggtgacttggactttgaaataacatctcctaagccacataaatcaatgactccccaggattctaacgtcacctttgaggccaagttaatagaatcgaaggtgaaaattatctcgggaaacgtaggtgattcactaaggacttttggaatcgagtatgctgagttaggtcagtacgagctggtgaatttagctgttacccacctgcgcgccttacaggtgagacatctgagaaggccagtggcaagaccagtacaagtggctcgactggtataggcgcttggagccttgaacacatcagggcaggggcaataatccccctccgtgattatttcaaggattttgtaaaccaccttgggcttgccccatttcaactaaatccagtctcctacagaatcctcgcaagtttgagggttctatacaaaatcctgaattgggagtgccccacgcccatggaaattgagtatctttactccgttaaagccgttctagcgaggaagaatgctgtaggaggcttttattatcttggcactcactccagcgagcccaaaatcatcgtggacttgccaaacaaaacacccttcaaagatagcttcttttggatgaccggcctctccctaattggaacaaccaccttccgcataattcgtaagtgattgttctcattaggcctggttaaattgatccatgtctttttattctaagttatctgactaaagttttgtttttgacagccctcttgaaaagacctacccctactcctgagatggccaaccgacgcaggctcctgctgactcttccttatggccttaggttgtgcgacttccttctaagcgaggttaatatcagatttgtggacctccttactgacaaggagtttacttgtgattacaaatatcccaagtgctctttttggcagtaggttcccgtcccagatggggataaggcctgggatcacgtggcttaggcacagtaccttcaaaacactgcccctcgagacgccagtgaaggagcatcccgaggtaatcaatgtagttggtcacccacaatacttaaggcagagcgtaacacactagttacattccaagatagtcgctttaatttttacatttggcatcccgtcctcatagattgcataacacataggttcctggtaccctagattccatgtccagattaattttaatgagtcgtactatggtatagccgagcaatatggtaccatggcagatagggcaagtcacatagatgcgagcttggatttagaaccagttgagccctttgatatattcaagattacaggttctaggaattttagcggatactacggtccttctacctccacttctagtgatagctcgccttctagcggctatggtaaattccttaggtggaaaattgtaccccaaacttacctttcacttgcctttaaataattgtaacactttattttgtctcgcagacatgcttcgaggatgttatgcagagaaatgggaagaagagagtgaccgactcaagggctccttcaaatgtcaaagtggagcctttgaaaaggcaaaggaaaactaccgctcataaaaagaagaaagcctctcagcctatcaacctcgaggtctctgagactgagactcaggaacaaactcctcctccggtcaacccaagtaccagcgagcctcctcctaacacaactcacgcctctgcttcctcgagccaggc

SEQ ID NO: 235178 - DNA, 628 bp, Cannabis indica
cttggtgtgccaagaaattgagaatttgcagaagtagtaaagcaagactttagagagatccctgttatacatccctcctttaagagtaccccaaagaagtacttggcccgtagtcttgtccttgataaaacatgaatcaaaattaaaaagaaaggttatgttattatgtgttgtgatttttgaaatgcttaacaaattttttgtaattgtagaggcataaagaatgtcttttaagactatattaaaaacatttgttggaattgaagtggaaaaaattttagggatagggataatggatccattaccaactgtgattttggctttgtctttgtaatctttagttgttgaaagctattgcgtgttcgaaatcatatgatgtgtggctccactatcaacataccacccattatcatcagttgagggagtggaatgagacagcaaaatttggggattattattgttagaaactgggttagttagatttgcaggttcagtgtcatatttgtgataacatttgtaagcaagatgcccaatcttgccacagatttgacacacaggacgatttcctcgaccacgtccatctgaagcaccacgagagggaccagttgtattgcctcgatttgaaggt

SEQ ID NO: 235179 - DNA, 720 bp, Cannabis indica
gataactctaaggagtcagctaaggacaagaaaaacaaaagaagcacgacaaatacatgctaatctacactatttacactgagcctaatgaaactcgggaaaagatctatctcgcacatgagcacagggtcgcattccgtaaacctgagccataaggcatgcaagacataagggtgatgcaaccaaactttgtaagtatcacaaggacattgggcatacgatagaggagtgccatcaactgaaagacgagatagagagtttcatcgcgcgaggtcacttccagtaatatgtgaaaagacaaggcaatggacaaaactagccaaatttgcctaataacccaggcaaccaaggattacaacctcctcctctagaaggaaaggatattctggttatcttgggaaggctacatattgtaggggaaagtaataaatgcccaaaacagatatgtaaaggaagtgaagaacgagcagtctgcttttgctccagaaccttttaagaaagctaagactgaggaacctccgattgtattctcagaggaagatgaaaaacacgtgagatatcctcacatcggcccactagtaattactatccagctcgccaacgaaaggataaaaagggtgctagtggacaacgaaagttcagtgaatatcctttataaggatacattgaagaaaatgggacttgaaaaagccaaattaaaaccttgcatggtaaatctgt

SEQ ID NO: 235180 - DNA, 940 bp, Cannabis indica
tttttttatgtgatatctcattccaaagttttcatgaaagagatttgtaattttgttggccatgttgtatatataatttgattattcatacgcactaaaagtgaaacttacaaaaatttttataaaaagaattaaggattattattattccttttaaaatgggggacctccagaagcaaagtacatgaataaggctagatttgcttccttttcataatgagaaggataaagaaagtcaatactagtttatagtctaattatcatgatttgaatagagcttaatagtgtatcaaacttacaaatctatatgtaggtactagtaaagagttatgctgtcaaattttacaagacaagcttccatgataacatagcctacttaacttgagaattgtatgaatcaaagacaactacaaaatacaacaatgttgcctattgatatgaaaattaaccaagtgagaatcattagaaaattaaaccatagaggctcaaaatgatgacatctccaacttaattgctattttcatcaaaaggttagaaaagttaagttaatctaaaagttgagttaattaaaaggtttcatctccactaaattgttatatattagcatcaaccattcccccagcattattctccctcagcctttgtttcctcaatctctctttcctcttcttggtttgttcagttgggttaatggatggtggcctttcccttttctttggctgaacagtcgcctacaaatcaccaagttttatcttattagttactaaccaatagcataaaacaaacatagatgcaactaaaaaatattcatagataacaaacctgaggaattgttgtttgacattttcttgcaatatggcctgctacaccacaattgccacatttatgcacctgtccatatcttcttgtcttggttgtatttgcaagtggtggttcatca

SEQ ID NO: 235181 - DNA, 906 bp, Cannabis indica
ttcggatggtacaatttgtcccaagccttgagatgaatctcgtgtttacctttattgaatccccatcagaaatcatgaactattccatcaattttagtcgcaagctggtttgagagtttagtagtttgcatggagtacactggcatagccagccccaccgatttgataagggtggctcacccaactttagagagttatcgctttccacccttgcaacttgttggaaagcttgtccaggatgaaattaaaatcaacatctttccgtctagtacggaacaaaggaagaccccggtacatcacattacttttcagaacactaattccaatggcttctctaattccccttttgatcccattagtcgtgttcttattgaaaaaaatttaggttttgaccttgttaacttgttgaccgaaccaagaacaaaacttttccaaacggagccagaaggctttggcttcctcaatgttggctgtccccaccagaatgagatcatcagcgaagaaaatgtgggaaagaaccggtccgcctgactcagcttgatcccttttatcctacccttcctcaaggccccctaaaaaagtcttgataatatttccatggcccagataaagaggtaaggggaaagcgagtctccctgaaaaataccacaagacagcactaacttaccaacctgacctctgttcaagcagacattcagagtagtggttgagatacactgagagatccactttcgaaaagtttttggggcaccaaaagacatgagcacttcatcaataaattgccagtttaacttgtcgtaggctttaacaagatcaattttcatagcgaaaaaaccttctttccctttctttcggttaaaagagtggatgatctcctgaacaatcaccttattatcttgaatattt

SEQ ID NO: 235182 - DNA, 1151 bp, Cannabis indica
  modified_base (1125)..(1125): a, c, t, g, unknown or other
aataaattagtatttttttttttttttattgaacaacaaaatcaattaacatttcgttacgttttcaaaaataaaaaattgttttacaatcttatctctcacatttaattagaaagaatttatatattattttattaaacaaagataaataaaaaataatttatttatacgagtataactaactgtataagtataagtatataaacgatattaatttcttttaaaaaataatatctataactcatattaaataaatattacatgtcaaaccacatatatttagttttattttaaatttctttataatatttaattttaaaatatataatttttacatttagaaagcataataataattttaaaaaataaataataactaacatagaatgatcaagtcaaagtcatgtttaaagtactcattagaatctaaaactcattctacagtttcacttttggcattattgtcttgcctcaaaatattgtggtgcacggatttgttgggtaaaaaagtcctacagtttctctctccttcgctgagaaaagaagcacgctaagttagagtccctttggtgaaagggtgtagtggctatcgatagcggctgattcggtaacgttgacggccgtggctttatcgcctgagtacggaggctgctgtctcgatggtaggttgtctactcaaaggtgttgtaagtgagttcgatgcatgaaggggtgcgcctgaacggaccaccattacagtggtgcgtttggagtctgagttggtggttggtatcagttaggggtgatcttgacgtggctgggttctaggtggtcgtgattggtttctgggtgaacggtaccgtggttgtgtctggtttatggggttgggattttggtgatcagtctatgcagtcggagtgcgattgggcttggtttagttcggttggagctgattgtttgtgggtgattactgggtgttttattcttcaatttttgggtggttcgggttgtttgagtgttttggggggcctgggccgattgggtgtttgggggggggggggtttgggtagttcggttgatcggggggtcaagcttagttgtgtgtttttggggggctgggcagattggttgtttgggggggggtcnggttttttagctagtaggtgtggcgt

SEQ ID NO: 235183 - DNA, 1067 bp, Cannabis indica
atatattgtcaaatttccctttagtaaatcctccaactaaaagcaagtttcatccatccctaaagtaaatttagccaaactatgaggaactttattggctgaacgcttaatatggactatattcactttagggaaaaaggataaaagactagaaatatttacgattaaatctttgaacgaagtaattgttgagtaggagttctcaaagcatttgaaactagtaaagcattagttttcactattgcaataggcaactgcatttgtagggctcaatttagactgtaaaacattgcatttgctttcatttcatgaaaagccaaatttccaattaaaggcttggcaagtgcagcaatcacctggcaatgtgagtctcaaacatcagcctcaactcctataatattttgattggcgttgagagcgacatccacattcaacttcagagcaccttcagcagtcgacttccatggaggttgaactgctaccgacggggagatgtttggggtcgggctaaatgttggatgatacttgatcttggctgctctaaaatttttaaatagttgacagcaaaggatgcaagaagaatagatggtttagccatatttccatgaatgattcggtttctttatgtccaaatagaccagggtgtataattgaaacattatagcatcttcttgtacttttctagttgcatgtgatcattccaatgcttctggtatcacctaggaattttaggcatagatggcagatggatgttactgccccaaaataaacttgaaatggtcgtcccaaaatagcgttgtaagtctttgggcaatcaactaccataaaggtgttgtacttggaagaggatatgtcattgcttcaagagactaccccatttattgtcattagaagttgtatttttcccattggaatcaggtgttgccttgcagttgaattagacaaggtaataaatttgcttccacaagaccgatggctttgaaggcatctttaaaaatgatgttaacaaagcttctgttatctacaagaattctaaggactcttttattcacgatttgagcttctat

SEQ ID NO: 235184 - DNA, 1568 bp, Cannabis indica
acttgattcacaactaattgagagtcactgaaaatgtccaagcgatcagcccgtacttcatgtgctagcttgaagccaaatttgattgctctgtgcagttgttgcccccaagtgttataagggaaatgcctgcactgaacaattagtcagtgcagcttccatcaacatgaagtttccatgttggttctttaggttttcgttgttgatcttgctctcgcttcttctctagctcttacttttctcctgaatcttgagagatttcaagagatgaatttgtgcactcagccacaaagtatacaagggcttgaccctttattgccattcttggttaatatgtgatgtcgaactggccaagttcaatggcccacttgagtagtcggtctgatgctttaggttatcgtaaaacctatcgcaatggttgatcggtgtacacccttattgggtgtgcctaaaagtatggcctcagctttctaaaggctaggagcaagttgtaggtcatcttctccatgagtgcgtactgactttcagcgtcgattagtctcttactaatgtagtatacgaggtgttgtacacagtcttcttttcttattaggacaacacttacaacatgctctgtgatttccaagtacatgcctagctcgtcattgtctaagggttttgacaacacagtttttccgctcttggaatgctttttcacattcttctgtccactcgaattttttgttgcctctgagaatgttgaagaagggtacacacttatctgtagacttggacataaatctacttagtgcagcaatgcatcttgtcgggttttgttgcctctgagatttcatggtcagttgtggcatttgcaagctggtcaattcttgggagcagaaagtagtcctttggacatagtagtcctttggacatgctttgttcaggttggtgaagttgagcaaaacccccaatttttggtgggtttgggcaccagcacagggttggatacccaaagtggatagaatgcttctgttatgaagtcataggctcgtagccttttgacttcatctttgagcgcttggacgcgttctttgtccaacaacctcctcttctattgtacacgtttaatgttgggatcgatgttgagatcatggatcatcacgaaggggtcgattccaaccatgtctccatgtgatcatgcaaagaggtctaggttttctcttaaaaaatttatcagtaatgattttatttctggcgataaacccttcccgatcttcaatcttccagctagacaagtgggatcaaccaccacttcctccaactcttttacaggtccaaaactgtttgcaggatccccaaagcaaggatctatgtctgtgtccccgctttgggctggacatcattgccatttgttgggtttttctttcgagatcttggcaggcatcttctctttcttggctttggacagggccaagttgtaacactgacgggcagattgttggtatcacctcaaacatcgtaccccatgccttattgggaacttcaagcagatgtggtagatggatgtcatctccttcaggtcgtatagg

SEQ ID NO: 235185 - DNA, 862 bp, Cannabis indica
atacatatacgtatatttacacataaaaccctaactacccattgactttttctagccattgtgaatagctagcctagctattaacatattattattattattatttgattcagataaccataagttgagaatatccaatagaaaagtgaggagataagggtgataacggaggcacagtaaaaatccccttaacgtcttgactgtcccataccgacgtccaatttgacggcgttaacggtacaactgcactgttaccgttactactccctgatgagttcacctcctgatgatcatttgacgatgtagtactctccgttaatgtcgacgacgtcgtttcttccttcttcaactccttcgcttctctaataacctccttatcctcatcacttcctctcctccttttcaaaacagtacaattggccggcgcgtgaacctcagtgctctccggcatcggcgacctgccggcctctagaggaaaattcagtatggctttgctacctctcatcctgaaggcagcgcggtcgtaagctctggcagcttctatggcggtttcaaaggttcctagccacacgcgcgagccgcggcgattggggtcacgaatctcggcggcgtacttcccccacggcctcttccttacaccccggtagtgtctgctgtcaggagcgttgtcagaaaccgacgatgacatggccggaaccttcaccggaaccggagaatttgccggtggtatggctacgttaatagaagggcggcgctggcttaaactggagggtttagagtagtggccgcgggtattaactgatgtgtttagtttggtttgaaactcaaaactgtgatttgcctcctcacaatagtcatcgtt

SEQ ID NO: 235186 - DNA, 1478 bp, Cannabis indica
agatccaggttcagatcttggttatgttctgctacagaaaggaatcaagggctagagatctaaacggaggggtcataatattccgctgcacccaatgtaaggtttcctaaactttatatgtgtttatttcattgttttagaattcatattaggaggttaatgaaacatacatggtagtaaatctagatcctggtaaaatatttccaacaccttctccccaccagctaaagcagaattgaccagtgtagtaggtccaatcttgatgggagggggaatctcccagacgtctaatgacgaggaagttgaggggggacgcggtttctgagtcctggaggctctggtcttaatcttccccttgccttttcttgggatttcttgaccttgtccatagcggctgagatctagctaatcaagacttcaacatcacggattctggtgtatttgcacataagacaacaatatgagtaaataagaggagcaattgcgagtcatataattgtaaggaaaatagcaacgccaagaagaaaaatctagtaaagaaacttgtgtgtgggtgcaaccattcagtgaagtgctatagggttgtccacgaggaaaagctaaaatgctcctatgaccaattaagctgccatactccttaaattttggcagagacatggccaaaaagggtctactttggcagtatccgaaggagtccccagatttctagggctccgaactatatggtctactttatctatgcaatccttcatgggatatctacaacgatttatgcctaggaaatatttgtcaaatcctccttgattccttcgagacatgcgactcgggctggggatacagaggatgcagaagggtccattacctcttcccaaattattggcacttggtgtccccacatcatggtaagtagcggcaaacctctctgagatcttttcttcttcggacaaaggatcgggatggcacaacacccaatcagagtttagggcattatcatttttggacacatttgtgattataatggataagtcagtggcaatcgcctccttcacttccctaagagcttggcagtgcccttgaaagttgactgtgttaatacattgaaattttgtgatcaagtcgaacctgcagaggagttcagttgtcaccaggtccccaacctttaattgctcttcagaaaaggccctatatcgagcttctttcttgactatctccctagtcctaacactctgagggggaagctctgctacaaatcaaatatgttagtccaagtacgaaaattagtagagtttaaaaagcaggaaaaactcaaggtaaatcattagaatatctgggagttgaaagcttaactaaaggaaactcggaagaaaagaaccaatatttcggaggtcatgagtgcgatccgtttgacaaacagggcagtaagagtctgggtgctcatccagtcagaagaaccccaactttgatatgtttgtcctcat

SEQ ID NO: 235187 - DNA, 6680 bp, Cannabis indica
ttcttatccaaacacacgacctaataattatacagtaacatccaaacacgcctctaatgaaatagtttccattcaaaaaagaaatacatatataaaactataaattatacttattttataatagtaatttttgttaattgtattcaacggctaaataaaaaaaaattgacagttggcaaactgtaaacgattataattaccctaatttttattatgtcaatcaatcattgatcaaaaataaaaaaatatttacatctatctaagtatctatactttaaggcaaatgaatttctcgattaaaattagtttatattatattattaattaattaataattaataatgcttactctactctgagtctggatttaaacttttagggcattttttttttaatttttattatttttttttatgctacaaaaagaaaagaaaaaagttttggggagagagaagctctgtgtagtttctcagctttcattcttttcccggaaaattcttgatcgaaacctttcatcttctcaagtcggtgatttttttttttgttttctttcaatctacttattctactgtatttttttttgtgctaacatcaatttcggctatggcgatgatattcttctgctaatctacaatgagtttttgtgattttgaattgttttaaaatgtgttgattttttcttcgccttctcgcagcactgattctgaagctcgttactaatggcgctgtcggaatcagacctcccagcgatatactcgttcttgaccaactcattgagtggcgacgaaaaacgtccgtaagccagcagaggaggctctcgctcagtgcgagtctaggcctggcttttgctcttgtcttatggcgagtactctctatctttttgatttgtcttttgtttcttcgttagaactgatactgtttgcttcatttttatgttgtttggtaatatagcgaatagttttatttttattctagtatttgttattatttttgattagatttccgtactgcattgtaggaaattataagtgccaagcatttggccaatcaggtggacgttagattgatggcctcactgtatttcaagaacagtattaatcgctactggaggaaaagacgtgattcttcgtgagacactgttcattgttcttttggattttaatattaaaatgcatatggtgaaagtggtagtttttagagcttagaaattcacaatgtgtgtatttgggtacctgtatcagcccatttgattgaaaaatacttctatttatatacaatgcaatcagtttatgcgagtatgtgatctagtaaagcatttagtatctgcatttgttttcatgtacaatgtgaacatactgttttcaggggaatcagcaacgaggagaaagtacatctgaggcaaaaactggtatcccacttaagagaagaaaattatcaggtgtttgttgcctttgcttctattttttttttgtacaaaatgggtcatgttctccctctatctctctaaatatatgtgatataattttatctgcttcatcatatatcgttcaagatttaccatcttctttgaattattcttcttatgtattatttctttttttaattattcattttagaggtgacatttttttagagaaagaatccaaccttaactgtgctcttcatttgtctgatacagatagctctcacattggctgtgctcatctcaaaaattgctcgaattgattatccaatagaatggtgaagtatttttttttacttcttcatcttcttttaggtcttcattgttcttgttgtaaatgtgatgtttgttaaaacttttacatattttgtaagtattcatatttctctccaatttccatttaatgggggtagactggttgggtcatccaatgtccggctctctgtacaagaaaatttaatttgtgtctcagcaatttcagtctgagtttgtgatacaattttttaggagaatgttgttgtaatcatttaaaatatttagttgccctgatgtagaagttcttagatatgttttcctgtaattcttttttctttgtttttctgcgtggttttctcttccacactcgttcttataattatagtattgattctagtcccttttcttatgaaaaatgaaggaacaaggaagaaatagtagcatttatttgactcttttacaatatgattggacagtgttttttttttttttgaaaaagagaaaagtcttatgtcttagactgatctccacccaaatttaatttgtgctagaggaaaaccatggtattcctaacaaataaaacataggattcaagtgcataaaatagaacaattaatgacaaaagttcctaagtcagttgtatagtatcttggagcaagatacacccccactctctagtgagatattggaaggaaagatcaacaaaacctctggttttatccacgtagcaccgtgagcttggacagtgttttgattggttaatagaagtcacaccttaatctattttaattttacagtaatatgattttgaatatttgtttaactcgctgtataaaatctacaagtttttatagcatgctatatataggataggatctgaatcattacttttcccattttgagcattcatgtagtatatgatgtcatgatcatctgttggatgtgatgaattatacaggccagatctcttttcagttttagcggaacaacttcggtcagcagatgctctctcttctcacagaatctttttgatcctctttcgaaccttgaaagaattgtccactaagcgtctaatagatggccaaaggacttttgcacaggtaaagagtactaatgtcactctttttcccgttaaagttttacatccttattctttgaggtgattgttttttgtaactatttttctgacattacatgtatgtgatgatacttttctgggcctggctcgtaatgttctttgaactcctgctgctcctctctagccaaacatagcttgttgaattaaatcaacgtatgaaacgcatgtcaattatctgtagaggcatatgggacttgaccgttgaattatatagttgtattttgaaagtggcaaaggtgattgataataaataaagttgtttctgggtgggggatgaggctgttgattttaaaccaaaagagtttggtcgttttggagttataaactatttaaaatgtaacaatgcgctgattacaaaatgtcattccaatactatgagctgtaaattaggtaatgggtaagaaatgtactcataaattggtattgcaatttcatcttaaaattatatgtactccactttctttgtactgatgctttatagaattgcatgctttataagaattacaattgaagaccatttttagtttttagcatggggtagctcaaatggtcagacacgtggtttgccaccccaaagtttgaggtttgagtccctcagtttcctgttcccccaaatattattgaaataggcggggatcctagtttcaaaaaaaaaaaaattgccaaagactttaaattctgaattatttatgccaaacaccgagtaagagtattggtgaaataaagtttttcatggtttcattttctactttaatttaataatcatatagggctttgaatttcaataatttttttttttacattctgatgatgtgttttattggcagatatcttcccatttctttgattatagctggcagctttggcaatgtgacgtgcagaccatattacatggtttctctacactttcccagagttcaaatgctctagagcatcaagaggagctttatcttatatgtgagcgttggttgttatgcttaaagatcataagacaattaataatttctggatatccaagtgatgcaaaaagtgtgcaagtaattaatttctccttaagttctctttctcacattgttggtcttttgtgtgtttagcagtttagcggacacctcttgcagtttaactgtaaattttgattgtaaaatttctttgtctacttcaggaggttagaccagtcaaggaagtttctcctgtgatcttgaatgctgttcaatcatttcttccattctgtaagatattgtttatttatttattttattcaagctgttatcattattagtaacatattgtaaagccactccagaacatgttgttttcctccacaaataattctaaataactacttgattgtaaattcatattggaccatgttaaaaatgactcaggataatgttgaagaaatgttgacactgtattttgatgggactaaatatggtacttgtcttctttttggtggttttctttataggactaaaaagctatacatttcattttgctttggatgagtgtttttattccttactgttaattgcctgtaagagtatgcttttcataggaaacaatattcacccaagatgggtagagttcaaaataatctacatacttagtttgcttccacaaagtttgagcttcgagtccctcctaggaacctacatagcaattacaataatttctggtcccatatattatagagctaggtgagtagtctagttttcaaaatataggaaacaaaatttcttttataatgaaaattggattagaaaggaaagatgacaaggtatccttttgtagcaatttttcaaaatgacccaaggcagactagtgattttctatgtctctttattaatggtatagcaacacttacagatccactattccttttttgttttttgttattttttgtcgactctttgggtcttcattatattggagaagtttggtacccaagatgggtagctcaaacagttaggtatgcggtttgacttcgctcccacaaaatctgaggttcgagtccctcttaggtacatgcttagcatttgccatagttttctggtccctatacttagcatttgcgatagttttctggtccccaaatattgtagggttcattggggagcttagttttgaaataatgaattgaagatataagttgtaaattaaatttgttgcaagttgcaagtaatattaaagagttgttgcaagttgtaagttgcaagattatgtagtgctttagctagaaggaatggttggattatgattgcaagttttatctaaacaactgcttgttttttcatgcattatttggcagattcaactttacagaagggacccgctaaattgtgggacttcataaagagagcatgcattaagttgatgaaggttttaattaaaattcaagaaactcatcctttttcattcagcgataaaagtgtccttccacttgtcatggttttctgtttaaataagataacagatcctgaaccagatgcattatcatttgaacaatttttgatacaatgtatggtaatggtaaaaagtgtgttggaatgtaaagaatataagcgaagtcttattggtcgagtagtcgaagaaaatggagtaacactagagcagatgaagaaaaacatatccaatgctgttaatggtgtcctaacttccctcatgccaagtgatcgcatactacttttatgtaacgtgctaataagaaggtaatggtattctgacctttgctataacctgatccagtttatcttttaacatgcatgtgtactcttttaatgttatgcttaactatgttaaattataggatttttagataaatgcccctgagtttttttctgtttgtcaatttagttcttgagaatttgttttgtggtgattaagttcttgagttttataataacagtagtaattgagtccttttagttaattttgtcacaatttttttagtttttgaatgatttttttagaactatttggaggtgtataatatttacgaaattttaaaattatctataaaaaagtttagaattttgttaaaatttatttaaaataacgacttaattgttactatttttaaattcaagggcttgattgtcaaaagcaatttctaagggactaaattctcaaacaacaaaaaactcagtgggtatttatgttaaaagccctaatatatcagtttgattacttggaggcatggtccgaatgtgatatttcttgtaatcttttgggaaattttatgtgtaacaagtcacttggtgctttgtcatcatccacatttatttgagaatcttctgggcacttctgaggcagaacctttcatccaggcttaaaaaaagtttataatattttttttcttttatatgcatcatctagtttttcacttttgagggaaacctttctccttgtcatgaaaagtgaaataaataatcatttattgaatgacaaactactcaactgtctagtcctccctgacatatgaaacacaaaataaaattacaaaagatcgtgccaatctctattaagatcagagaaaggcacattttttaaactcgctaacactacacagccaaatagccacccagtttgattcaatcctaaagctgttcttcgttgccttattctctttttcctttttaaccaaattgctcaccaagtagccataacccctggtctccatagcagcttcttagttttaataatgttgatttctacaattctttggtatgcacctcagaatttttaatttcttcagaagtatgaaccataacggaaaataataaaaaaaatgcagaaatacctgcttcttttttctctttttttttt

SEQ ID NO: 235188 - DNA, 900 bp, Cannabis indica
agcaaaaagcaacacacttattagtttcaagataagaggggtataataacaaaagtctttctcgaaggttctcgataaatacttttggaaggcaaatgttatacctgatttttgaaaaataaaaaaagtcaattttgcaactttaacaaagacttacaaatgtcaaataagttaagacatcctacttgagggccccatggaaactttaggagactcaaaaatattgaccaaccacttggtgatgggattcacacacctaagtgtgcccaaactagggtttatgggcctgcataagcgttttcaccctagagacctcaatccgagaatgagaccaacaaggaattaactaatttaggcataaaaaggcttaaatttgaacataaagtcaaaattgcacaagaatttcatgcaacatggcatatgcgaccactgccacttgaaggtggcagtgatctccttctttttggagagcactgccacaagaagatggcatctctctctactcaaaaagtaccaaaggggacttgtcaaaatgtgttccctctacatctaagagtataacacaagtgaaagaaacaatttcccaccaaagcacaagcctagctgaccactgccatctttgtggaacaaagagtggtagtggttagccacatcaaatggggatgagatttttttgccaaaattacctttacatcataaacatgtcaaaaccaagtgagaaaatagaaactactttgctgaccactaccatctttttagcaaaaatagtggtagtgttcggccacaacaagaaatgaggagtttctttggacaaagtgtatttctaacaataatatgtcaaatataagtgagaaaagccacccaagggtgtacatgttggaatttattttaccaggatct

SEQ ID NO: 235189 - DNA, 2197 bp, Cannabis indica
atccagacaccgactacgagttcggtcctagccctgggtccagatccggatcccgatctcgggtcccagtctggttccatttctggcgccgtgtcacgagctgggtcctaggttcaagtttgggtttcgggttgggtcttgggttttggtcctagttccgttgccaaggtccctatcccgattctaggtccaagttcaagttttagtttgggtttgggtccaaccttgggtcttgggtcctaggttccctgatcaaatcctgatcctaattgtccagttctagctcatgtcttgggtcctcgttcgattctcagatccaagtttgggtctaggtttgggtgttgggtcctcgataatgggttcgggtacccgatccaggtcagggtcctaggtcttgctctgggtacgatttgggttcgggtctgggttcgagtccaggttcgtcaccgaatccctgtctaggtccgcgtctgggtttgggatcacgccccaagtctagattcgggtctaggtcttcatcttggtctaggggcacgaccgtgtctgggcccgagttctggtctcggtttgggtctggggccaggtccgagttaggttctaggtccgggtcagggtcatggtcacagcctttgtcttattcgagggtcctgtactggcgattcttgttcaagttccaatttcgggtcccgagtccaggtaaggtccgggttcgggtcctagtccaagttcacgtccttgtctgagtcccagatttggatcctggtcatgtgtcccactctagttctggttcaagtctcttgtcccaggtccgagtttgggttcaggaccaaaattggggtgcagttctaggtcccttccccaattttgtgtcctcgctctgattccatgtttgggtctaagtttgggtccaagtttgggtcccgagtccaagtctgggtcccgatttgggtctaggtgtaggttggagtcttgggtcttggtcttgacacggtttcgagactaggtccaggtccagttatggttcaaagtcgaggtctaagtcctggttcttgtcccattcccaagttccgatctactgctggttcagttccaattttgggtcacagggtacgagctcgggtccagttttgggtcagggactgggttcgggtttgggtctaggtttgggttcgggtctaggttcggctcctagtctgggtttaggtctggggctgggtctctgatctagacaccgactacgagttcggtcctagccttgggtccagatccggatcccgatctcgggtcccagtctggttccatttctagcgccgggtcacgaggtgggtcctaggttcaagtttgggtttcgagtcgggtcttgggttttggtcctagttccgttgccaaggtccctatcccgattctaggtccaagtccaggttttagtttgggtttgggtcctagttgttgtttaggtttgggtctcggtctgggattttatttgagtttgggtttgggtcatggtccttgtcctagtcctagtctggtttccatttcaattgcgattccgagttcgagtttgggtttgggtccgaatcttgttctaggtctgaattaggctttgaaggtgggttagggtccctggtttgggttcaagttcgggttcgagtcccatgttttgatctcgatctgagttcgggtttagttctggttctaagtcctgggtttcgatcccgctctaggttcgacttctggtgaaggtgtaggtctaggtttgggtctgattttgggtctaagtctgagttcgagtcccgggttcgggtatgattttgggttcgggttttgtcctggtatgtgggttcatgtgcaggttcctgttctgttttttatccagggcaagtttcgggtctgaatctgggtgtgacttcggattcctttgtcaaggtcaagtcctgttttgggtttgagtcccagatttagatctaggtctgtgtttcggggtctaggtccaacatccaagtccggttcctagctcctggtttgggtccaggttcgggttcgggtcccgagtcttggttttagtccaggtcccggtctaggttcgagtccaagtctcgatcccagtcttggtctgggttctggatcaggtccttatcagggtttggatcctggtctgggtcccgatttgggtgtaggtctgggttggatttcagaa

SEQ ID NO: 235190 - DNA, 1302 bp, Cannabis indica
agcaaaccggcaatgtaagacagaggcacaaggtcaccagagcagtgattgttccacgcaatggaagcatggggtaacgttgttgttgatgagcttggccatggcttccaagatctcaaatctaatacctgagtagccttggagaagtgtgttaatcctaacgagcaaacctgctcttgcagatgagcgaggcagagtgtggcatgactctgttccgttaccaaatattccagcattcaagaatctaattagctccttctgaagggcaccaccttgtttggttctcctatgtgaggtggcaccaaaaccagtggtgacaccatagctgtctgtgcctttgctcatactctccataacccaatcactactagccttaactccagcccttgacgactctgaaagttctaccttaactccgtcgacgtcaccgccagcagcaatggcagccacctgagcaatggtgagagtctcacccccaagacggacgactggttttcgatactccgcaaccattctcttgacttcgtccaagtggctgccagtcatggactctgcggcagcaccccaattaagtgggtcattactagagacgattggtgttggcttaatagtcttgcacaaactctccatttgaagtaataataagttttgtatgtataatatatattgattggatggtgtgtttagagttggagaggttattaattgtatgaagaaatatgaaatggaatttggtttgaagtgtaaggagaagttatgaggatgttatatagaagctattagagtaagatgaagagatagagaagtatataggttttttcaaagtgggtggctgaagagaaagagaaagtgtttggtgagtgcgttggtttggtatgcatgagaaatttgaccaaaggaaggcagtgagaaagagtttggttttggttgctattactattattattttatcttttgagtggaagtggactatacaaacaagtttttgggtccctccctttattaaatatttattcaattaaaaaaactaattgatattaaaagactaattaatatatagttacaggaattaatacaccacactactaccttttctttgtctcattgtaattattaattgtctaattggtttgccattattttatctgcatgcatgagaaaaatcattttctttcttgtttggtcaagtcaatgggtgtggtttttattctagtactaattgaactcacaaatgagcccataatttaactaaactttacaaattgattgagagtttatccattttcataaatttattttaat

SEQ ID NO: 235191 - DNA, 1221 bp, Cannabis indica
gcaaaaataagaactctggtggggtgggtttttagagtttacgtgagtataatctatctttgttgggtaagcaaggttggtggttacttctgcaccaggcttctcttgtgggtcggatatataaggctcgatattttcctaactgctcattcttggaggccgagttgggtggcaatccgagctttatatggcgcagtgtctttgagtcacaatcgctactcagagatggtgcccgtaggagaataggaccaggttcatctactgaggtgttcaacacaccttagcttttgtctgaggctaacttgtatgtggtgtctaatcatccaacactggccaattgtaaagtgtctcagctcatgaagccagatagtagacaatgagacttggagcttattgaggacttgtttgattcccgcgatgttgagctcatcaaacaaatgcctttgagtgttaatcttcggagtgatacttggttttggaataaggaaccaactggttttttcactgtcaaaagttcctataatcacttacaggcggtcaatggtaattggaactcatctatggaggatgatgtttggaagatgctgtggaagattaaagcccctcctaaggttttacattttgcttggaatctttcgggttgtttacctacacgtactcagctttatagtagacacgttcctgtggatctacattgtgtgttgtgcaactatggggaagagtcaattttccatgttttggttcaatgttcctttgctcattcatgttggctccgatcggcgttaggtgttggccattctgcagcaaccaatttttttgactggtttttggaagtgttggcaataggcaatatggggttggttgaagaagctgtcatggttagttgggcaatttggaaggctcggaatgatatgctttggaatggtaaaagttatagtgctgctgatgttgtttggctggctcgaaccactctccgacaatggaagtgtgcttagtctaagcggctggactcgattttcctgtcttccaatcgcaatgacacaagagaacgctggttcaaaccggctactggacagttaaaaattaatgtggatgtggcagtttttgaagacacaaatgagattggtactggttttctagcacgcggctgtgatggtcgaataattgaggcgttttcaactatttcttctgtcagctgcgacccgaaattgcaaaaattct

SEQ ID NO: 235192 - DNA, 2300 bp, Cannabis indica
aaaatgttatttgtgactaaaacatcgtatttagatacaaattatcactaatttaattagttttagtcgcagtaagtattgtgactaaatatacattaatttagtcacaacaaattgtaatttttgtgactaatacatttatccactgacattttagtcacaacataagaataatgatttataattagtcataactttttattttcaatcacaaattttgttctgactataaaagtaattttttttatagtgactatagagtaaatggtcgctcatcggagcaacctatttccaaacccaagaaaaaaaacataaagggtcgagatcctttaattgaaatgtagacaagaagcaataacttggtctacataaagggtaggggatacttggtcgacataagtcgtttgtcgacaaagcacataatttttctggcaaaattttacgctgacgactttcttggccagcataagttccaacgctggcattaagttgtcggctgaggggtgtctgacgaagttatgccagcaaatcaatcaccggcaaaactttcccgccatttttttccgtgaaagctttgccggcacaccttacttcgcctgcaaaacattgcaaaaaaaaattatttttgttttgccaacgatgtaaatttcgacgacaaaaggtttttttaaatatttttaagcatctaataaaactaaagttaaactaaaactgaaactaattttttgttaaataataatatataaatataatttgaattatattataaaattaaaatttatattataataacaaaaataaataagctatctaaaactaaataaagtattgttagtttataaaaattagtaatatttacaatgaaaattgtaaactaaaaataaaactacaagttagtaacattgttatcgtcaacgtcgtcctgagtgggaggggcagcctgtgaataagacccaagaccaggaggttgaaatagtagaattagagccatcgggtgcaaattgaagacgggaacgatgtcggccagttgcctaaattactcttgaaacgtgtttaggaattgatgctgagtgtacatcatttgttgttgccactcattccatgcttcctgctcttccaccctttgctttagggcctcgtactctttttgggtgacagaaggttggtcggagggacctgccctctcggcccgccctaagtctcggcaattgtctcagtccccttaagtggcgtgaccgctcacccagcacttgtgtcataacaggcatgggtggggtcgacattgtggacattggttggtattggttgagtttcacgaatcttaaccattttggcctataaaatactttgaacaaactattagagctgaatagaaattaaatatagaacgactttcttaaatttatatcacatgcagttgttgtgtgtgttcatcgcgccatttgttgttcttgtagtggaacatttgaaaagtgcccacggcactggaaagatcccccatctcgggattagtctatttttatagataaaataaattagaaatatattattcaaaaaaatattaatttttaggcaatgataattatagcatcatacactgctgacatgtggctaactatagtcttagacctccatccaccttgaattttcatttgggctcagtttttcgcattttgcttggctcttgcctgtaatttaaagtaaatttattattcgcaaaataagcaaagaaaacataagttaatggagattcaattttataatacttttattttctacttgttgtttttggtctttacagtatgcaataacctcagctcacacctctggtgtgatcacatttggacgtaatctcttagtcccttcttcctctccatatttctcaatattctcattccatgtctttttcgtgtttgatctccagtcatatagctcttttgacattgatttaagaccgtagtccacaaacatatataagattgtcagttgggaactcaaacttggtttaagaaaaataaacattaaagtcatatataaatttttttgtataatagttttgtttgatctattacaataaaaatttaaaagttaccgctagtctgtcccagataatccaatttatctctctctccctccctatttctctaaaatatgaaacttaagtacgatttactatacattatacttgtagtgtatgtgattttgattcaaatcatatatgtagatagacatgtacgtaaaggtgttgtatataattcgattatgcatgacttggctgatatgtaataaatattttttat

SEQ ID NO: 235193 - DNA, 1227 bp, Cannabis indica
gattaaaggctgtccggtcagccagttattcaaaaaatgaaaaatatattcgaagtgtaaagaccgcttggccggtcactttgtcataaaagaaggcatattggccgaatagataaaaaaagataataaaaagaaggcacttaaacagcaggagtcccaggcttcttgtacgagtcggctgaatttgaaggagccgagggatcgtcattctgagtggaaggagcctcaacattctgatcggcaggagaagtggaagtgcattcctcggactccccgtaggccacctgagtagcgcagtagtcgagaaacatgcctttggaagcgcccagatagtcaaatttttctttgggattggccttccaaaagtcataaaatatctcgagaccagctgtctctaaggcattcaccttctctctgagccttaccacctcagacttctggttattaacctcagctttgagttccttctccatggccttcttttcatcctccaggatgcaaagaaggctccggagaccctctcttttttcttggagactggtcacttcctgatataaagaagcaatatcgaccttaagctgttcggttgaaggcgtatcctgcagctccttggtcagctcggcaactttgatctcagctgctaggagtttcttgttgacttctcccaactctatccgcacagctccaagctgaacctaggcatcctcggcatcctttttggccaagtccacttccgttcgcattgtgttggaaatggcaaggttcttagtagcagtcgacttagctcaagaatagacataagccattttcacactagttagtgcaggaaaaaggcattaaaataaaaactagtcaaagagaagtgaaagggaaaagttagaaaatacttacccgtgaaagctatttcaagactcttcccatgacaagctcgaaagacaagtcattgtcctccccaaccaactgttcgtttacctcggggactgactgactcacatagtgggtgagcatatctcttcctcttttagtctcctggtgcaatacttaaggtggggcaggggccttaacctgttcagacccgcttctgatcagtttggatccacctttcgcctgctcgaatccatccgaactccctcctcgggaactcttggacttagtaatttttgaggtaggatggtccacaacagtttgttctttagaaaggtcaatgaccacttcagctggtgcctt

SEQ ID NO: 235194 - DNA, 1074 bp, Cannabis indica
taaaaactaaataagaaagtaaataaaatgagaaaagaaaatgagcaaagtgatgagctagaacgattaaatccccctagaatgcaaattcaatgtaaatgtcatagaagaatacattagtaattaaattttgtcatccgaaaatataaataaacatataatttttccaaacctatatgttatgggctctcaagattaaattaacatattcctatgcaaatttacacctagagaacacaaattaagcactaatttcccatgagtcatacaaggtaaatagcatattcctataccatctacaaatcacacttttccaaggtgataatcttgcatcattcaagtatttctactaatcttattttttccaaaatcaaaattagctaacagcctacaattggtgatcaatcaaaagtaggtaaacaaacattaggcatccttgaatgaacaatactttattatcaaaaacattcataaaacatcaataaaattcataatccaaggttcattaaaagttttaactaagataaattagttcatgctcaaaaatacaaaaatacccaaaataaaaataaagaagtatgaaaatgaaatacaaaagattaaaggagtagaagaaactatgtggatagatcctccttcttccttcttccttgtgcactcctcttcttcttcttcttcttcttctttttcttcattcctctaagtattttcaataatggtggctccaagaattgtgttcctcccttttcttttaagctagggtaaaatttccttttctaccttttcaaaaatgcccctccacatggttccttaattcccacttagagacttttccaactagatcagctcaaaaccacttgtctttcaccacctcagcctcatttttgccacatcaattaataaattgccacatcatctttttctacattagtttcaacaatcagccctgctacttttgctgcagtaaaattcttgcaaaacttcagcaaaaccttgcactttctctattaagtcattttctttaccaaaactcaaataaaacttaataatttccactaacaactccaaattacc

SEQ ID NO: 235195 - DNA, 958 bp, Cannabis indica
agaaaacaaatgtagcatattttagcttattttcactatatgttgcatatgttcataattaacacaagggaatatagtgtattctattaagacatctttatcactttccgttggatgttctatatgtgttgcataattgaactttgaataaaatggtttgactatacaatttttcttttttatttatctcttggtcttgttttgatctttacagatgatgcttaagaatcactgtgatgagcttatcttgatctttcttatgacaatggaaactactacaactcttatgtggtgacacttactatagctcgaattttattacatttgaggtatattttatataattgctatattacatagaattcaataggaaagtttgcatatcttatatattcatccatagagaagtaggttcaaagactttgtgtgttgcggtgataatggaaagttgataacttgcctgttttagtgaagtaggatttgtgaaatttgtgtgttgcgatgagataaggatccaaacttgagtattatctgattttttgcggttgaaattgacagatggttaggttaataaaatagggagaatgttgttcgacttttttaaatatatttattatattttctaagtagttgcgtgcattgataggcatgagaatatggtattattgtaggttaattaaagaataatgtctggtcaaataagttctaattctgagaatgatgttaattttgtgccttcaactaataatgaagaaatacactctgttagtaatacattagatgaaaatatgaatataggtagaaaaccgtgtttttgcaaatgtcaatgatatatacgaaaatataaaactatatacgcttgcagaagcagaatgtaattcggctactgcagaaaccagttttgcagtgacaaaatagaacaggcagaatataaaaatatttgcagaaaaataaataa

SEQ ID NO: 235196 - DNA, 1429 bp, Cannabis indica
tggaatggctattccattttaaaaagaaaagaatgacaattccaatgtaacaaaaaaaaaataatgattttttatcaatttttttatacattttaaatttattccattccattccattcctattcctattctcattctcattcctattcctatattttcattcctcccaaccaaacgcctaatttttttttttctctccagctcctaatgctcccatgagtgtcgtcgaccaaatctaggttgatggctcctgggagccatgcctctggctgcctctctgcaaggcggaggtcccctttggtgggttcaagtaggtgtcggaccttgttcctgggggacagtgtcgtggtccctgagctttcaggcggggcggggtggccgccattcttggtggctgggcatctctattgagatgctcctctcctttggctgggggttgcaattggagtcatcctcttgggccgcgagtcggcgatggtggtgggcttcttgtggatctccttctctcgttttttagaatggcatttttcgaaggcccttttcagtgtgagcttggactgttgagtggtgttgtttttacatttttttttttcagatcatgatgtgtgcccttgggttactatccaggggtcttggctccagtgcgcaatgggaggctaagcatggaattttctcgttcgaagatggcaacgctcttttgcctttgttctgcttatttcaagctttcgtgttgtctctgtgacttagggagaaggtctttaaagttgttctatctgtttttctatttgtttggtttgtttatattagcttgttaagtttttttggtgttgtgcaccttttgtccttagtgaagctggtattaggccttttttagggggtttatccatttagatactcctgtatgagccatgagcttattgcacctttcattatcggcgtggttggccaacatttgagtcatctcctagtgagatttgtacaagtttgtgtaaccttgaatgaagttaccctttcaaaaatatatatatatatataattttgttttttgactactacaaaaaggcttattcctttcgttcctcaaattggttttttcaaggattattactaataaagttatgtgtgactgtttaaaattgtcagggatgctctactattcccgatggttttaaacattcatttagattgtgcaaaacgatcaagattttaatattaaaaaatgagttaaaatggtatccttgacaattttaaatcgttgggtatattatagccaacggtttaaaactgtccgccatattatacctgacagttttaaatcgtcggccatactatacatgacgattttaaatcggtagggataccgtgttaaacatataaaaatctttttttttatttcaatcaaacattctagatctctctctctctctct

SEQ ID NO: 235197 - DNA, 659 bp, Cannabis indica
tattagggatttttttaagaatatactaaattaagtaactttttacaaaaatgacgtttttttttaaaatgaaaacaaaatgacgtgacacgtacaaagagtgtgtgttttaaaaaattgggccgaaaaaaccgggattacaagcccaatatacaaatcgttaaaaatagaaaattaccataaaaacgtcaactacatatacggaaacttaacataacaaaaataacgtcatttttgaaaataattgccaaaataaggtggcccatgaaaattttccaaaaaattttgggcccttatgttagaaaaaatgtggtatttttcaaaattggtaaaaaaaaatgtataattttaaaagagaaaaaaaaatttagggccctgggctgagtgggccctaggcacaggcctaggccgcctatgcccagggccgggcctgcttaaaggtctgggttcgaacccatcacctctccctttttcccattcctccctcaccactaagcttgcttgttttctaaacaagtttactttttaaaataattatattggtttatttttagggaattaccttatatattattttgttttaattttttttaaggttacggtttgagtttttaaagtcatttctttagtaatttttatgtgggttgctatacgatttt

SEQ ID NO: 235198 - DNA, 1294 bp, Cannabis indica
gagatggaagacttggatcccataattcaagatgaacaatcaattcaagccaattgaagagttggaagaagtgaatttagacccaaacgacctaaccatgtatgtcaacattggaaaagatttagggaaagaactaaaataacaattaatcacatttctgaaggaaacccatgaccaatttgcttggagccattcagatatgattaggatcgatccaaatgtgatttttcaccatctcaaaatagatctttcttacccatcaaagcgccaaaaaagacgtcatttagatcttgaacgacaaaatgctttaaagagagaggttgacaagttgttaaccaataacttcattagagaagcattttatcccatgtggatctcaaatcctgttcttgttccaaaaacaaacaagacatggaaaaactacatagacttatccgacttgaataaagcatgtctaaaagattgctttccgttaccaaggattgatcaattagtcgacgcgatagtaaaacatgagctgatgacctttatggatgcatattatggatacattcagataaaaatgcatgttccaaatcaagaacacacaagcttcattacaaatatggggttatgttgttacaagatcatgtcgttcaaactcaaaaatgttagagcaacataccagcgcctcatgaatggtatgttaaaaaataagataggtcagaacatggaagtatatatggatgatatgttagaaaaattaatcaagagcgaggatcatgcagaagacctcgtggaatgcttcttaatattgaaaaaattcaatatgaagctaaaccccaagaagtgttcattcggggcttccttaggaaaattcctttgttttatagttaacgcaagaggaattaaacctaacctaagaagataaaggctttgctcgatatgccttccctgagaaaaccaaaggaagttcagtcgctaacaggaagaaatgcagccttaagcaggttcatctaaatcaactgataaatgtcttctattctttaatgttttgtgaggcaataagaaatttgaatagactgaggaatgcgagaaggaattctaagaaatcaagaaatacctatatacaccaccattattggcaaaaccagtaactggagaggtgttatatgtctattttgccatcttagaaaatgccataagtgcagctgtaaagcccgcttagttaatttggaaattagcagctgtttatgtttaattatgaaattatttatagccatttaaataatttattactgttatttacggaatt

SEQ ID NO: 235199 - DNA, 2405 bp, Cannabis indica
gtatacttcaaataattgtttcttagccaatttatagtttgttgtagagttttcatcactccccaacttccacttccgaatttcatctttacaaatagcaatacgctttttaaaatctccagtatattctctgccccataagaacaattgttgtccacaaaagctaattttcgattggatatcttcctcactccttagctactaactgtcttttacaacttgcatacataacagttcccgcaaccaagcattctcaaagcggaaacgtcgaactcttggctccacaaaagatgaggtaagctccataaggattggagaatgatcagaggtagaagcctccaaattataaagcttagccgtattaaacatagtaagccaaccttgattaacaagacttctatccagccgaacctctgtccagtttggagttccccgacccctttcccaagtgtatggatagccacacaactccatatcttgtaacccaatctcattcaaggcttgttgaaatccttgaattaaaaaatcaggataacgacgacccctttttttatcatcatgagacaacacattattcaaatctcccataacacatcatggaaggtttgaactgactgccaaagtgcgtaaaagatcccacatagtccttctgcaagctctatttggctccccataaacaccagtaaacctccactccacctcaccctcaacagtgactttgacatcaatgtaagagttagaaaaatccagtaaagaaacctcatcctcattcctccacaaaagtgccaaaccaccacttctaccttgtacatcaaccactagcaaactttcgaaaccagagcatttcgaactctctccatctgcactcggttacaaagagtttcacaaaggaaaactatattgggctttttttggattaccacatcctttaagaattgtaaagcccataggttcccaagcccatggcaattctaagataaaagagtcataatgaacggtgggcctcgagaccagcacccaccatattggagttttttggattattgatcgattgggctgaacaggagtcatcattttgttcaacaataccatcagtaaggcccatttcaatccttctcctttttgaatctaatactaagagacaattttcatcaattaagtcatcaacagacatttccttatttggaatggtcaacttctcatcacccttcaatcttggaacatcattactcccattagaagctgttatcttcccagattgttgacccacgaaagtctccaccatcataggagaattaacatctctagctgggattgtccctcgctccccagaagcatctaatcggaatctgctagtcatgacagaagccggttgagcactagcagcttggtgttcctccaaaggggccatgaattgtttcaaccatttagttccaatcaattgatttctatgttggggttcaactctcaaccattccccatatggctttaaaagctttccatctcgaacctcaaacctctttggacaaaacctttctgaatgtcccacaatgccacaaacgaaacagattgtggggatgtgttcatatttgaaattactccaaaattcaaccccatccgtattacgtaacttcatccggcgtttaagcggctttgtgatatctatcgagacccaaactcgaaggtaatccctccataaccccaaaaaattcttctcatccgaagccacaaactttccaatgtaattagctaagtccccagctactgtatcagttttaaaccctgcacgaggatcatgcaattgaacccaaaactcaacctctttagttgaacttctttcggatcctcacccctctgcagtcttttaaatactaataacgacttgttgaatgtccatggacttcgatcaatcatactctgtatatccaactcatagtagaactggaataaatatcgattcgtatccaattatttaacgaacattcctttccctggttgccaaagtgatgccatcaaatgctgcatagcatcaaaatcaacagctctatcagttaaaaacctgcctacaatacaccatcgatcatcataatcctccccactcgtttcagtcgcatcatatgacaaaataatctcttcctctccctcaataaaaacattcccccctcatcctccccttcttgtattcgactactggaggccatcaaaaccagaaaacaacaaaaagagataaaaaaaaatcagaaaaaattgaatcaggaaccaaaccaaaagacgtcaaaatcaaattactatgaacccaaaataaccacaaaggctacagagaacatgtcataaagacaagactaataattaataatagtgctacattaatcaacatttttcttttaatttcaaggtaaatgtaa

SEQ ID NO: 235200 - DNA, 1016 bp, Cannabis indica
aattatagaaggatcaattccgatcatatcctcatgcgacaaggaaaaaatttctaggttcgctctcaaaaattttatcaatgttgattttacttccagcaacaaaccttttccaatcttaagctttctgggtagaatatttgggtcgattcaatcttttctagttcttccactggcccaacattgttgtttgggtccccaagtcgaggatcaatatcttcatccccgcctttggcggttccctatttggcaatattttttcccttgtccaaactctggctagaggatacttcctttttagtcttggttagggcaaggttgtaacattcccgagcaacttgctaattttctctcaggcaccccaccccattctttgttgggaaattaaatcatgaatggaatatcgacataacagccttcaagtcatatagggcttggcagcctaacatgacatttaatgctgatgggtaggcgaatttgccctagtggtgcaacactctggctggagaaaccgtacacgggctagagacagggagttaagtctttgagttggagccccatcttttcatatggtgtcttgaataagatgttcacagaggctccattatctatcatggttcgggccaccatcttgtcggctatctagacttctacgaccaacgggtcattgtgcgggaaactaatcttgacagcatcttcatcactaaatgttatgattggctcccatgcccgtggtatttttagtttcctttctttgacggccagaactacttcttcttgctcatgttgtactgttcgggcatacctttcccgggcttagcctgaatctctagctatgtgcggacctccaataatgagttgcagatgtccatccactggtggtggtcgtaaatcttggtttttatcgcccctttgattttgattgaccttgacaaatttttgcacatgcggattatttttttttttagaaaattcaatttcccgcttcaatttgttgcattcattggtgtcatggc

SEQ ID NO: 235201 - DNA, 1665 bp, Cannabis indica
tattttaaaaaatacaggatttgaattgtcatttaacaaaatagaaagtccagtcattatcttttataaaacacaacgtccaaaattgtatttacctcttagtccattgtccttttttcaattagaactatacaaatacaatattttatatctacttatgggaatgacaaaatcacaacaaagattatgaagaagagtactacgagacaaatcctaaagtagtacaactccagcaggaaatggaagacacccagaggagcttagctgaagaagaggaggtctgacgtcaaatgtaggaggctcttgcatgcttgtaagctcacactaatctccccgatgaaaatccctcagctgagaagatcaacaaccctgcagctggaccgtctattctagtgaacgataaaggaaaaggtgtcatgggtgatcactaggggtgttcgcggtgcgggtggtgcagtttttgaccatttttttcaaaccaatccgcacatgcggtttttccaatttctcaaaccgcacccacaccgcgaaactaaaaaaccgcaaaaactccatcgtaaaaaatggtgcggtgcggtgcgattttgcagtttttgcggtttagactatcaccaacaattaaactatcacaaatacaactaaacttgagcaacacatgtaaaaaaaaccataagacttaacttaaatatatatataaaaaattaagtttcaataatataataattagtataatttgggttgaacattcacatattggacctaaataaatataaaaatttgtatttttataatgtgcggtgcggtgcggtttgaaccgcatataaacaattcaaaaccgcaaaccacaccacaccgcacggtttaggaaaaattcaaaccgcgacctcaccgcaaagaatttcaaaccgcatttttttgtggtgcggcgtggtgcgagcggtttgatgaacacccctagtgatcaccaacaaaaacccacgaacaatgttccacaaaacatgcgaaccacaattgaccaacccatgcagaaagacagggacgctcatgtcccaaggctgggtcaaccgatcaattcgtggagcagagtcgtgcaggataatggtctaggcactcaggtgcacggtcccaatgttcggggatcgaaaaaccaccccggtgattctattaaccaacatgttcaggtagaggacctagaccttgaagataacatgtctacagtggaactcaaggcccacttaaatgtgaaaagagcaagggcgaagggtgaaaaagccatacctcgcagatacgatatgtgaaatagcattaatgatagaatccgaggacatgaacatttgaacgatcatacaagatggctggaagattagatagcttggactggaagaaaagtggatccgcgtctgattcaaaagatgaagatctgaaaccatatgtgaagggaattatcgaggtgcaactaccaaaaaacttccagatgtcacaaatagaattgtctgaaggtaagaagggcacagagaccatctattaaaatacaatagactgatgtaagtggcgcaggtcggtaaagatacaaagtttctatgcttctctttgacattatccaagtctatcgaggattggtagaaatgattaccattaaattccatctagagcttaaatgaccta

SEQ ID NO: 235202 - DNA, 1129 bp, Cannabis indica
tttggcctataaaagccacccttttcacctcatttggttacttttagcctttcaccaaattttctcaacttttcagagagaaacaaaaacctttaaccaccatagatttcttacttcttttccttcgtcgctgccaatcaactctttaccgtcgatcaacaccaacgcccagttctcaagctttatgtaagttcttcgcatcttgtactttagttcattgtttgtgtacatcgcatgctttactgttcatctgctttttctgggtttgatgttgagtttctgggaatttctgttttgagtttctgtgtaacgcgttagattcctcctttgtggtgtttgagttacttcttttcatcgtattttttgtcgaggacccatctttttctcacgtaatgacattcaagggtttagagtagacttcgtcttctcgatttttatccctttttttcctttttcctttgcttgttcgtaatgtcaccatctgtgggattcttgcacccgactcttgtcaaggaaaacattctgaggattactttttgacaagtgtccggagggggcctctttccagcggttaggggacccccattcccttttttgaattagggtttggttcggggcctgactgctggattttttcaatctttttcagaaccaaaatgtctgcatccggttccaaatcttcaaagaaaggggagaagcgcctggccaccctagaggaagttatgaagggtccggtggcccaagaagggcacaagtcccatgccaacgagtgggaagcggctgagcttcactctaccgtgacttgccctcaccagctggaacatatcgtggtggtggcaagtatcaagcctgcaacctccgagacctaccaccggccgccccgggatgcggagaagcccaaccataactatgggggcttcggagcctggagccagacgcacttgatggtcggggccatgcctccccttcaagattactttattaattttcttgtatttgtcggccttgcgccataccaactcattcctcaagcttaccgcttgctttcaggcttatttattttttactctgcccggagctggggctctcccagtccggcagagattttatatttttacgaactcgtttc

SEQ ID NO: 235203 - DNA, 505 bp, Cannabis indica
cagccatgtgatgatggtaatagcctactcctcttttggttgtattgacatatgagacaaaaaaaaaagtattctctctaaagctcttacaatggatctcacaataattctctcttagattgttatttctctcttgagtgttctttgtgaatccatttcgtgtctctcaatagtgagaataaaccactatttataggggctcattacatgaagaatgatttcctttaatctataacaaataaaataagaaactagtttatttccataattataatacagagattgggaaatctaggcttattgcctttattctttgcatttatctcccaaatataggaattatcttcgtgacatgcaaacttagaaataacgatatccacctctgaaattgccaataactcacatttcctagcaggcgtatgtgagttgatcacatgattgagcttggtcggatgtcccttaatgactctgccccgacattttgctatgtatggataatatggac

SEQ ID NO: 235204 - DNA, 1138 bp, Cannabis indica
ttaatttaatatgagtggtgctaggtgcatgctttattatataaatttaaaatgaagaaatataataataataatatatatataggtactcattacatgtgccttcacgtctttgattattatataaatagaatagatcagactttgaaatctgatgatcatcttaattattacataaataaatttgagttataaatttgttggttaaatggaatacatacagctcaatataattggaatacagatcatgtaatcaattaagcaacattttctataaatattgtatcttttaattgaataatcaaaccccacagctcacaacactctaattatcgctttggtattattcacaaacaaatattgatgagaaacagaaattttctaggaaagaaagaaaattagctgagataagattatgaaatcatatgatgaaacataaaaacataaatctgacagcaacaaagctttaatcataaaatggcatgtacaaatgcagtacgtaatgtattgtaccgttaacattaataagatttatataataattttctacaaggcaataagatttatagacaaaatcttgaaaagaagtaagaataagagaaaatggagagcaatggttgtttgttctctccactaatcactcactctatggctatattattattcacaaacacacaccacactcaaactttgttggtcttgattacattacaatgttaatgagaatttgcaaagaagaagaccttttgtagctttgtccccggactggtgtgtttgctgcaaagccagcaatgaaaacgctgaacatttatttttagaatgcccttttgttacaaaaatatggtcccagctatataatgagtttcgggtctcttgggtgctgccccggaatatagatcaagtcttaacacacaagctgattgggggcaagagaagagttattctttggaggacatccatcttggcattgttatggccagtatggctggaaagaaatagtagaatattcgaggataagataagctcagctgagatactttgggaaaaaattaaattgtggacagcaacttgggtctatagaactaaacattttgaggatctctctttcctagatctgtgtcgagagtggaatacactg

SEQ ID NO: 235205 - DNA, 2043 bp, Cannabis indica
ctcagatgtactttggaggggttggagaagaggctaagcaggctataaagagagaattaaatctgtctgagggtacttttccactaaagtacctagaagttcctttgaggccgactaaatggatagctgaagattgtagtgtgataatcaagaagatcaaacaaagacttctttgttgggcaactagatacctttctttagcaggaagagtgcaactaattcattcagttcttcttgggcttcagaattactggatgagtatttttatcctgcctcaaagcatcaccaaagagatagaaaagctatgtagagggttcctttggggttcgaatgggaatagaagtaaactccatgtggtaagttgggagtaagttttcctgcctaaacattatggaggtttgggattcaaagaagggactaaatggaatgaagctatcattgctaaatggatcaagagtgacatgctatgggtgaaatggatcaataatatttatctcaaaaataattctatttggtcctatgatctcaagactgatacgagttgctactggaagaaaatttgtcatgttcgggataaattttctagatctgatattgttcatgcaagtgctaatgggaagttcagaacaaatctgctttataatagcaaattgtcgcacgtagtttgggattatagcaggagtgtttggggctctttcatcatgccaaaccacagatttattctatggaaagctttaaatactcagcttctcaatcgagacaagttccaacagtttcacattaagttggaaaatattgattgtccggtttgtggatatacaatcgagacaaaccaacattttttttcgagtgcagctactctcaaatggtgctagagtagatcgggggctggctgggaaaaaagaattggtcggttgagtatcatggctggaaaaatttgttgattcttgacagaaggaacaagctgcacaggatccatatggtaatcttagctgctgtgatttaaaatgtgtggattaacaggaacaattgtatttttagaggctattcttggctggcggctaagatagtgcagattaaaaaagcttctttgtatagattgaatatagacaaaaaagaagaaaataaatagacttgagagaatgtacatagagcaattatgttgtaaataaggttttctataggtctaagcttgtttttgatgcttagatttggttgtaattgcttgtgattaatgaaattttttccttcttgatcaaaaaaaaaattagattaagttgaaaattaattttaaataattttagatcaacattaaatcaagtaattttcattaatgatttaattaaaataaatagactaaaatatattattatagttagaaaattagtgattagtttattatctagatagatattttataggtagacttttggtatttttctagatatatttaattaaattagagaattaatatttaatttgatttgttctagacacttaaatattttatagttttcttaagagatttaattaaataggaaaattatatttatgttaaatattaatttaattaattttagaccaacataaattagaataatttttccagttttattttattttaattttgatgaatttcaaaaatatattttaatacattggattttgaattctgtcatatatatatttatataaaaaaaattaaattccaattgaaaattaattatttaattattctttgaccaacttaaattaagtaattttcataatatttattggaaaattaatagtaaggatggaaaatattttttcagatcttcctttggtataattttataaataataattaaattttatattgagagtcatctaaattagtaattttaattaaataaatatatattaaaataaatagattcaaattagtatcaaatgaaattacagctcttttcgatctccattgttggttctacacagttcttgttttagtgagattcatccccaatagatggacgttcactagcaatttaatgtcgtagaatc

SEQ ID NO: 235206 - DNA, 3033 bp, Cannabis indica
caaggataaaatctgccaaggcttgccccttgatcgcagttcttagtttatacttgatgtcgaattggcttaactccattgcccatttcaataacctctctaacgcttctggttttgctaagacttgtcttaaagggtagtttgtcaatacttcgacactatgagcctggaaataaggtcgcaattttcttgatgatattaccaaggcgaacgctaacttttccatttggggatatcgtgtctcggcatccaataatcgtttactgacataatacaccaggtattgtcgcccttgatctgcgcgtattagtaccgaactaatcgcatattctgatactgctaagtagatggacaggacttcgccggtcatgggctttgataagatcggaggttgccctaaatgcgtttttaaggattgaaaagactcctcgcattttttggtccactggaactttttattgccttttagaatctgaaaaaactctttgcacttatcagaagaccgcgatataaagcgatttaaggcagcgactttacctgtgaggctttggacctcttttggcttggttggtgatggcatttccaccaatgccctgatcttcgcgggattggcttctattcctcgctggttaaccatgaacccaaggaatttcccggagccaactccaaagacgcatttcagagggtttagccgcatcttatatcgacgcaatatatcgaacatggcctgtaaatgggcaatatgatccttcgcatgttgagattttacgagcatatcgtcaacatatacttccatggtgtttccaatgagatctgcgaacatcatgtttacaagtctctgataagtcgcacctgcgtttatcaaaccaaaaggcattactttgtaacagtataatcctcgatcagtaatgaacgaggtatgctcctggtcgggctcatacatcgggatttgattatatcccgagtatgcgtccataaagctcagaagttcatgacctgcagtggcatcaacaagttggtcaatgctaggaaggggaaagctgtctttgggacaggctttatttaaatctgtaaagtcaacgcatgtgcgccatgagccgttaggcttgggcacgagtacgggattcgctaaccagttggggtaaaacgactcccgtataaagccgcaggctaggaggcggtcgacttcttcttttagcgcttggtacctcgcggggtccattttgcggcgcttttgtcggacacctcgcacctcggggtcaatgttcaagcgatgacacatgacctgcggagatattccgaccatatctgaatgtttccaagcaaaaacatcaagattttgtttcaaaaaggtcgttagttgttctcgctgctgaaaattcaacttagaaccaatttttaaaactttgctattatctacaggatcataggtacctcaatggtgtcttccgcggcttgggctgcggcggtatgatcgaggattcttggatccaaatctggttcgtccacgtgtggtacctcctcgattctgaggacctcctggcgagggggtggtgcctccaataggtagataacatttactgaccttttctccgcgagcttgactgctgtgttgtagcattctcgcgaatctgcctggactcctcgcacagaacctactccagcgggagtagggaacttcattgtgagatgatagatcgaggttatgatcttcatctccttcaagattggtcgaccaatcacggcattatatgctgaatactggtcgattactgcgaagtcagccattgatttggctgttactggggcggttcccaaggtgattgggagtttgatcattccttttaatgcgatgacgtcgccagtaaaaccgtatatgctcgacgtcacaggtcgcaggtccttctcctgcaatcccatttgtttgaaggcttggaagttcaacagattcactgaacttccattgtccacgagtatgcggtggacattatctccgccaatattggcgatgataactagtgcatcggaatgtgggtgatggacccatctcgcatcactctccataaaggtgatgtcgtcgcattccttcttaaacagtttctctggccgctcactaagattgttcacattggtgagcggcttctccttggcttctctggcatatcgctcttgcgacttgcgggagtctcctgcgatatggggtcctccaatgatagttaaaatattgcgaggcgttctcgaaccactcgcattttggttttcttccttgtcatccgctcggggatgactttccttgcccttcttatacttatcgaattttcctctccgaatcagctccttgatttcgtcctgcaggacccaacattctaaggtggtatgactaatatctttgtggtacttagagaattttttggggtctcttctgtcgcgatttcctctaatggggggcggcttcttgaagactccatttctctcttcgattgcatagatatggtctcggggcactgcgagttcggtgtagttaacaaaacgctgtccacccttcctcttcggcgaggactccttcttgggaggagacttggccaactttggacttcgctgtcttcgtgggctgcgtcttcttgggcttcggcccctggaattcttccttcggggactgcgagatcttgatcgcggtattggtgattttcccttatccttgcccttctccagctctgccagagaattctcgattctcttgtggggttcggccatggcgaagaattcgactaacaattccggtcttcgagcttgtaactccttccagaaatcggtccttggcaaaatacctattatcaacatacaaacaagcgaagactcgggagccttctcgacttttgttacttctgcattaaaccgtttaaaatagtcttgtagagactcaccgggttcttgtttgatgttgtataaggtggcctataggtcatcgtggcctggaagtgtgtgaggaataagtcgacaaaggtttccgatgtcgatatcgaagcctcaggc

SEQ ID NO: 235207 - DNA, 2404 bp, Cannabis indica
taatttatttcggccagtaagctgttgtggacctcctcaaatgccggtttctgcactcataagagacaatcgagaatggaattttgaactgttaaatgaattttttcaaccaatagatgtggaaaattttttgaccattcctttaagtttctttgcctatcaagataggttaatatggcaccattctacatctgtttcttacaatgtaaaatcaggatttcatttggccacacagttggaagatcagctgcaatcttcttcttcagatgcaaaccgagactggtggaagttcttctggaatttatctttgccaccataaaatttggatctttgcttggaaagttatccaacatattcttcctgtagctgctgctctttttaagcggaaaatcattgattcatctacttgttctctttgcacatcaagttgggtcaataggacatgccctttttggtggtcaacatgccaagaatatttggaaggagtcaaaattcacaatagatttccataaagcacagtccatgtttaatggagactacctgcaccatctttcggcagtttatagtcaagaagacttcgagcttttcatatgtttgatgtggggtatttggactgacagaaacagagtttttcatggtggacaagcacgtaagagtttttccataattgcctataccacagggtttcaccgtgacttcagccgggccaagaaattcaccataccagctgctgctgctgcaacagagcagtcactcccacaccagacttccaagcaatcggccttccagcagcaaattccatggtctccacccaacaccaatggcttgaagttaaatgtagatgcagcctccaatcatgaacaaaaaaaattaggtattggtgctattattcgaaaccatgatggaatggttgtggttgcattttcaaaagtggttcaaggtagttttcgatcagatgaaatggaagccaaagcgctcttccatgctctcaattgggtatcgcaatcacaactatcaataacgcatattgaaacggatgcttgagagtctctactgcattaaattccactatgagtgatctatcatatttttctgatctcatatttgatatacgttgtctattatcctttttccctagtgttttagtttcccatgttaaacgatcagctaaccaagctgctcatgagttagctaaatttgctttagggttggatgaagacatttgttgggtaggagagattccctatcctattttctctgttgttgtaaatgacctcaatttataatagcagtgattttctctctctcaaaaaaaaatatattttttgtatacatgatttattttctcttatacacatgataaataattgtttgaattttatttttgatattataaattatttaaaattttataaaaatttacaagtagttctaaataattacgacgtatacaattataaaaaaaataatttttttaaatattgaaacaaatagaagatttaccaaaatatcctttagtggagtgtactatatatttttccattaatttttcttatataactgccaaaagaaaatatttgtacacaccatatatggtaaactttcatttttttttcctttaaaaaagttgttcatattctatataaattaatagaaataatattttgtgtattttggtgggaaggaggaagggagggaaacatattactttttcaaacatgaatttaaagtaaaaaagttatattgtttttctcgtccatggtaaagtcaaaattatggtcagaacagagaaagaaagtgtcacgtgggtgattttaattggtgtatcaattatgagtcacattaagacgtagtcagcgaatcgtaactctgtcaaacacgacaaccggagagcgacattgagattgagagagaccatccaccgtacctatttgtctttgctgttttttttgtgcgtaggagagccgcaatcagctgctctcacttccacgctaatctcatcctctatacgtccaatcaaacttcgacagctgtattctcatttttggaactgaccgctttgactatttgactcccaccatactggctgcttttagaaccacccaagcttatttaaactgtctttatgcaaatatcttaattgcccctttactttatctttattatagagttaaaaaaatgaaaagaaataaaaaaaaagaaagaaaagaaatacacgaaagtttgcctctctcactattatattttaatttttctcaacattttctcagcaattacatatatatatattgttccagtgatagtattttcacattttattttaaaaataacatttatatatgttaaaagtgaaaacaatttttcttttctaaaagaaaaagaaaagtaattcaaacttaacatt

SEQ ID NO: 235208 - DNA, 690 bp, Cannabis indica
ggcggttttttttttcgtcgggttttcggtttttttttggtcggttttttcggtttggtttagttgggttattcgatttaggcggtttacgaaaatatatgtacaaccctacttagaggaatgctttgacatcctaagggaatatcgaatgaagcttaaccctctaaaatgtgccttcagtgtccaatcaggaaagtttcttagattcattatcaactcaagaaggactgaagcgaatctaaaaaagatcaaggccttgcaagacataaagtcactatcacgaatcaaagacgtgcaaagcttaactggatgaattgctgcatagagaaaatttgtctccaagtgcattaacaagtgtgttcccttctttaatttgctaaaaggaagcaacaagaagttttaatggactgatgaatacaagcaagccttccaagctctcaaatatcacctagataggcctcccatcttatcgaaactaatagatggtaaagaattgttcgtttatttggctatcaccgagcatgcaaccaatgctgctctggtgcatgaggaagaaggggatacaacacctgggtatactacatcagcaagtgcctcattagagatgagtctagggtatctctccattgagaagtttagcttactacatggtcttagctcaagaaaactaaggccatatttccaagctca

SEQ ID NO: 235209 - DNA, 899 bp, Cannabis indica
aatcacgtaatacgcctatgctagttagggtgttacaatatagaatgtccgaaacggacacccaagtaaaaagttacgataaaaatacaatttctgatctcttaggagttttcaaaaacaacagaacacgaaaatcctaattttctcactcaccgtaatactactgaaacttatccaaatcactccaaacatgacatggcacatatataccataaatattaccatctttacgtaacataaattaaaatcgagcccataaatgaatcacatcattaatgttcagactaagctttaaaaattttcaaacttaatttctaacttaaaataacctcaaattcaacaagtaaacatcgaaactagtctcatagctaccaaagaacaattctataaagtcagaatctccataactattctaattcatgaaacccttatataaaaccaaacgttctaagcttaaaacaaaattaaaccataccttaggctttccttctctaaggatttgctatcatgctactaccagagcttagatcgctaggttttaggttgaaaatcaaagaaaatggatagaaaggggtaagggttttgttgaattgagagaggagggtttcgttacataagttttagtttataaacttaaaacatatctataaacagataagaatcatttatatataataatataatataatattatttaatattattaaaaactttattattaatagttatcttattatttcttaaccacttaataatctttatttctagagtatttggtcaactccgagtacccaaaaatacctcgatatttctgaaataaacttctctcaataatcccatcaatattttctaactaaaactgttgtgacatttttagtctccaatcgggtctccaaggc

SEQ ID NO: 235210 - DNA, 894 bp, Cannabis indica
tgcatcattaggtgaagttccttaatttgtagggccagatcatgagaagtggcactgctttctggttcctaaaaagtgtgatctccaactctctcaaccatattgttattagttgaaacaagtatagttgagtgaggagggaacacattgttatcattagtaggaaataagcatgcaacagtataatggacaatgtatggtaggtattttatttgttatgctagactcagtttgtgtggatgggaatgatgtaggattttgctgctgatattaaggaaaagtgaattcatcaaatataacatctcgagagatgtataacctgccagattaatcaaggcaagttatcgcctatgaatgtgcatggagatgatctaaactctagcttgtgcttgttatatggtcaaatatttggaaaacaagtacaacctaacactttgagagtagaataacctggtgtgatattgaacatcccttcaataggggattttagagagagaacaagtataggaagcctactatgttgagtaggagtatgtgaaattttttaaggggaagcaacctttgctttctttttaggaggagcacgatcacgtttgacagctgagagcaaaattctcgtcatcgtcattaacaacaggacgtttctccttattcctattagctatagattttaaacttatttttgaatttttctttggcacaggggaacgggtggatgaagaacgagtaataactatatttatatatagattaagagcaataaaaagagagaaaaaatagatatgtaaatcggttaatgtgagttaaaaaaaatggaagaaagaaagaaaatgaaaaacggttgaattaatgaacaatctaatatctgaacgggttggattatacatataagca

SEQ ID NO: 235211 - DNA, 1942 bp, Cannabis indica
gaagccctcaacttttgttacttagtggaattggtccaaaatcatacctctcatcacaacatattcccatagtcctatcccaacccaatgttggaaaattcatggctgataatcctcgtaacaatcttaatctcataatcccattcccattggaagcatcaacaggacaagttgtaggaattaccaaagattattacatagagaccaactcatatagcttgccattttcaccaacaaaattaccttttggcttttaccccaccccattattaccaccacaattaaccctaacagtattcgtagaaaaaattgttgggcctttgtccacgggtgctcttacgttggcttctgccactgatgtcaaagtcacaccacatgttcggttcaactacttctctaatccaattgacctagcgcgttgcgttagcgcaatgaagaaatttggcgagttgttgaagactaagtctatggatcgatttaagtacaaggatatgaatggtgttagggatttcatgtttctagggcaacttttgccgacaaatcaatcagatgattcgttaatggaagactattgtcgaagttcagttacaaccttttggcattatcatggcggatgtcttgtgggaaagttgttgatggtgaatttagggttattggagctaattcacttcgagttgttgatggttcaacttttactgtatctccagggaccaaccctcaagccactctaatgatgattggtcggtaagtcgatatatatatttatatatttttttttcttctataacattttataaaatttctattatatatatgtgattagaaatgacaccccttcgtaccacaataatttcttttttatgtgattaatacatgcagttatcttggattgaagatggtaagagaaagaggagagtgacaatattacaaatataaaatgaagatatatattatcttttatatttctttattatatatgtgtatacgtttatgaataatattatagaatggattatgatcagaagttggactcgtttgtcctatttcctttatctttttctttacttgtacagactataaatgaattaatcatgatgtaatcgaaataaatataaattaactaattaattattggacagccaaaatagtaataatatgccacaatattatatatctatgcacgtacaagaaagtagaggttaatttttgccacaccaacatatcatcattcattaattataacatctacgaaagtcatctttaatttattggcctactaagacacatatcaaataaaagtgtatacaataacccttaaatatttcacaacctcagcattaataaaaccaagctcaaaaaaatttattattaggccattattttttctctcatatatagcatttgcaaggctcaaaatgtggctctttggaagaacaaagttttgactattatgtatatatagtaaaaagaatataatttgatgtttacaatagaattaattgtataggcttacaaaaaattaatcaagatgatttgatttagtttcattgtttgaggatgaaaaatagtaaggagtaagcttgaggtatatctcagatttgttttctttgagttaagcaatacaatggacttatttaaccaaaaaaaaaaagaaaaaaaaaaaacaaaaacccattaaccttgagtttattgatgaaggtaggtgtaaagacttggttgaccaagtcaaaaagagaataatatatataataaatatataaatatatatatatatatggacacgattttgttcagttaatgtatttaggagtacatattctgtggtgaactctgaccgttaaatgaataagttttgttgatctaaaagctgaggttaatataaaggcatttagggaaaaaaaaataggataaccggttcactttgtaataaaaaattaattaa

SEQ ID NO: 235212 - DNA, 2918 bp, Cannabis indica
tgatggaaaatatctactttttaggggcaatatagtcttttgtatttaatcaatttaatatgtaaatatctaaggtttcaattgtaaattagggtttaggcttttttatataaatgtcctaactctaatctagaaaacctaagtctgattctagcctccaaatcactctaagtctaaaaccgtagcctctctttctctctctctccctgctacatgtctaaagggattctctcttcctctctcgcacaactctaaggctataccattctgtcattagagatttgcctacttcatccatgctttgtaaccttacagagagctatattagatcccacctatagtgatctaaatagtattatctctaggtatcaatacaaccaaaaggggagtaggtcattacccgctaagtaagagggtggaacctctaaaaaaatccttatcttatttaatttattgtttttgctgtgtaacacgtggcaaacatcagatatacgacttcgttgtcagttgatcactttttgaggtcaacacccaccatgtcttcatgtgaccatgcaaagaggtcaaggttttcccttagaaatcttatcaaggctaattttatttctggcgctaaacctttcccagtcttcaatttcttggttggaagagtgggatcaatctccacttctcccagttcttccaaagctccaaagctatctataggatccccaaagtgaggacctatgtctgtttccccacttttggctggacttcattacactttgctagagtcttggtcagagctcttggtgggcatcttctctttcttggttatagatgaaactaggttgtaacagtgttaggaaaactattggtctccccttaagcatcctgccccatgccttgttgggaactttgggcataggtgatagatcgatgttaccgccttcaggtcgtatagggatggtcatcctatcatcgaattgaaggctaatgacatgtcaattaatacgcattgttccattaatgttcatgttgtgggattctctgtagcggtcaagggaagtcggatgtatcctattagtgtaatgccttggccaaaaaagacatacattacatgcgtgcaaggtactaggtctgtcagttggagcccctcttttcaagttaatttgaaaaggatgttggaggagactccattatccatcatgcacctagcaactgtcatgttcctgatctgtgctataatgactagagggtcattatgtgggaagctgacctgggcagcatgtccctctgtaaaagagatggcatgctctctaagcttgagttacttggaacctctttcttcaatagaggatgttgcttttaggctcgtgatgaagagtccgagcatagcgttctctagccttacttgtttcgcttgcaatatgtggttcaccaattatgacccccaagtgacccgccactagtggtggcatagggtctttattctgggtatcttgtgcctgagcttggttaatttgcacataatgacgtaagtggggaatatttttccttgtgaggaatttaatctccctcttagagttttgacactcgttggtttcatggccaaaattattgtgaaatcggtagaactttgacatgtccctcttattcatctcctttttgatagaatgaggcttcttgtatgggacattagcctgagtggccatgtaaatggtctaaggtttttcagttgggagggtgaagcatgtgtacttctcctctttttcctttcagtttcatggcgtaggggaagtgctgtacttccctttttgcaactgctctgcccaaatcttttgttgttgcacttgcctacaatattcttactgttggagggctggctggcactaattgtactagcctgcatgtttggcatgtcttgggacttcatagcactctgagactgcctattgctgacttgccctcctgtatgggcttgtttgatagcttcctctaattttatgaagttgtttgctcattcgaggaactccttcatattgttggttgagatcctttggatatctttctaaaagtcactcaacggaaggatgcctctcagtatggccgtataacggccttcctcagttaggcatttgaccttaatggccttggccatgaacctttgaatgtaatccttcaaacgttcaacctggccttgtttaacctcgacaaggtcttccaactgtgatggtacctgccttaaaggacaagaattgtgtgtagcatttctcaggaaaactcattctaagatttgaatcttcctggagccaacttgaagtaccattgctgggccatttctgacagagtagctggaaagattcggcatcgcacatcacatgtgacgtttttggagatctgtttgtatcttgaagtacttgatgtgtgcatgaggatcttctctcccaatatacatattccatactggcatcttgaacttaagtaagggcaaggcataaatgtatgccgagaatggagacccccttgacttatctagtttaaggtctgatggttttgggttggctaggccctttatcaaatctcttatttgatccaagtgtgcttgcacaaaagtatctaatgttgtaggaacctagttgagtggcccttcttggttcagctgtaaccctgggttggctagaccctggctggccacacttgggagagggtatgcccatggccgtccaactctagggttggcatctggctttggtcggctagccctaggttaggaaactagccatggttggccagccctcatttaggcagttgtccatggccgacaagctctatgctgggtagtgtctggcgactcgttctcccctgattggccggtgtggcctgtgtgttgacacaggtttgatcacactgattgttcaagtttgttaggtccaact

SEQ ID NO: 235213 - DNA, 1098 bp, Cannabis indica
cagattactcaatctaaagtaatctcactcaaggacaaaagcatatgaggcaaaatgaccattttacccctcccacactgaaagggtttaaaagacactaaagggtattttgggaaattctaaattctaactattctcgacattttcaatgtctaattaaactgccccgctatacttaaaatactaggatgtgattctaatagccaaacaccgcgttccaatgttgccgggcactgaacatgcaaaattatgaaatttctacatatgacatataaaatgcatttggaattcaaatgaatcactgtaaattaataatttagaattaataaataattttcataattaaaccctaattatctgctaatttccacattaaagctaagcagcctttacagttttaggattcatggatatcctcctggacacgaattgcatgacaaatttcctaaaagaattgcaatcgaaacaccactaactcaggaaaggcttctgctgccaacttcaccaccaactctgaaggtagtgaagggaatcatggagacaatacaacatatgatcaagacttggttgcttgcttgactaatgtgcaatgtcaaagattgatggcattgttatcttagacaaatcatgaaccaacaactagtgcacctgctgaacctcctatggtgtctcacttttctggtaagaattctctcacacctcactctaaatggatcattgacacaggtgttactcaccatgtgtgcaatgatatttcattgcacaaaattacatagtgtgatcgagctatacctgctattaaactgcctaatggaaattttgctaaggttatttgtattggtactgtcaacatttatccaactctttcactctctaatgttctttatataccaaaattccattacaatttactttctgtaactgctttgactaaccttggaaattattcttttcattttcatcctaaccattgtgaaatgcaggacaatttgaagaaacaaatgattgggatgggtgaaagaataggcacattgtattacttggtttctggtgtaaaaagtgatattccttttgtctttttttgttgtttcagattcg

SEQ ID NO: 235214 - DNA, 864 bp, Cannabis indica
atatacaaagttgcaacgaagcttttgtgctctagaattcggcttgttcttcctagtttgatttctcaaaaaccaaggagggttcattcaagggcgattcatcggccacaacataatgagtttttcaggatttggtgaagcactatgggaggaaaacctaaaaaggctaattgtttgatcaagctggacctacaaaaggcttatgatactatagaatgggacattgtggaagaaatgttgagggcacttaactttccactatccttcactcagttgattatgaactgtgtgagaactccaagattctctataatgttcaatggctaagagggggctgaggcaaggggatccaatgtctcctctcctttttgtaattggtatggagtacctttctagaattctgaaagtgattggcaaaaaagaggattttcagtttcatgagagatgctcggagcttaaaatgaatcatctagcatttgcagacgatgttcttctcttcagtaatggggatttcaagagtgtgtactaccttctgcaaggcttaaagctttttagccaatcttcgggtctgcaacctaatcctcaaaaatcagctatatattgtagtaacatggcaagcactgaagtcactaggattctggatgcctccggattcattcaaaaacagatgccttttcattatttgggagtgcctatttgtgctaaaaagatatctaagaatgaatgttctgctcttgtggagaaaatgacagcaagaatccgaacttggagatcgaggaacttgtcgtttgcagcccgagttgtcttgattaactcagtcctattatccattcatgcctactggtctcaggtaatgatattgcc

SEQ ID NO: 235215 - DNA, 1891 bp, Cannabis indica
agcttatactgggaactcggacccaagcaatcacctgtcacggttcaaccgagtcatgacagtcctgagagtcagcaatgacgtcaagtgtttgtgcttctcacttactttgagcgggtcctcggaggaatggttcaagaaactagagccaagatccatggattgatggaataagctgcaaaccagtttttggagacagtttgtcgccgcgagaaaagttaatctggaggtcagcgccttgactaacatcaaatagctgcctacggaaacattgaagaatttcataaacaggttcaaggaagaagcctctaagaccaagaaagtcgatgacggacagcagcttgctcttcttcaagcaggcatccgtacagggtctccgttttggaatgagttagaacaagaaggagcctccaaccttcaagatttccagaagagagtccaaaaatacatcaacctagaagaagcccaaatagttgcctatgggggatactaccctactgggatagcgaggtatgtacccggagctcagctcccaggaaccttaccaacagtcgctccaccgatgagcggcatacaattttccaatactcccggatatagtgagggccaggccttcgcccctgcatcttcccactttggaaatcccccagggatgagtgggcaagccccgtcgcactccgctccggccgcgagcttagcaggtccctctcaaggctctcggagcaagaggtcctcaaaaggcatcaaccggacggaggataagcggcagaaaaggggctacactccccagtatacccagtacacggagctaacggactcccaagagcgtgtgtattttgctaccaggaaaaatacgcactaccggagaccgccccctctgtataaggatagctcccgtagggatcccaataaaagatgcaagtagcacaacgacattgggcacatcaccaatgaatgtaaaaacctcaaggacgagatcgaaaacttgatctgattgggacatatctacgaatggatcaagaaccggttgcctcacctcaatccggttcaggcagcaggagctttgcctcaagggtccccagggggtgtagccggagcattggccccagttgctctcccaagagatgcccagaaaattcctggcttgctgccaagacccaacgagagagtagccatgatcttaggaggacctcacatcgggggaactacccggaaggagccgaaacgttacgcaggggccgtgaagcacagtgaggtttgggaggttactcaactcctagctcaaagaccccggctaatggatcaacccattacattcacagaggaagacgctaagacagtgcgcttcccccatcatgaccccatggtcatagagactcccatcgccaataagattgtggcaagaatcctaattgacaacgggggttctgtgaatttattgttcaaagaatccttcacagtaataggccagacggaccgagatctctcaccaagcggttcccagctcacagggtttaatggaacgacacttatcccaatgggaaaagttaggctcctagtcaccctgtgcccagacacaccccaaagcactttcaagtactgcacgtttgtggtggtggactgccaacagcttacaacgcaatcctcagccgaccaacgctggtggattttggcgcagtcacgtcaattaggcacttgtgcctgaaattccatacttaggaggctgggataggaaccgtaagagggaaccagggagaggccagacagtgttacaacgttgctgcccacctacccgtcctaatggtccgcaaaactactgagccagaaatggcggaagaagatgagttggatcccgtgcgggatccaaaaaaattgtagaacccatggagga

SEQ ID NO: 235216 - DNA, 1427 bp, Cannabis indica
ttgacgagaggaggttggaattgatgattttgatgtagcatacacaatgggaggatcattgtccaataataatagcaataaaatgcgaatgggaagaagggaactcaagggctttaacttgacaggcaagaagagtgaaatatggaatggccgctaaacgtatttatgggatgcctggaaggggcacatttcataagaagccgacgcttcaatttgccttaggaggcgtctgatgattggatgtgagaagctaaaagggtacctcacccccaaatggatggctccagtcattggatgcatcgcaaagaacacccaacaaataagaagactgcctaagtccaatcactgccgtttggagcttcccagagacacgcgccgagcacgcgcgcgaaaatccaaaagttaccatttaacactctaacaagaaaacgggagaaatcatgcctcccacacaatgacactttggtttgacggctgatgatgaaatgtattaaaggactcatcataaatgccacgtgtgcgaaaaatctctaaagagaagatgttgcaagctcccgggccatggtatcccagaagcttgggggtaaatgttatctgcatttttgccaagacgacatgtggatactaattacagaaagttgaggagtcattaagccacctaagtgcgtcaaaaagatagcgacatgaacctcacagaataggtcctcgtgagagatgtcttcctaggaacagtccacgaaagagatgttggtaacttagcgactctctccattatagatgttgggaccctttgctcctgcaaagggtatgagccttccaccatggtgcatcagttcgggatacgcttttcacccgcaaaagttcagcgtgcacatgccaggctacgggtccactgaccacgcctttttcccttgtacaatgtcatagtttgtctcccccgccacactaccatgcagagcatgcatgtccttgcgtactgtgctaaataatccaacaactagggaagagggagattcaaaggagagtggccctaagacaacacacctccaaagccccgccggtgtagctagtgcaatttgacatcagtaaagaccacatggaatatatgccacctaccaatctgttaatgcaaattttcgtgaaccaaaattaaatagcctcttagtaataaatgttctgcagaaaataataagtaataaaagatataataactctagatatttttatgtagttttgtagttaaaatctacatactccacgagtccttcttattagggatactttcagaatacaatatacaatatctgatttttaataatgacgattctctatcaaatttgccgtcccttttcccatggaatctacccctatttataggagtataggttggatgttatttttttggggatagatttatatataaatgc

SEQ ID NO: 235217 - DNA, 1122 bp, Cannabis indica
tgacttgcattttaacaaacctatgttcctaatcatggggagcctacgatgggttaacattacctagatcgcgtgccctacctctttggcctctacctcaacctcgaacattagggggaaattaaactccctatttgccactggatctgactaaattaccctggcttctcgtgtttcgtttggcgtctattagactagcatgtgaaaccatgagctaggctggtcagatcgcgatcaagattaaattataattaccacttacttgagaaaatgaaacatgcgcctattcagctatcaggctactaacatgcttcacatcaggctttttttgtcacatactaataaagtaaagtactaaagcataaaaggctttttttgtatatattgtgacaatcttcggaagataacctgacagctctaataccaaattgtaacatcctactagattatgcacgttatcataatttttatttactgtgcactacattgctaaccaacacgtttattaaaaaatatgaacaattaaaatgttcataattaaactttaaacttgaatatataaataatttacataatttaggatctcgtttttttttttttaaaaaaaaattacatctattttacaaaatacttagttacaaaagttattgcctagtgactatcaaaagaaaatctgttgtcccgaagatcgaacactccaagtctaatagccctgatatatacatcttcattagctcgtactgattgttgttcagccttcactttatctttacctacacatataaacaatatatgtgagtcgatagactcagtaagaaaagcataatcataacataacatataccagatcataactagttgcccatacaaccaattacaatcctatctcgcatctcacgagtactaagtctggaatgttcgcacgacagtataattgaccataatatcaacctatactcgatactctaatcacaccaatgtgatagtgtcaatttgtacttttccaaatatatattcgttggtattcatggcaactctatgtacgctaataccacctttactgatatgttatctattaggcgttcataaacatgtaagtgttgggaatattttaccaagatc

SEQ ID NO: 235218 - DNA, 1113 bp, Cannabis indica
cccagggggatgacattcgggggttgtcgcccgacagattgataggctcttcatatcagcacaatggcttaccgactacaattgtcaatctccacatgatgagcccttaacgattccatctctgtgtccctccattcggcaaacatgtgcctctgctcttcgaacgcgagatttactgcagcgcggagttccttctgatcatgatgtaggctgttactacgaccctgcatgagtccaagagcagcacggtggttttggatctcagtgttatctccaatggttgtttgaacattggtagcgggcagagcggttgtgttatgaatgccatggttggctcctaatctggtattcccagtctcttgcacgccaggcgcgatttcatccacaggagtcgtcacaccgtgacctgcgtttgatggttgtctgggattaacagttggcggaacccttgtatttcctgagttctgcaatgcaagatccaccgcttgtggattttccagatcaactacgcccctacgagtctgtaccaccatcgtacttgtgattaaatttagaatgaagagcgattcttgatcctgctctcaatgaaagcaccaaaatgttgaccttgcttttagccaacgacaatgagtctaatttagtaagcgacaagtagtttacaacaattgaaatatagtaaagcaatataaagacacaggaattttatagaggttcagctccgagcagttcggtaatagcctaatcctcgttatttgcattaactcaagaacaaggaaaaatgttccttttcttatagctcttatatcagtatctctgaatatcaattctaagacaatatctctcaactaaaatgtttgtgaccctctgcctagtgaatatgtatcactatttatagggctatgagcttggagaggaagtatttctcttctcgttacaattgatataagcaaaaagattgcataataaatacagaatacactgatcgtgggatttggccatcttgccatatctctgtaatctgatccccaatttatagggatttccttgatgactcatgatgcgaaagctggatttgctaagtgcttgtcgttctgtgcgggttactgactgctt

SEQ ID NO: 235219 - DNA, 2480 bp, Cannabis indica
ctagctagtggtctagtgaggggagtctagtgtgagatacccactagagatcagagagcacaccggttggctatcaattggatggcatggtcggagcatcatatatagcaaggggcagtgttgccgctacacccatacttttgaggcattactgcttactttggggtgtgtccaacacaaatcacctcataaagtatgaaatatctctcaacgatgtttgttttgtatgcagagctaggctggcattataatggtgaagatactcatccaatagttgcacaacccaaacaatacagagtgaatcaactgaatcctcctcgcataagacaaatccatgcttgtccaggaatggagacactgctgaatttttttaataatgatgccacaatcttgaactttccactttgttggtctaagcggaactcctaagaaacgaagtggatatgatccctccattaatttcaaatctctaaggattgctactttttcaaaatcttggactcccccaaaataaatttaggatttcccttcgctgatatgcaaccttgaggtattgccaaactcatccaatatatctttaagaataagcattgagctccttgtttctttgctaaacaagattagatcatctacaaagtaaaggctaataagacacaagtatttgcatagaggatggtatctataatttgtactcgaggcagtcatttggagtcttcttgtgaggtattccatttaagacaatgaggagaggcgatagtggtcaccttgcctcaagcctttttttaccttcaaaggacccttgtacccttccattcatacatatgaaatagttagtaaatctaacacattccataatcctatgaataaatctcaaaggcaggttgtaagcacataataaatcctcaaggaagtcccaacttatagtatcataagctttgcttatgtctattttgatagcacaccttgaggcgactaattcctcttgtaattcttcaaaagatcttgtaagatcatcacattatgggctattaatctacctttgacaaaggctccttagttttggcgaaccaaagaggggaggacaattcaaagtcttagacacatgagcttggatatacacttgtacactgtggtgcaacaggaaattggcatgtagtcctcaactctagaagggttgtcatccgtaggaattacggtgatcatggtggcacagaaatcccttggcattgtacctgcagaaaagaaatcagggacaacttcacatatatcatcacctatatctttccccattaccttgaatctaaacatgaatgctgaaaaaagctttcttgattcttttctagtgaaaggctttagcatctctagctgctgctccagatctaggcgcttacctctttctatacaatacttattaaaattcaaactagctttgctcttactgcccatgtagccatgaaaatgttccatgaaatgatcaataacctaggggaagttatttatcacaacaccatttgcagagacaaaagtatttatacggttttcaacctttcctttttccatgctagcatgaaagaacgaggtattctcatcacctttttgaagccaatctatttcactacgctgctttaggaagctaaggtacattttttcctggatacaaaatgcttcagtagccgatttctctttggcttgaatctcaagattccttaggctttcttgggcttggattttggcattcaaaaggtaattcttagcctcccaataaaatctttccacatctcttatggactctctgttgaatgtcttaagcttatgttttagacacataagcttaaggtaaatcccctttaaacttgaagcttgtaatggctgattccaactcgttctaactatgtttttgaactcatcatattgagtccaaaaattgtggaaacgaaatggtttaagcctgatttgctccgtaattgtcatagtaaccacacaagaatagtggttcgagatggtttcccagttgagtcgagccatggtattcaggaacaaataattctaatctttgttagccagagcatgatcaattcttgaataattctaagaagaccatcttggttgtttgttcaagtgtagttcgagccatttctcttgtgggcctccactagagcttgaacttgccaagttgaagaatcgacaatgtcaatcaagctaatttggttaccccgcattcaatcatcaaggtaaaaccctgcattgaaatctcataatatgagccacaacttaacaggaaatctaagttttaggagatctgtccacaaatctttcctctcctctatggtgttaaaaccataaatgaaagtgacacaaaaagcttccttttggttagataacttcacatggcaatgaacaaattgaggtccttcaactatcacaattactctagcgaaattcttcctctaaagaacaagcagtctaccctcaatattact

SEQ ID NO: 235220 - DNA, 969 bp, Cannabis indica
gaatctggcagccatggatcagagaggatttttgttgataatccattccctatatgaataacagaaccagctgcaataagttgcttggtgtcgaaaaggcttctccagataaaacttggattatttccaagtgatgcagagaggaaagagtcatgagggtaatatcttgctttatagactcttgagacaatagaatcagcattagataccaatctccaagcttgtttgccgagcattgctaggttgtaatctcttaaatccttaaagcccaaacctccttcattcttgtgcttactaagcttagcccagctagcccaacttactccctgattctgttttgaagacttccaccagaatttgctcataatactttccattgatttgcaagtctcaacaggaagtaagaacacagacatggcataacttgggagggcttgtgcaactgtttttagaagtatttctttgccagctttagacagaaaacgaccttcccattgctgtactcgcttctgcatcttgtccttcaagaaacccaaaatggcatttttatttcgaccaaccaaacatggcagtcctaaataaaagctgctggcatcggcttcattgatgttgagctgttgacaaattctgtctcttatagttctagtcgtatttgaactaaaaaagacggaagatttgttaaagttcaccacttgtcccgaagctagttgaaaaatatgaagcatgttgagaacattagagacttctctgtcattggctctacaataaacatagctatcatcagcaaagagcatgtgggaaatagtaggagctccgtttgccacacgacagcctttcaaaagattggaagtttcgaatcttgtaataattgatgagaatccctcagcacatataaaaaataagtatgaggacaaaagatcaccttgacggatacctctatggggaatgatagtaccaacttctctacca

SEQ ID NO: 235221 - DNA, 1001 bp, Cannabis indica
tagattctttaatgaatctttgattatacaggattgagtttgaatctctaatcttcgtatattttgaatagtatagttttagatttattttacttttttattttcatttaattaaattagtttcttttattttaagtaaataaatatagtttttaattgtttcttatattttaaatatattttaccattttgaattttttattacatatgatttcaaaaatggcaagtctacctcaaaaaatcaaaattttcgtgtggcgagtcctccatgatgctctttcagttgctacatctttggtctgaaggaaaattatcacagactccactagctcgatttgtcataaagcttgggaattaataggacatgtactttttggttataaatatgctcaggctgggtggcgctcatctcatgtaacatcaccacttcaaacctctattgagccttcccccacagttttatggctcttatacacgagtcaagcacacttaactattaagttctttcgtgatggactaccagaaaataagatgcaccttattgatatagatagtactaatcaatccatttaagccatcttcaactgtgtagtcccatacttacatagtctcagaatcatcacacttaaccttctccaagcgatgtgggattgcacaacttccagtctttacccttacggatcacgggactgattgccacaatcacccccccttggggttccgacgtcctcgtcgaccacaattttggctgggtcaaggctctagtaacattttgtaacatccccgcttcaagcatccattggaccttccatagatttatggctcttatacatgagtatgtcactctggctacaatctggactgacgattggccctacaaaccaacacgagtgtttccaacgtgctttgtccccaacacgagtgtttctagcatgctttgtcctcactcacacaattcctaggaaaactttgttgggttttgtgtcctaaataaaacccat

SEQ ID NO: 235222 - DNA, 1224 bp, Cannabis indica
aaaaacgtgaaaaaaaaagttttttttaggcctggagcccagtggtcgcgacctgagggttcctgggtcgcgacctattttcaagtcgcgaccctggtcccgacctggacttttacaaaaactcacgaaatttttttggttccagtggtcgcgactagcctttagccaagtcgcgacctattttccaagtcgcgaccccagtcgcgacttccttatttttcagagaaggcttaaattcgatcgtaagctagtcgcgactagccctaggccaagtcgcgactggctcacgaaattttctataaaatccaattttccccctcattcaaccctacatcaaaaattcaaaattcaaaaaccctctcagccgactctaccccttttcctctcaaaaattcaaaacttcttcaccaaacttcaaattctttcatctccaatccaatttcctaatcccaatccatcctaaaacctaatttctttcatcaatctacactttccatcaaaaaacaacccaaatactcatcaatttcaacccaaatccgaaaatatattggttcttcatcttcaacctcaaacattcaaagataatcaacaatggaggtggagtaatacgtcttcgggtttgtaagtattcttttctattgaatttgaaaagttgcatgaaaatattgagcattgtttgtgattttggttcgaattagtgattgatataagaattgttaggtttatagtgtgatttgggattgtgaatgtaattgtgtgaattaattggtgagttttcaatttttggggatatagaaaattaaggggaggtgctgcccaattttttttttagaaaaaaaaagaaaaaaaaaatttacgaaaaaaaaaatggcacccaaaaggactaggaatgtggaggagggttcgtcttcaaacccaccaccaacgggttttgataggacccgctttggcaatattgaggcccaaaatcgcttcatgagacttaagaatagggcttatattgatgatcggggtattgaattccctgagaatcctttgaggcgtcaacctcaatttgaaacaattcgggctcaaatagaaagaatgaagtggggaagttttgtggatggctcggggtcgggctaatgttactatggcttgtgaatttcttgcgaattggcccgatcgccggaatggggaagtaaaggtgcggggaaagaaagttcccgctactgctgatgcatt

SEQ ID NO: 235223 - DNA, 831 bp, Cannabis indica
gtattttctttttacgttttttttttttttgtaaaaatttcttcaatttctaatattttctctattataacgtttgtattaaagtgaatattttaataattatttgattgatttattttatgtatagcaaatttattgagaatgatagtggctactacatggaaatacaatgatgacattgattttgaatatagtgatgactagaggtaaaatgcggtaatgacaacgattttaaaatcataaaaaaaaatttgtagagatttatcaattattttttattttttagatatttatttttttgtaagaatttttcaatttctattattaaaaaatattacattttaaacaaaattcaatcgcacataaaatgcagtttgtttcttaactattagttaattataaacataaaaaagaagtagagttggtcttatgcaatgcataacctagtgattccacacttctcaaagaagagatagcaagttggaatacccctcccccaatataaaaagatggagtaaggattgatttacaagacaataaaacataggatctaatatgccaagaaattaaaagaatggggactatgggaacttgagaattacatctcgctagtctcctgatgaccttgacctacgtaaattaggactttacataagtttttgttaattgcccaaactgaataatctgcccaaactaagctgacataacttgacgaataatgcaaaccgaataatccgacgaaaatataaacccgcccaatctttttattaggagagtcgaaaataatatcaacccgtccaatcaacccgaactaacccaatcaacccgatt

SEQ ID NO: 235224 - DNA, 2576 bp, Cannabis indica
gtgtaaaaataaaaaagccccaaattaaaattatatattaatttatttatagtgtgatataaaaattgattatttataaggaaatatttatattctaataatgttaatagtttttttatatgattatctataaaatattgttcaaaagttatataaatataattaaaactttgaaatatacatataatttagtaattgttaaaaatatataaaaaaataaagcacaaatttaagccaagatatgaaaatgaactgtcctgtttaagaaataggggccagcacgagtgaagcacgacatgaaaatattaggcttatgagccgcgccaggcttaccctttaaaaatgttagtacgacacgacaagactcatacttttctgtggcacaactcatttttcaaaaaacaagaataaatacgggtctggccaatacattatgcacgaacttacactaaaactaatgtatgagctacattatctacattccaagataagtgttgttctaggtgaacatttaataataggaacagaataatacaaaatataggagcttaatccacataaatttaaatttataatatgtacaaagaaaaaatacacaaatttaagtagcaataagttgaataagttgatcaagattaaataatacccctcttgtgtaaaaaatgtaaaaaataaataaccttgggcttatatgatggcctcgattaaattagtgtgtaagtgtgtatttgattttgatgaacaaaacctggtatattatgtggtgtcactatatagggttagacaaattgaagaacagtaagtaggatgcatctgtagaagaccaataagtaagatgaatctgtagaactgttaaaaaaaaatgaatatggagaagatcaataactagaaggcataactttgatgactttgctgggacgagagcttccatctccattttcatcaacaatgagaagcaaagatcaacatgactcgtagtactttacatctcgaaagaaaccatttgtttcaaccaacttcatttatcctactactttattattgagacaaaagtttattattagtttttatattattataattaccaaaattccttttcaattgaggattccagcaaaggaaaaaaaaaatcaattgaggaaaatttaataaaatgaaaagttgtgtgaaagaaaaaagaatggggtgagagaggctcgaactctcgacctcaggatcactcagtagctatgagacctacgcgctagccaactgcgccacctcatctatataaaaactactagaggatataatcgatcataataagtttgaagtctttatatgtttttggcatagtcattagtcaattttaagggaggaggtgtaaacttccatagccaatttgatttgaaattattatgtaaaaatgcaattatggatagggtaaagaactatattgcatctcttcttttatagatgtaagatcttgcaagatgcaagtaagcagcaaatccaaacgcactgagaatagagagcagccaataaaagtaatcgagatgagcgcggtttaggttattagaaaaccagctatctcggccatctccaccagttgaattctcaatgatagagacaagaaagctgcttaagaaactaccaacaccaactacactaaggtacagagcaagccctatgcttcttagctctgttgggacttgatcgtagaagaactcttgcataccgatcaaagcaaaacaatcggctattccagacaagaggtactgaggaaccaaccaccaaacactcattggaatcgtcacatttggcttgtcaagtagatcatatttgagagcaatgttgagtctttgaatctccacaagagctgcaactaccatggaggtagcagaaaagaaaattccagtgcctattctttgtaggactgtgatgcctgctggttttcttgtgaaagctcttgcaattggaacaaaagtggtatcgtaaatgggaatgatgattactgtggtaaggcttatcaagcattggagtgaagcagctggtatcttgaagcccgagacaactgttctatccatggtggccccttgtttggtaaagaaagttggagactgagcaagtacaataccatataccaagcatggcacccatattggaaagagagcaagtacggccttggcttcttcaacctcatttaagctacagacactatcattgttcttcaaatgttttggcgcaaacaaagctttgttgagaaatctgcaatattacaggttacaaaaaaatagaagttagaagagaaaaggctcattggacatgcagtactcaaccataaataacaattaacaatgattttactaaatttcaggtaagagttactggtgtgagattctttagtaactagacattacaagatacaatagcatctactatagagttttattatacgtggaagtgaatataaacatggcgaccaacataacattctgccggcccagagatttttgagctttaggggaaaagttaatgtgaaaattatatgaaatatgacattttgtaaaaaagttacaaaaatatagcatttatag

SEQ ID NO: 235225 - DNA, 1101 bp, Cannabis indica
catatgatagctattgatgaactcgaaagtgggagaggagcaaatcaaattcgtacaatcaaacgagctagtgatactcgttggggatctcatttttcttctatttgtagtctgcaaaatatgtttggagccacttgctcggtgcttgaaaacctaattaaggaaggatctaattaccatcaacgcggagatgcaaatgctgcttataaaatgattacatcattatatttatattgcacttaatgaaggaaatcatgggtattactgatattctttgtcaagttttgcagcagaaatctcaagacatattgaatgccatgaatatggtatctactacaaaaaaccttatccaaaaactaagaaataaaggttggaaaaatttgcttgaaaatgttgtctctttctccaagaaatttgacattgacattctaaattttggctctcgttatgtccaaggacgtggtcgccatcaacgtgatcacattacaatagagcatcatgatcattttgatatatttaatgctaccattgacttttagatacaagagcttgatagcaggtttggtgaaggagcaacaaagcttttaactcttacctcagctttggatccaaaggatgcttttaaatcttgcaatattgatgatatatgttgtcttgcagaagagtattatcctcttgatttttctgagaatgagagaattaatttaaggtttcaattgaagcattttgaacttgatctgcttactaattcaaagttccaaaatttgtcatccatcgcagaattatgtcgaagattaacagagacagagaaatcaaagatatgctatcttattgatagactaattcgccttgttttaactcttccagtatctacagcgaccagtgaacgagcattttcagctatgaagattattaaaacaaggcttcggaataaaatggaagatgattttccagcaaacaatttagttgtttatattgaaagagagatagttgagacttttgatttagattcaatacttgatgattttgtttctttaaaagaacgtaggttgcagttttagacaatgtattactttgcatgatatatatttatatgtgtct

SEQ ID NO: 235226 - DNA, 1884 bp, Cannabis indica
ctctctgtgatcaacttggcccttctctgcagtgtgcagtcgtgaccaagtccccaacattcaacccatccctgtcttacgtggaaaagaccttggcgcgttgaaggaaaagttatgtgggggcagtgcggtgcatcggcgttaccctgacccacttagttagcagctctgggcgcttaatggcttggaagccagacgagaagaaaaaccggtgacgatattccttaatatttttctggaagttaaaaggaatcggaccctcattagcaggatggacccggagtgtgaaaaaactgtctttaagtttgtctcccttcttcgggacagatacaagttcataaaaatacaaaatttcagtcgggctaggcgaagcctagccttcggcaacataaaaaataaataagcctaaaagcatgcgatatgcttgggggataagttggtaaggcacaaggccaacgaaaactaagaaattgatgaagtaatcctgaagtggcagcattgccccagacatgagatgaatctggctccaagctctcaagccaccatagttacggttaggcgtctcctcgtctctgggaagacggtgaaagactccggaagcagaaggcttgatcccggccacagtgacgatcttctccagttggtgggcacaagtttgagttgaatgcaactcatcagcctccgagccggtagatcggcaagtgtatttctcctcgaccacaggtcccttcatcacctcgtccagggtggccagggtgttagatcctttgctcgaggattttgctccgctattggggacagaaatgtcttgagattagtaagattctaaaaaagagaaatccagcagttagcccccaaaccaaaccctagcataaaaagagggaatgggggtcccttaaccactggaaagaggccccctccggatgtttgccagaaatgagaaatccaaagattctcctaggaaaacatcgagtgcaaataccccaaaggcagcgacagcaggagaaaaagaaaaggaaaaaagagagaaggacttgagtatgaaaaccgtttcatactcctaacaatctcaaagaaaaaaaggttgtttggccaaatgaaaaagtagagcacagatgaatagatacgtagtacgacggtcttcaccaaaatcatctcaccgtagaaatcaaatgcaactagaaactttaccaaagactctgccctaacatgcaagtgaacagtaaaagtaaaatgtacccaagaaaacttacataaaagtcaagaactgggaagtgataatgatcgatggtagagtgcagactagcagcgacgaagaaacagcaacaagaaatctatggtttctgaaattttctcagagtttcttgggtcaaaatggcgagatagctaaagtaacccaatgtcaaaaaaatgttggcttttataaaccagaaggggtgcaaggcagctgtgatcaggcaccatcgtacggtgggaatcgtaatcgattcgcattctacgaatccaacgggtgagattaatgggtgccagggcggttgaaaatgtttgagtaccttttctgacactcggattaaatgcgtcggtttttcaatagacgggaagggaatcgttgcctacaaaaggaaataaatattaatgatgaccatcataaatgcaacccacgcgcctaaggcccgtgccgttatatcaacaagctaaccggaggcatcaagcaagcctcacttacccttcactaaatgaggcttggggggtaaatgttgcctttgattttttccaaaatatgtgaacgcggataaaggtgacatgtggatctggaagaaccatcactcataaaaatcaactaagtcttagacaaaaaaggaacatttcagggaaggtgcctcc

SEQ ID NO: 235227 - DNA, 923 bp, Cannabis indica
cgaggagaaacaacttggagacaacaacgtgaggaattggcttgatgagcttaaacaagtattgtacgaagcagatcacgtgatggacaagatcggtactgaagctcttcgactcaagatagagaaagatgaactcgaaagcattgcaagtaagtccttaaacattctcaaaaagttttataatccgtttgaaaaggctgtgaaatctgaaatagagaggatctttcatagattgaaagatcttttagctcaaacaaaacaccttggtttaaaaaaagttgatcagaaaacaacaatagatagaccacatgcccctttgttagatgattcacaagtttatggaagagaggatgataaagaggctattcttaagttattgttttgtgatgatgaagatgttgaccataggatctcagttattcccatagttgggataggtggaattggcaaaactactcttgctcagaacgtatattacgataacactgtccaagaacacttttctttgaaagtatgggtgactgtatcggatgactttgatgttcttaaaatagccaaacttattttggagaagatcgttggaaaaagatgtgaaacgaacgagctacatcaaattcagaaagacttgaaggatgctttggctgggaagaaatttctttttgttcatgatgatgtatggaatgagaattacgagttgtgggatcttttgaaaagctcttttcaatctggtgcacgaggaagcaagattattgtcaccacacgtaatgaaaatgtcgcaatgaaaatgaagacaagagatgttcaaacttacaagcttaaaatcatgactgatggtgaatgttggaagttgtttgcagagcatgcctttgatcatgtagacactaatgaggtggtattgtatgagttgcaagaaattggaagac

SEQ ID NO: 235228 - DNA, 1537 bp, Cannabis indica
cagtgtaaattcggtgcacagattaatcacatgactaatatggtttatatcatatagtcataattatttttcactatgtagacaatactataattatgaataataatatgataaggatttaataaaatttatagatatatatatatcaaacatatgatcatgaaagtaacatgtaaactaagtaatatacgaaacagtagtaaaataatttaatttcttttattgataaatgaaattaaaattgtattaaaattaggttttatttaaggcataaaaatacaacaagaacttcgtcattaatttagatccccactccaaaaccttggttcgtaggaggaacttcaggattgaggcttttcattgctgcttagctttgtagctgtaggagagtctcttgtatttggtgtgtaacgttcttccaactttacttggttgtacgccaacttcacttccttatcttggattagtttccttaaccatgtgacttctggatctttgaaagtttcttttgtatagtattcatcctcttccctatcgtaattaccttcttcgttttcataatgtccttctaagttattttctctgacggggttttcatcatgacgttcctccggttggtgaccattttggagaggatcaccagctaccactgatgcttcacctttccccacagtagcctccaaagcgtccaccagaggaggagggttcatatcctctatggtagagtttttggcattgttgtgagtagtttgagtgactagtttttcagtcgtcgttcttgttataaccatttttatagatgacataaatggtaagattttcttcagctcaatgaaagcattaaaatatttactgagattttcataaaccgaattaaaagaagattacgctgaagaaaataagattaggaaataaataagatggggtttttgcgtggttaggaaatttacgagcctgagtccatgagtcaatgttattaagttctttggctacggagtatttactaatttttacatacacaaattttccaacctttttcatgaagagataaagccatattataggtgtttggctagtgaatcgattggaccaagaataatgattccgtttggtgttaaaagtctactgatgaggtaaatacaatataatattcgctgttagactaggtaggtgaggcccagattgtaggtattattcatctgtacacgaacatattattgacaatgataggcgcatgtgtcccattagatttaagaaaaagaatgtcaagaggcgttggtcgaaaaggtgatttcattttttatgtgtgcctttctacagtctaacatatggggacaagccgcttgatttctcgggattttgtcaaaattgtgccgcattggtcggcttccatggccttaagtgttcctggatgttgtttcatattctattctcggtgcctcttgaggagggcatccttctttgatctacacttcttctctcttcgactgtttgttagttgctctgggtttgggctctctagattcatcaatatgag

SEQ ID NO: 235229 - DNA, 662 bp, Cannabis indica
ctttatgtttagatgcatataggttgttcatttaattttttaattaagatgaactaggttgctaaataaaatagggaaatttacaccctttactaactttttcatttttatttcatttatattgtgtcacggtcatattaacgtttatacatactattttttttattaattttggcagtatactgcctttgtttagttttgtatatgttggttttgtggcttacaagtgtcctttcggggttgtgccacgttttttttttaaaaaagtaaatcattttaaaaagttttgatttgacggttttctccccttttggtagcagtttgtacttttccattttttattttttatttatttttttcgaatagaaaaaaggtttaaaatcttttctctatcccactcgccctcatactgttcatcttctccttcttttggtttcttaggccgtttcgagtagtgggtggttatttccatttcaaaaaatttcagttatcatcccactttctcaagcttccctcttatctcccccccccccatttttctggttcttctctataaataccttcatcctacattgtaatggcagttacacggtcatctccgtcttctgctaaagctaaaaaaaactccaaaacaaccccaaaaaacgaaacccaaaccaaaa

SEQ ID NO: 235230 - DNA, 844 bp, Cannabis indica
tgggtaaagccaacttggctaataggtcgaactttgttgtattccgttacttttgttgtacattccgttactaacatactttctccttgaaccaagttagtgaactctttcaacttagcattgcagaccccttcattataatacttggcattgaacagctcccaaaactcttctgaggtctttaaagtgacgtctcgagtgagggataccaactaccaccacacaagtgcatcttcctagaattagaaggtggcacaagtcactcggtcattttcgacgacacccatgaaattcaacattctttctattaaagtaagccactacttggctttcatgacatcgggacctcccagaaaaactagaggtgcatgctttcgaaacctctcatacaaaggctccatacggttgccagtaacgggttgctctactagcaccactagaaccaaagtagctgacacttgttgtggaggcactgcaggagggctctgttgtgtcagcctttaaatatcctcttcttgttgattgattcaggcttgcatttttgcaaaccttgtacccagtcctgagagctggtggtggatttttatgacgacccctttgaaagctcccatggcctttgctggtccacagggattcgaagcctttggcctccccgaccgcctctagtctgaccatattaccttgactcattgtgtttcgcttggcatccgaattatgcgacttagcctgcgaacccataagtcagattggtcagacagtgatcaaatgtagttttaagtaccacacttatggattttaaggtaacgtatttatactccaacatattaggctaattaggattttt

SEQ ID NO: 235231 - DNA, 1003 bp, Cannabis indica
aaactcaagtacacgtgctcgaagcatgtcttcttaaatctgaatggtcctcttggactgtccatccgtttgaggatgaaatgctatgctaaatttcaactgagtacccatggctcgatgtagactcttccagaatctggatgtgaacttcggatccctatcagaaacaatagacttcgggacaccctagagacgaaaaatttctctaacatacaattcagcatactgatcaatggagaaatttgtcagaacaggtaagaagtgcgctgactttgtaaacctgtcaacaataacccacacagagtcgtactgtcttgtggtcttaggcaatccaaccatgaagtccatggcaataccttcccatttgcattccaaaagattcaatggctgcaacaacccaccagactctagtgtttagctttcacttgctaacaagttaaacaccttgcaacatatttagcaatatcattcttcatgcctagccaccaaaacatggccttgagatcttggtacatcttcgttgatcctagatgaactgagtaaggagtcgtatgagtctcatttaagatttctcttttaatgtggtcatccatagacacacaaacacgattcataaattgtagcattcccgtgtcattcactgtaaagtcactagtctttctggctgaaaccctatctcaaaatttcactaaatttggatcttgcaattgtgcttctttaatttgctccaaaagagtagattccagggtaatattagccaatttccccacaatgaactcaattttagctcgggtcatttcatctactaattgttgggagatctacttcactgtatttatctaactctggccttttttactcagggcatcaactacaacgttggccttcctaggatgataaaggatctcacaatcttaattcttcaccaattctagccagcgtctctgtctcatgtttaagtatttctaggtgaagaagtttttcaaactcttatgatcagtgt

SEQ ID NO: 235232 - DNA, 1264 bp, Cannabis indica
ttactcaatgcatggcctctattatactaagcattttcacaaacttcacaaacaatataataatacccagaaaaataaaaaacaagacccaaaaagtgtattgaataaaatcaccaaaactcaataaaaggttggtttctataattggtgaatgaatgaaataacagtattaaccaaaatttataagaaattgaagcaaaaacagattgaaatatgaataattacctccaatatccaaagccaaatgggaactcttggaattttgttggctatggacggttcgtggatccatattcttgaaattcttgaatttctctctctggatcaatctgggtcttcttcaaaccttgacttgggcttgtcttaattaaattacaaaatcaaaatagacagaattggtcacctataagcttctaagtcccaacctccacaccaatgaccaaacccgtcgctgcattacaactatatttatacaacaaatatgaaaccaaatcccaaatcccaaaattaaaaagtataatctataataaattaactaattaaaattcagagctgaacctaggaaaaaagaagaaaaaatatagagagaaatgaatgtgaggattgcgatgctgacgcgcgcgtggtttattaattatgccatcctaatctaatcttttaatttttttttacatgaaaatacttctaaaaacaaatcaaaagtaactctaagggatgaagaaactgaaaattttttgggactttttcatatttacactttaaaatagtttttttttttttacggaattgtacataaaacccttattgcaactagcgctgcagctattttagaaacacaaatcgtaaatttaaaaaaaaaaaaagttaaaaaatataatatatgaggtaattccctaaatttttattaagaaaaaaaattataaaatacattaacataaagaaatttttatttttacaatttaaattttttatttataaaaatataaattttagtaaattatttgatatttctttattgttttataatttatttataattattattattttatagtttatttataattaattataattattatgaaattaatttatcgttatttttagtagagtaatatatttttctaatttaaaattttaaaattatctttttaataaaaaaaaactataaactgtaaaattataaataaaatataaaaaaaaataatttttaaaaaaaaaacccaaaaaattgagataaaaatattaaattaaatgaaaaata

SEQ ID NO: 235233 - DNA, 623 bp, Cannabis indica
gaaggaattctcatgtgaaattcctaacacttgtctaatagcaataccaattttgtagttcaattttaggttttaaatctttcgtagttgattctacgggttcgtttattatctttattgctgtaaagactgagcaaaaggtttgataaagaagcatcattttctcttttttctctcttcttttatcttatgatacaaatagtaataacaaattaattgtagaaaattacactaccattgtatttttgttaaaattggtgaaaagaaatcttggctcactaattaccaatatatatgagattttacattcggaatttatacagaaaccccacaagcgatcccataaaaataacaaaaccattccattcaaaacaaaggctccatccatgtctgaccgctttactccaaccaacttctctgctatcagaaaccttcatcttcaatcaagaatacaacaaatagtcaaaatcacaatctctagtgattgtgcattcgtacccgtggaacattttttttcttcttctcctatgcctccggatctctatctatttacacaacttttgccatgtttactctaaatctccatctattactatcgtttaccaaatttactaaatatttta

SEQ ID NO: 235234 - DNA, 1239 bp, Cannabis indica
gtataggggttgcagaatggtttgacatcttgaagaccaaatctgcttaaaatcttagaaatgtaaccacttttcttcttaactttgtttatttctccaatgctcttgcaggcaatgagcatgtcatcaacatataggagaagataaacaattccttttgtgcttttaacatacacacaactgtcataggcacttctcttaaatcccgttctcaagtaaaaaagtcatcaaacctcttgtaccattgcctcgggctttgttagagaccatatggggatctcttaagcaggaaaacatggtcttcttttcctttgatttcatatcctctaggctgcttcatgagaatctgttcatccaattctccatataagaaggatatttttacatccaactgttccagttcaagatcttcagttgccacaatgctcaaaagcaacctgattgaagtatgtttcacaacaggggagaaaatttcgttgtagtttattccctccctttgtgagaaacctttgacaactagtcttgccttgaaccttgctcgttcaacacctggaatcccctccttatgtttgtaaacccatttgcagcctatgactctttgtccagcaggtcttttaatcacaatccaggttttattcttgctcaaggaatccatttccttgtccatagcattatcccactctttcttatcttcagattgcaaagcttcttcataagaagcaggttcttcaccttcaatgccatctattctgagaacaaaatgcacaacatctgcatagccaaacctttcaggggggttttactgctcttctttttctgtctcttaccaattgataatcaagagtgtcttatccatgatctgaagcctcttccacatcttcttcatggctcgagccttctactacattttcatttctctctgcaacttcttgatctggttccatatccacctcaaactgagatttctcttcattctcctttgctgcaacattcccaacttttgctgcagcatcaccattttgtgaactgatcagatctttttacgtagttttctcatcaaacaccacatctttgctaataaaaattttctgacaattgccatcttcaatgctccaaactttgtaccctttcaccccttctgggtactcaaggaagatgcatttcctagctctgggttcaagtttgccttatttgatgtaagcatatgccaaactgttgggaattattttaccaggatct

SEQ ID NO: 235235 - DNA, 796 bp, Cannabis indica
aaaaatgcagcctatcagcagcgtactcctcgctattttaattctaaggtcaaagagcgaactctgcgagtaggggatttggttttgcgaaaagtcatgccaaactcgaaaaagcccaacgcatggggtttttggtgacaattgggaaggaccataccttatcgctgaaaaaattggccatgcaacttgtcggcttgcaaaactcgatcgtaccgcgatccggagagcttggaatgacgaaagtttgaaattttattatcagtagtactcacaatgtatcaatagtactcgacgtgtatttatacttagtcaattcatttgtataaatgttctaagtatagggggtatatagcctactttgtactattgatttgcctattgtgtactatcgatttcttataataagaattattgatttctcgatgtttcaaaaaacttttgtgccttagcattttctattattacaccaagttgtaattgggaaagctaagattgtcgaatacacgagtatccatgtaccgccaaaagcatacataatagcataaataaatatcctcgaggggatatgtgttgttcgaaatacaaaagaaagtaaagtaaaatttgtccaagtacaaaacgtgagtacctatgtaccgcttaaagagtttgatagttaaagaaatgaaaactaaataagttaagtatttggagccgtgggagcagttggagtagtagacccatctgtgaccttgctagcagcctcatcagcgacctcttcagtattcgcagcctcaacgtcctcaggaaaaagatt

SEQ ID NO: 235236 - DNA, 1935 bp, Cannabis indica
tttggtacgtcgtattgtattatattgtattagtattatttaatacaatactatgtttggtattaacttgtattaatagattgtgtaaagttataatatattttcaatacactcgacagtcgaccccaacaccaactacgagtcgggtccgggtcccgggtccgagatcgagtcccagtcccgattcgagttcaggtcgctagtcttgggttcaggtcgcagacctgggttcgtgtagcgggtcttgggtctcgagtctgggtcgcgggtccgagtctgtatccaagtctgagtctggggtctggggtccgagtctcggttcgggcctgagtccgtgtctgggtctgggtctgagtccaggtccaggtcgagtttgggtttgggttcgagtttgggtccggggtctaggtccaggtctagggtgtgggtttgggttcgggtccgggtcggggtttgggtccaggtcctgggtctgagtccgggttcgagttcgggtcgcgggtctgggtccgagtcagggtcccgggtccgaatctgggtttgggtccgggtccgagtttgggtccgggtcctgggttcgagtcccgagtctaggtccaagtcagagattggtgttgaccccggatcctttgtaaatattatgatacaagctaatagggactatttgttatgtattaaataatacaacatgcattgtattaaaaattttggtcgtaataattaatacaatacattattttatctaaggctgggcggtcggtttgatcaatttttttctatataaaaatccaaaattcggttttcgatttggattggtgcaatccgaaaatcgactgaccaatccagaacctatcttaaaaacgaccgttttgaacctcgatttggtcggtttaaaccacccaaacgaccatttttttttttaaaaaaaaaaaaatccaatttattttataaatatattattctacattttacaactacaaacatacaaactaattgttcaaaaactaattatttgatttttttaactttaatattaaaaaaaaatgatatagtattttttatatattattttttttttgaattaatgagaagattcattaattaaactcattcaaaacaatagaacgcacttcagaggaacaatcctccaactgaaccacacaacctgtagagaaacaagagtctcttgccaagcaaggaaccaacttgtttgcagatcgtttaacaaaacataactcaagaaaagataaattcaaaactaaattcctaacattttgaacaataagaccaaactgtgaggacataaaaactttactttggactgcttgtacacacatcaagctatccgtttctaacactacattgtcccagggatgagtggcaatccaactcaacgcttctttgattcctacgatctcagcaatttcgggttgtacatatttccttttttgaatgcttttaccatggttctatgatgatctcgagttacacagcccattccaaaccggccctcttgttcaaataaagccccatcaacattaccttaatcttgtttaacacaggtgcaatccaacgctcacagtttcgcccccatcattcaaaggagacaacgaaagccccttccttcctttaacaaatttgtattgatcaagcaagattctagctgatgttacaatatttgaagcaagctaactcttcttttgccaaacaatgtcattccgcgcacgccaaatagcccaactcaccatcgatgcttcctccatttcaactttgtgccccctggtgaaattcccaacaccagctgttgacgttgcagccccagccccgacgtccattatgcaccgatgccaagcagcctttgcaaccgagcattccaccaacgcatgttgaatagtttcagtactagagttgcacaaagggcagtcagcattgaca

SEQ ID NO: 235237 - DNA, 1259 bp, Cannabis indica
atatataaaagcccatagagcaacaaaaagacaaaagatgcatactgacaaaatacaagcaaacacaagaaatggacaaaaccagaaaccgctgcttagagtaataataacgacgggcctgaactcgataaaagaaaaaaggctgacaacggcacaccccaaagccctaattttttaagaccaatatgtttagaactttgctagaactcaaaaaatcctgatttagtatacgtgcctcgcacgtaattttcaattagtatatatctattctatataaagtgtgcctatataactgaaattcttggtttatgagaaatttatgggtgacttttaatttttatttaataaaataataaaatattatttatatataataaaataataataaaataaatcctattaatatttgaactgatattaaatattcgagaatcacaacccatttaaaaagaaaacaaccggggattaatctcaaaaatagctcttcccctttcaattgaaacctctttcttctcttcttcaaattcttcaacttaccactctcacgacgtcgtatttaccacctcttcttatttcttttgcaggtaccaattatcgttgtatttattgggtgacttatttttttaaaattttttattcaaaaaaattcttaatttaatattttttttctgttaagttttaattattcaccagatttttttttttcggttaacttttaactattcacgttattaacgttattagatttataaaattatatatcaaaatatattaataaaagctaatcttaaactaaagaatcgcaaacgttatattacctcccatataagtaacaaagatccaatataaatatatatatatatttatatatataaacgttaaacgttatatgcgtctctgttttctatgccgaaagaaatctaatctttgaccccaaaagaaagctcatctcctactcctatattacctcccatggaattcccagtgagacaatatagtcagctttagctataggcttagaattaaggagttccatgcattcctctctcagcctgtatatttgagatatattacttgacaagtttattatattttcccttgactcagcaaggattctactttattggtaaagatttatctcacttttcttaagcaaagatttgaaatacaaggctcgttaacaagtggtggaagtagtaatgggaaggaataagacatttgacaacatataattaattagtcctatttatgataatgtt

SEQ ID NO: 235238 - DNA, 607 bp, Cannabis indica
ggctacgaaagttgcaagattaattgaagtgggaaggttggccgccatactggggtgcatcgaggtactcagagaactgtggaaggacattaaaagatgtggcctcgtaggatctattgcggagtttctagaccgagaagatgggtttatcaagctcaaagaggctattcagcaagtagacatcatagaacctaagcagggccaaccacatgtctcctcagtaggagcacctactcagagcccataataccctagcagctcagctccaagcagaaaaaggtccaataacaatggtaggcaaggcaacgggaaaagaaaaaggaaagttgacaggcagagccaaacacacccctagagaaaatgcctccaagttcactgccttctttgtcctaactgacgacctagagacgatctacgtaacaactcagtctatggtcccggacaaaaaacttgctcccatgaagaaggacgtaagtaaaagagacacgtccaagttctaccattttcatgcagactagggccatgacacgaatgaatgcaacaacctgaagcgggaaattgaattcttaatcagaaagaataatccgcacttgcagaaatatgtcaa

SEQ ID NO: 235239 - DNA, 987 bp, Cannabis indica
ctatccttaaatttaactagggaagtacgctcgacactaagtaccgcgtgagaccatccacatttattacctcggtatgcttcttctttaacgtcttgaggggctattttcctcaagaagtgggtacaaaccacataatccttgtcttctttgtcggtaggaacatgaacttactgccactttgaatattttgggactttgaagtcacaagtggattgttagctgctgaggagattgcagatttttaggttgatctcgttcaataggaaattgactgatctcaatctaaatggaagacctaaaaggatttcgtgtcgtttctccatctcgggagttggaataggcctcttcataaccgaggtcaatacaaataagcagaatagttaagtgcctatagttagtaagttgaaaacgcaaaaccaagttttttgagacaaaggaatacttacgtatgatgcgaaaagcagttgtattgattagagcgaggccgaatgtctagaagaattcatccttgatttcagtcttgttgggtaacctcacgatgatcctttgatcattcgtttgggtcccgaggtaatagaaaccacctgctccttgcttccttgcgggacaggtcttcacagtgtaaaaaatataaaattttaagtgggcttggacactcccgctccaaaatttggtataagacctttaggtaggccaaaattctgtaagaactcggaattaactaaaagggggcaatttcgaggtaattgcaaaactccttgtaatagtctttcaaagggaatattgctccagctctgatgtgcttgaagctccaagcgccaatcccagacgagccactagtgctacaaccctcttctcggattattctttcagggggaaaacagctaaattcccattgagcgacagacctaatacgacatcctttcttgtacttgatgccacaagatcttagtacatcgctaacatatgctcctatggatatct

SEQ ID NO: 235240 - DNA, 605 bp, Cannabis indica
ataatattagtttgggaaatgttaaaagatatcagtgctgcttagtactttttatttagtactctcttacatgttaatatcgctattggtttaattaagtgatcgtgtattatatagtttaatgtaataattttcaagaagtatagctattagctagccaattgtaagacaacatgtctggaaggtactaaacattattgcccaaaatgattttattatgtctatattaaattaaaatatgtgagattttgttgattcctgtttatttattgggattaagcatttaaaatatttatatttaaaataatttttgtctatttttcaatttataatttgagtttatatttcaatagattcaatattaaattgtattaaatataattttgttaactgaaaaatataatatcttaagtaaatgtccttttaacaattttatttgaaaatgactaaggaaggaactagttaattaataaggaaacataagagttataataattgagaaaattttagttcaatattttactttatgattattttaacaataatgtataattatcttagttaaaataaggagtcccttctagacatgttgtcttacaattggc

SEQ ID NO: 235241 - DNA, 1764 bp, Cannabis indica
gggaaagaaattttaatcaaagccgttgtgcaacctattccgagttataccatgagttgcttccgtcttccaaagaagctcataaagaatcttcactccttggctgctaatttctggtggggagatacaaaagaacataagaaactccattggagtacttgggacaagctatgtaaaccaaaggaggagggaggtcttggattctggagcctaactgagttcaaccaagctcttttggctaaacaagggtggaggcttctccataaccctcaatctcttcttagccgggtgttaaagaatagttactatcctactacttcttttatggaggcgggttgtcctaccggggcatcttgtgtttggaaggaatttgttggggtaggaaaattctgaaggaaggggctagatggagggtaggaaaaggtagagagattaaggtgtgggaagataaatggctccctcgaccacatggggctacactttctaaatatcccggacttcaaccccaaaccaagcttcataagtttatcacttgggatgggaattggaacatggcggagatcactaaacactttcataaagacgacatcccttcgatacaaggaatccccatagatttatacatggaagacacactaatttggcctttcaccccaaatggtcaatatattgttaaaagtggttatagggttggtagggagatgaaccttaatcctactagatgctcaaacatggcagacatttagaattggtggaaaatgatgtggagcttacaactacctcctcggatgaagctatttggatggagagtgtgccacaattggctgccaggaaagacgaatttgaagcatagaggtatggatgtcaatacccggtgtgatctgtgtggaaggtttgatgaaactcttacccatgcattatgaagctgtgataaagttaaaaacatttggaaactcctcccttggtacaaacaagtctcaagcctgggagaagggtctatgtttgatatcttgatggctattgagcagaaaattaacaggtatgagtttgaagatactattaaaattctgtgggcaatctgggaaaatcgaaacaggaagtggaatcaactcccaagtatgaacggacagcagctgctgaattggctcttttctgcttatccgaatgcgaccacaattgagcctactgatattcaacatgaagcaggccttctccccaaacagaaacaatggactcccccctgcaagtggctgcatctgtgtaaattgtgatgcagcagtcattgagaatgttgctggtgcggggattggtttcatctagcgaaaggcagatggccaaattctctctgctggtatgagatacatggatagctgttgttcagcaaagacggctgaggcttgggtgctttgggaaactctaaaaaatccgccaactactgagacgaatcagattgaaatccaaacagactgtcgaatgctggtggaagacatcaaaaaccaggatcaaagcttcaatcctgaaagcaccatcattcacaagatcaaaaaagtgctcgaaacttttcatagtgtcaatattattcatgtaaaaagaaccaataatgaatgtgcaaatttgttagctaggaaatgtctagctgacaaaaacacctattttttttacaattcttttccgggttggttagccaatttctgtaaggctgatcatccttttgaggtgtagtctggtttttggttctaataaatttcctttacaaaaaaaaaa

SEQ ID NO: 235242 - DNA, 1507 bp, Cannabis indica
cttttcttgaggattaagcatgcaatttctggttttcggtgttgttagaattaggatttgttatgaggtgtgctttgcagttattttaagttgtgtagtgcttatttgaggttatagtggtggttagttcaattgttgagcaagtttaagttcaagaactcaaacttggctcaataatggtgattttcatttctgtggttgtatgttgctgttattgcttgaattctattatttggtgatattataagtattctagaaagtttggtggagtttggatttgatttgagtatatatgaagtttttggggtttttttgctatgaatcggttaaccagttctgcttgaactgtagaaccggttaaccgtttcacttagtaggaccctaaaaattagttatcgatttggggaatatggtttaccgattttggcagtgtttagggccatagttttaatatttccacaatatttatggtatttccatgctttttatcgatagagaaacttttagttttgattttaggtccccaaaaagagttttagcaagttgtttacccatttacgtgaatgtggcatagggcatccattcagcgcttgatttaccattcaagtcggctgggacacttaaaattgaattgaggtaagactagaatataatatatatatatatttttgaatatgtgtatgtgtaatatatgcatgctaattatgtgattcatatgctaccaacactaatttgctagcggtattgagtgcattggtacaacatatgatgtttaaagggtacaatctagtgttaccaacactagtacggtcaagtacatagtacatgtggtaaaacactcagtagtactcgaggtatggtttaactctaccaaattagtatagtagcggtacttagtgcatgtggtacagaggtcatacttctattaagaacattcttactcatttgataagccatgtggataggtgtgtgggcgcctaaatatatgttggtaaaatattgtatattatatgcttttcttactgagtttgttgactcacaaatattgctttcgtgtgtaggtaaagagaaggccaaagctgaatagcattgagttcagaggttggggatgattgtacatgcgagacagtgcgacctagagagttcagtctccaacaacttgggcttcattttgtgtaaggtttaaaaatgagatcccagttttgtgtatgaatatatgtatatatttataaaaatttgatattatcacgattttcaagaaaaccctttgattagaaaacatgtgcaatgtaattagaaagtcattgtagtgtgcctaatcattagggagttacaatgatagtcttttgaatgagaactttggactctcaatgaaagcacaaaaatgttgactatgaatttagccaattgacgcagagtctgactaggataatatttcatttatgactgtcacatgcggaatgataataaatatcaatgacacaagaatttctagaggtttcgcccc

SEQ ID NO: 235243 - DNA, 951 bp, Cannabis indica
cccttatatccttgttggagaacagttttaaaagccccagctgttcgtcaagatcaggaacatgaccataagacatacaatctgtctttaggccatggaaaatctgatttcgagtccccattatcccataaaagtgagaaatgaaatggttcaccacctcctggtaattctcaacaatttctccatgttcattagtaaaactagtaatgttattttcaagtctttttttctttaaacaagcatgaaaaaaagaagagttttcatcacctttatggatccaagtgaccttgcttctttgacgaagaaaactgaagtacattttttcctgaacaaggaaattagctgtagctaccttttcaatatcaaggaacacgggttcactgtgagcttgggcttgcaatcttgcttctaagaaatcagacttagcctcttgatacttcttcccaatatcgccaatgagatcatgattaaactttctaagacaatgctttaatcgcatcatcttgagataagttgcatgcatgccctgagctttgatcggcttcctccaattagttagcacaatatccttgaactcaggatgatcactccaaaaattatagtatctaaaaggtttgaagcctatcttatctgatatcccactctttattatgcaagagcaatgatcaatattgtttcccatttgaacaaggctttcgtgttaaggaacacgttaggccaatcctcattagcaaaaacatggtcaatcttataatagattctattgtaccatcttgattgttcgtccaagtataagtagaacctattctaggaatgacttcaagattggcagcaaccagccacattgaagcatcttgagtgtcatggaaagtgattgagtttcccccaactctgtcaacaatattgaacacagcattaaaatctcctaggactatccaaggcttcacattc

SEQ ID NO: 235244 - DNA, 1682 bp, Cannabis indica
aaagaaacaaacagtagtcgctcaatccagtactaagtcagaatacagggcactcgctcaactggcagctgagattacttgggttcaaggcctgttgcaagagatgaagatcagaatagcagctgccccaatcatatggtgtgacaacatgagcgcaagtgcgttggcctctaatcacgtgtttcatgctcgaaccaaacacatcgaacttgacgttcattttgttcgggacaaagtgctaaagaaggaaatcgaaattcgctatgttccaacacatgaccagacagccgactgtctaaccaaggctctgtctcacacaagatttcaattcttagttgacaaactcagagtgatgccctcacccattcgtttgtgtggtggtgtgaaaagaattgaataacagaatgcactaaattctactatgaggaatatcctgtggtcccaggaatctggaggttgttagaattgagaatccccaatgatttgctatgtattatgctgatgtcattattatgccttttgtattttctgttactacacgtgtaagacctggagtggtcatctttgattactgattgtatcagcttcttctataaatgaaaagtttcctgcacagactcctttgagctgtgatctttcatctttctgcatttttctaaatatttcactcttttaaactgttgggctatcaatgatgataatatcatcattgattatattattgttgattggatatttagtcaaccaatactgagtcgtaataaatgagatttaagttaaaaaaataaacaataaatgtcacgacccgaaccctaggccgtgacataggaaaagtgtgagattgagagattccactaattctatgaatttcatttaaagagaatcatattgctttatgagtgcttatttgattaacattgaataaagatatcatgtgagttattctaggttaaatctatcattgcttgagagaggttaataggttacattaggattcttgaaactacaaattataggataaattgaaataatcaataaatggagattcctagtttgaaatggggaaatcaatgctctaggtttttactttctgattaaacatcgttgtttctttatttattttttttatttatcttattatttatttcttaattataatttattttgtgttattctaattaaagtataaaattaaaaagtataataatttgtaaaatttaataatcaatccctgtgggttcgacaacctttttagtattaaaacattactataacaacactgtacgcttgcagtaaaaattgtgtatcagggaagacctatacagggcaattacatcatttttagaatcaggaaaaatacttaaggagatcaacactactattttgacaatggtgcctaaggttaaatgccctagttctgtcaaggattttaggccaattacttgttgcaatgttgtgtataaggttgcaactaagcttttgtgttctagaatcaagctcatactacctgacctggtttctcaaaatcaaggaggatttattcaaggcatattctgttggatattattttaccaggatcttagatctactcacaagtatgttgtttaacaccctaaatatgaactttctaaaacggtaaaataaacacatataaagttaagaaaaccttacattgatgcagc

SEQ ID NO: 235245 - DNA, 990 bp, Cannabis indica
tcttcgatttttctttggtttgcctggcaaaatgtttgcatctggaggaaggattggattttgacctgttttgggccacttatcagggcttgggacagggtaaactgtatgttcataacacttcttgaaagcctctatcttgtaacaaaggtgaacataagcatgagattgatggttgcaaaaccatattgcagctaaggcatgtccacatgggatgcctgtcaactggaatctcctacacgtgcatattttcccctctaaattgacagtgaaaccacctccttgattcatctaaatttggaacatagttgcatttgcccttgttacgacacatcgtttagcaacctctgttagcttagtagtaattttaacaatgttgttgtgtatagggcttttccattttgatatactctccattttttttgtaaaaataacacataagccaatacctaaaaagtaacaaattaaagttcaaaataagtattttttcatcaatgagcattgtagttgaagcgaacataataagaaattacctaatggactccaatagagtaataattggtttgtcccttgcatcaagaattgcattgttgaagctttcacaaatattgttcaacaacatatcacatttcaccccctctttgaaatgtgattttgtttattctgatggttgatttgctgccagccagttgtatgccctcacattcacattctttatctcttccattctcctatcaaaatctgcttcaatggtggatctgtctgcattccacagtagttgcttcagcagtagtccagggaactcattcttgaaatttccatgcatatgtctcacacaaaacctgctatctgggctgtgaaaaatgttttcaaccgcattttgaagccccttctgtctgtcactcataaaagtgaatgactttggctcaatgggactcaagtcatctcttataactctaaaaccaactccagttgttggttgtctctttc

SEQ ID NO: 235246 - DNA, 926 bp, Cannabis indica
aaccgaacaaaatagctctagtacagtcccaaaagagatggaaggagctttccattgccaaagagcaaagaagacaactaatgtcggttatgctgaggatggatctaagtttttctcttgtgagcaggctgttggaaaggattttctactcttaagcatattatggattttagctccccaaatgattttctagtactctcccttaagttaactctgtaggccgatttaatagtaaagtcacattgggttttggtaaccaaagccaagagtcctctaaaggccgcttaggaagggtaatattgagtatcctcttggcatcctcattgtgaaaccaacacctaattaactcttcattccacctattttgaatgatgaaattgctagactaatcccagcagaggcttgtaggcgaggcgttggttggagagtaccccctaggacccaaggattgaagcaaatagaagtggcacctctattacctattttgcggcatagacccttatgaagatagcttcgagcatgaagaatcgccttcttaagaagggagtctgaagatttagcttccaagtcaagaaaattctgatctttaatgtacttagcttccatgatatgtctccataggctatccttgtccgttagaattttccaagcccatttcatgagaaaagccttgttggtagcctccattgatctaaagcctagatctccatgaactttaggacaacacagtttctccaaagcaaccgagtgcaacatgtcaaaatgatagtaaataaatatatacttctcatatgttcaaatgattaccttgaaaaataaatcacaatgtgtatcattttcaaaccaaaataattagtagtgtaatgcgaatttttttttttttgtaaataatagaattgattgaaatagagagaaaaaaattaaat

SEQ ID NO: 235247 - DNA, 3632 bp, Cannabis indica
atttgcaaaaaacttctaagatattattctttgtatcacattagaagaataaaaatattatgtttcaatattattagttggctaattatgtagtacctcacttctgtttgaggttttgaacaccacaaattgatgtgagcgataggatgctacaaaaatgttactttttagaatcaaaccattatgatttcaccacagtaaactaagggtaaaagaattctaaaattgggcaaccgacggtgtatattgccattattctattttttaataggaaaaaaaatagtaaagttattcttcacagttcacattttcttccatcttctttaccttgttttttttttatgtctgtaattatggaaaggttgggcaacaatgaagatgaaaacaagtggggaaaatagatagaaactagttctcttcttaaaaaaaaaaaaaaaagaacgtttagaggagacaagaacgatgaattcaattgtgatacatactctccaaatatctatctcatcctcatgcttaaattctattcttagaacaaggaaaaacataaatataactaatatatggtaaaggtacaattccacactacaccttcatagacttgttcctttgccatccaacagagagtacttgcaaattgggtgaatttgatcttctcattttagctcctacctccaagaaatcaagtccacaactgtcctggtattgtcaaaactgtagagtgtgacccaaatactaagtctatgtttagaaatactaataatggtagaccaaataaattgctttctacagtcaggttcaccacaatagcaagataacttttaatgatttttttttttttgaatgggatgacttttaataattctttggtgaactaagagaaccgaatcttccctttttttgagggattttcttattttaataatttgaaaaaaaaatattggggtttactaaataatacccttttggtaaataaaatggggtgtagttataaaaaataatttttaatggggtaaatttagtaatggggtgtatttataatttttaggggtgtgaatataatctcccttaaaataattaataaacacaaataataacaaagtaagtaaggtaaattgttgtatgaataatgatatttaaatatatttataaaataataaaaaaataactataaatcaagagaaaaataacaagacatcaatcttattaaaatatataaattagggtaaattgcggcataaatacctaatgtttccggttttatacacttaaatacctaatatttatttttggtggccaaaatatctaatattacaattctcttacaccgttactaccacttccgttattaactcataaatatagacacgtgaagggcccaaatgcattacatttattttattttattttaaaatttaatattcttaatataaaaaactaaatattacttgtttttttaaaaaaaaaaaaataagagagatgcaatactaaattaccatagctacgtgaaccagtgtagcatatggaatatgattatcgaattgaagtgccaatatcatgtgaaaattgttgatgagaacacgtttttttttaaacaactagcatttagtttttgatattaagaatattaagttttaaaataaaataaaaataaatgtaatgcatctgaacccttcacgtgtccatatttatgagttaacgaaagtggtagtaacggtgtaagagaattgtaacattaggtatttttgcctccaaaaataaacattaggtatttaaatgtataaaatctgaaacattaggtatttatgccgcaatttaccctataaaatattcctaaattatctctgaataaactacaacttaaaaaataaccctaaaaataaacctaaaaaaacttaaaaaaaaaaataaaaagaactataaaacaacaaaaatatattatagttgtcttattatattttgttgatttacaattgtctttttcctattttataattattttattgttatttttatgttgttatttaggtgttctatatttgttttatagttgtttttcctattatttttacatatttttttgtacagttgttgtttaggttatatgtattttttatcgtgtatatttttcagtttattttagacaatatatttgttgtatatatgtgcatttgttctattatttttatgttattttttagttgtttttcagtttatagttattatttaactatcattatctcaaaaaggaaaaaagaaaaaaaaattgaaaaaataaagttgtaacaacaaattctattgactgaaaaattagccaattaactcagagtctaataaatattagtcaatcactactaaagaggttagaataataaataaagaaagatcacagagaatttctaaagggtcaacccttttgtatgtgggtaattacttactctcattttgttgtattacttgtgagataataccgggcaaatcactaatgaagacaaggtgatttctagctacggctctcaaagtgtttacagatatctcccaataaaatactcttagatgtgtaagtatgagtatacctctcaatttttcggttccctccccgtgtggatgccttcactataaggtaatagttgttacatatggctccgtaaaattaggagtaaacatagtaaatatccatattttgtaggatacagttataatctaataaagctctgttattcttggataaatttactgaatctgagtatgtagggttcaattgtagatatttgtagaagcttgttgaagacgagataaatgatcgtgtatctctatccggtatccctagcagtgctaaatctggttggcatgttggtcatccgatcagatcccttgacacttgtcttctttatgaacttggtttgtacaatcacccttacataagtctggcagcaagttgagtatccggctagaagctgcaggggaaattttagaaatttcaaacataagtctcgtcgcttccaagatacgaagataatccccatattcgtgggattaagttagagaataaaggcaatacacgttggttttccattccttgcattgtgattatagaattaatatagtttcctattttgtttattatagattaagggaaactattcttcatgtaataatctcttataaatagtgtcataatctcaccatggaggagacaaaaattaaatccaaaaagaacattcaagatagaaaagtgatctaagagagtgaataactcagagattaattgtaagagctttagagaggaagaacacttcattctttttctcaagtcaatacaacaaaaaggggtgtaggctattatcattctcacggggtcgaacttctagaaaacctgatgttctttttactttattagttttgttttttattatttattttatctaatcgctttatcttaccttactgttgttggctaaaagtgaggtcaacatgtgtcatgtgtgttaattttaaagaaaaattataaaaaaactataaagtactttttttaggaaaatttcatattttgcccctaataaaataccctatatcaaaaattagacccctttatttttgtacaaattgataccactaattcaaaaagattccta

SEQ ID NO: 235248 - DNA, 1100 bp, Cannabis indica
ttacactaaaaaaaattgaaattaaattttcatgaaaaaatatgaaaaattgaaaaaaattccattcagtgcggatgatataccatccgctcgcgtgaaagggaaagcaaggccgagaaacctcaccggagagggttgctggcagggtgtctgcgcgtggacacgggttcagacaagaactctgtctgagaaatctcagatgtccctgttcgaatgcgcgtgacaccgagtgtcactcattgtgtgcgcacgttggagatgcaatccctttccctgatttttctcaaatttcaaaaattcataactaattcaatttaaatcgaaatttaattctataaaaacatatattgcttaatttttttccatactatccaaataaaataatatcatgaatccaattacgtaaaaattttgtaatcatcaaataaacacatatatcaacctgaatcacatccaaatcaaacattcatcgttttaaatctatatttcttgaaagtaaattattaccatggctctgatgccagatattgaaatatattttatcaggaactagatttacttacaagtatattgattagcaccctaaatatgaattctctaaaataatgtaattaaatacatataatgtttaagaaaccttacattggtggcagaagaataatatgtctcctcccgctcagatctctaacccttgttctaatctgtattattaagatatgagctcgattctccttcaagtgttggattcttcatagtcttacacaatatcattgagtacttgacttgctatgagtgggcatgtactctttcactgtaggctcgaaaaatatgaagagagagatagaaagaggatttcgaaattagtaaaggaattgaggcatctcaaaaactctagttatccgttacaatgtaaactaggttaaatgcactggataaaaaatgaaagcatcctattcttttcatactatttaacttagggttaggatttaaattatatggaataaaaaatgataaaataatggcaaaataaagcatatagtggttgaccattgagatgggccccactagttataattttgctatttttcaaccatttatct

SEQ ID NO: 235249 - DNA, 578 bp, Cannabis indica
tacttaatttttttagcaacggtgcctgaaaaaagtcatttttaggaccgttgcgaattctgatatttgtagtagtgcaagacccgaacccttacaccattccgaaccaagacccagacctatgactttaaaatggaacaagaactgaagtgggactctagaacaggacccagacccagacctaaaccagacccggaatgaaacatggacccagaccgagatccaaaacaaggacctagaccaaaactcatacctggacttgaactcggacctgggacccagaactcggaactcgtcactcgggactcggactagaactcggacccatactagaactcaaacccggaccaaaactcagacctgaacttagactaggaccgagacccaaacccagactgggaataagatcgaaacccgagacacgagactcaagactcaaactggggactctagaaccaaaccgagaccaagagccataccgagccaagaccctagaccaagacctgcactagaacacgaattaggacctgcacttagacagggactagaactggaactgggacctagggcccttactt

SEQ ID NO: 235250 - DNA, 1465 bp, Cannabis indica
ataactcgtggataacgagtggtcataaagctccaaaaatatgtgattagagtgctttataaagcactggaactatgtgtttatggtgatatatataattagagtgctctacaaggcactgagattatgtggctatgtgttgaatgaatgcctgtttggtgaaaggataaaatgtctgattatgagttactatgattttcttataatgtgaagtttatgggtttgtattgacgctaattaaatatgcatgttgaataggtattgaatcagaagtatgttattatattgtgatgtgaatgcttgtgttttcattgcttatgtcctggtaacttttcttgctgagtcattgtgactcacgggtgctttgtggtgcgggtaagaaggaaagcagttgtgttcagccatgagtcagaggtctcccaacaatgtacatatcagccgtggtgtcttggcttccaagaagtagtatcatccctattttctatctttggaatcgaacctacttttgtaataatgatgttgtaattaattataaagaattttataaataggggatccccgtattatgacagtattttgtatgaaagttttatttttaaatttaattatgggatttttaattaaaccacacttttcttaaactaatagattagttagaaataagtttgtaaaagcacacacgtggcgtccctgggggtcaggacaatacacctaatttatctttcagttgcaatttaatacctaagttaaaattttggcggcataaataccttccgttacactttcaaacattctgtaggtaccttgctgttatcttgcacattggacactagctggcatgccacatcatttaaaataatatcacatcatcttcacctaatattaactattaaaataaaaaaattaatttaatttaaaaaagtttacataaaactaatttattaaatttatataatataatctaatattaattattaaaaaatattgtcttcaaaatcaaaaggtaactattataaaaaaaaaacaaaaataaaaccctaaaaagtgtggaaccagagtcggggagtgagaaagaagtggcaactgcatgttcttctccgaccacgacggcacgacccatcatcttctggcgagaccatcttttccgaccacaggaggagccatcagcaccggggagagagaaagcattgggcgagatgaccacggcaaccagctagcagctacggtacgttcgaggttcatcttttctgaccacgaccatcgatcgagggagcaggctgagaaaaatagggcgatgggtgtgtaattgcgaaccaccacaagaagtcgcagttggtacctcaaagacggtgaagaacccaggtcgaatgttcaagtgttgccataaattcaaggtttgaattgttgccccatttttttgcttctttttcgttgtccaattttttggatttggattttcttaatc

SEQ ID NO: 235251 - DNA, 726 bp, Cannabis indica
atataaagtgataatttttattcttatactaataatttttacaattaccacaaaataatctttttcaatcatgaatatagtgaagactacattttataacaacatgaaatataaattcttaagtgaatttttgctatagtctatattaaaaaaacaaattcttgaaagaatttgtaaaataatcatttatagatgacattcttgatataaaaaagagacgcttatattttaattttaagtattaattaacagtacttttcaaaaaatttgttacttaaattttaatatagttttggccacccctaatatttgatcctggttccgcccttcgaggttccatctcaaaaccaagcaatgggaagactatccctaatatttgattctggttccgcccttcgaggttccatctcaaaactaagtaatgggaagactagttcattcatcttatatatgacaatttattttcacacattaacaatgtaaaattaactctaataagtagtgtaatatacattacattaaaattgaaacttccattccattccaaaattgattacaccaaatcaaatgggatgtaagactatacaatcaagaatttttataatatttatttatgtagtataatatctataccttcatctgttttaaaatatatctttatatattaaaagtgtctatctaacggtaattcttggtttaacgatgttgttttgtttcctccgttaa

SEQ ID NO: 235252 - DNA, 1961 bp, Cannabis indica
atggtagtgaaccaactcctgatgctcaactatatcgatccattgtaggagctctttaatacctcctcattacaagacctgaaatttctttcagtgtcaacaaagtctgccagttcatgaaggatccccaattaagccactggctagccgtgaagaggatattaagatatcttagtggtaccatcaatcatggtttgcatctcaaaaagtcctctttacaagaagttgttgcgttttgtgatgcagattgggccactgatattgatgatcgacgctcaacttctggtttcactatcttctatggagacaaccttgttgcttggcaatgcaaaaagcaacacaccatctcacgatcgagcaccgaagctgagtttagaagtcttgccagtacagtagaagagagaggactccgtcaaggaaacctaatgtcacctcttctctttgtgatcggaatgaagtacttattcaaaattatggctagaatagccaagatctatgacttcgcctttcacccatgatgtaagagattgagcctaaacaatctttaattattttgcatgtgacttgcttcttttttgcaagggagattttaaatccgcccttctctttcttagaagctttcagttgttttcttagaagttgtctatggagcaagtatggatcatctttccttggttagaatattattattaatttgtttggttttaagaagagcttttctccttttaagtatcttggcatgacaatttgtccgaaaagaattttgagagctaatggtgaaggtttagtggagaagatgacagctagaatcaaatctggagttctaggaacctttcttatgtaggaagaatggttcttatcaactctgttttgatgtcaattaatacttactggtcacaaattgttattttgtctaagtttaatttttgacggtaataatatctaagttatatttttagaactcttataagtacctgactgttaatggttaagtaaattgtcacgtggcaattcctgattggtccacgtcattaaaatttcaattttttttttaaatataccaataagaaaatgatacatggataataatttaacatttaacggtcaggtacttatggagtttcaaaaatgtaacttagatattattaccgccaaaaattaaacttaagtatttatttacaactgagaattaaacttaaatatttatactgtaaattactcttttaattattttaaattgttatttcttataagtctagatcaattttattctttattcctttaaaataacccttatcttagaatgaattacaaattccatatgagggactcaaagagatgtcatgtcaaatttagatgatcgtatatattatttgtgtatatatatatatattaatatatttggaaaagaatatagaatataagcatattattactgacgttttagcaaaaggtttgatctctatttagaaaagtagaaatatagtttctacaagttgtggtttaaaaaagcagatccattaattaaaaatggttctagtttttttgactgatcaattgggaaaattctcttaatggaagaatcatggccatgaccacaaataatattgtatatatatacttaccaatggaaatagattaattattccaaagtggataagaaaaaaaaatattaatattttctcaaaatgcttaccaatcaaaattggtaaacatcaaggtataataataataataatttattaattattgtgtgtaatagtaataaaggcaaggttccaatatatactagaaagatgctcatattgagaaaaattatcaattttttagtgataagtgggggtagtatatataaatatagattatataggcttccatatatactgttgtataaagtcaaagatttgaatattattattaggggtgcatgcatgagcatcaattaattatatatatatata

SEQ ID NO: 235253 - DNA, 1929 bp, Cannabis indica
atgaattctgagaaatagagaagtatctgacttagtatgctgaaacccgaggttaataagagctgtagacagcttgtcaaatcaggcccgaggggcttgcttcaacccatataaagctttttgtagtttgcataccaaatccggatgttgaggatccacaaatccaggaggttgacacatgtaaacctcttcttctaaatctccatttaaaaaggcattattgaagtccaattgtctcaatttccaacctttggaaataacaatggtgagtaaaactctaatggtttctggtttaacaacggggctgaatgtctcattgaaatcaaaaccactttgttgatggaatccttttgcaacaagtcgggctttgtattgtgtggtacttccatcagcattttctttaacacgtaacacccacttgcagcctatacactgtcgtccaggtggtaatctcactaaaacccaggtcttgtttttctttaaggcataatactcagtgtccatagccttgtgccatttaggatcttgtaaagctgtcttgacagtagctggaacaaaagaggcagtgaggacttttggttttcgaattccatcttttgctctggtttgcatggggtgttggttaataacagctggggtgatacaaggttgatttggggcaggtgaattagaagattcaggaggtgttaatgaggtgagaggtgatgtagtaagggctggtgtaggtggagatgagggtgatgtggagatggttaatgatgaagtttgctgtagggatgaagaaggaggagtagcagtagtagaaagggaaggatgaacaacatgaggaataacagtagtgaagttatgaaatgggaagacattttcattgaataaaacatcacgagacatgtaaattcgaccatccttagctaaacacttatagcctttctgagttagattatagccaataaacgtgcaaggggtggatctataatccattttatgcctattgtaaggtctaagattgggaaaacatagacacccgaatgttttaagagctgaataatctggttttgagtgaaacaaagtttcatggggagtaaaatcattgaggacttttgttgacattcggtttatgagatacacagaggttctatatgcctcatcccagtatttaagaggcatagatgcatgagctaacaaggtgagacccgactctacaatatgtctatgttttcgtttaacaacaccattttgttcatgggaatgaggacatgacactctatgtactatgccacatgactcaactagtgaagtgaaggctctgaactcccctccccaatcagattgtaaggatttgataggaagatttaattgcagttcaatttgggttttgaacttaataaaagtgggtaaagcctcatctttggttctaagcaagtagatccaagtatacctagaataagcatcaacaaagcttatgtaatatctatatccattagatgagaccataggggcagggccccataaatctgtgtgtagcatttgtaatggagctgtgtagattgtttgagagttgggatagggtagcttatgatgtttaccaagacaacaagcattacacaaatcaaatgcatttttattaatggaagagatattacattttgtcattatagattgaacaacatgtttggaaggatgtcctaatctattatgccaaagattaaaatttgaaataggtacattggaagtagattgctgacattgaaaagcagttttagatgaggaaacaccagcagaagtgatgttgttgtgattgaagggagagttgaattgaagaggctggtcaaacttgtaaagccctttgtcaaccttcccaaccaataaagtcctcatagtagcctgatctttcacaaaacaaagtaagggtgaaactcaaaatacaca

SEQ ID NO: 235254 - DNA, 783 bp, Cannabis indica
gctgaaatatgaaatttactcaacatatctcttgtgagaaggtttgagtgagcagcttgccacaaaataaaaccctgttttggcacattgagcccacactaaattgctctgctgcatggtcaggagggtgatgtatcatcgaattatagagctttgaggctctaaattttccccctcctccagcaactgttatcttagcaagagaaaaacattttcttacctgacacaatttcttccaataccaacttgtgttcaatttcagattataactccagatatcagtccctttgagatacactgcattagcccattaaacccagagcaaatccttcttattcataagatcccaaatgaatctagcaagagaagttgtgttccatttggtgccttttttaaaccccaaaccaccaaaagctttcgggagatacaccttttcccaactagccaaataaactttaggtcgattctcctacaaaccccaaagaaaaccacgaaaaattttctcaatttcttttatcacactttgcgggagaaggaacaccctcatccaataattccttagacccaacaaggtagtttgaataagttgcaccctacctgtaaaagagaaaagtttgtttgcccaagaaatcaatctttctttcaactttttcagaataataccacagacttctaatctccacttggttggtctaaggggaatccccaaatatttgagaggaaaacttcctatctgcaaatttatattttgagccacttgtttgaatttattttaccaggatc

SEQ ID NO: 235255 - DNA, 779 bp, Cannabis indica
ctcatcactaaacatgtccatgtacaaaggagctgtcccaggtgcttaattgatccagagtcggctatacactgcttggttttttgtcctgaaattacaagctgctggtgtgcagctggtttttcgactggtgcagcagtaaaccagactttcgggcactggtttatggaggcagctgctacatgggacgatgctcaatataaattggcaattatgttgtgctggtctatatggcaagctcggaatgataaagtttggaaaggtatttctagacaaactcaacatatattggcattagcaagaggtaatcttaatcaatggtgtaacgctcaagaaagaacttttgttccctctcaattgaatttaaatccgaatgaggggggtgagctttggatgaaaccgattggtaatacgattaagatcaatgttgatgcttctatttttgaagaccaaaaccgatatggttttggttgggttgctagaaataatgaaggcagacttttgtgggcgaaaaatggcagcagatggggcaacgtatctgctgaatttgcagaggcaatgggtctcaaagaggttctaagttggctaaaggaaagcaatctctccaatgttgtggtagaatctgatagcttggtcactatccaagctattagaagttctatttccctttgttctacctttggcttttgtatttctgaatgtcaaagattgatttcaagtttaagtaatgttgatgtatgttttgtcaaacgatccgcgaatcgtgtagctcaccatct

SEQ ID NO: 235256 - DNA, 1534 bp, Cannabis indica
cagacccagatcaaacccaaacctagacctgcacctggacccaaacacgaacccaaactgtgatcgaaacccaagacttagacccagaactaaaccctaactcagttcgagatccaaacctgggacctgaacctaaaccaggacccagacagaggaccctaacccacaccaagagcccgatctagacctagatcgagatccgaacccaaacccaaactcggaccaagactcaaacccaaacccaaactcgaacttggaatcaccactagaattggaaccggactaggtttaggaccaggaccaggacaaggaccaagacttgaacccaaaccgaaataaaaacccaaactgagacccaaacccaaactgggactaggacccaacccgaacctagaccgggacccaaatccagaccagaactaggacctgtacacagaattaggatagggacctgggaacaaaactacgaccgtgtcctaagacccgaccctagacacggacttgcacctaggaccgaggtcgtgacctggcacacgaaatggaactagactgagacccgagattgggaatcgaatatggacccagggcttggacctaacctgtagtcagtctctggatctaggaactagcccccgaccccaagctggacccagaccccgacccggacccgaaaccaaacttgggctcagaactggaattgtgactaggacccggacctgagactagaaccaaacccaaaccataacccaaacacagaccagaacctggaccaagaccttgaataggactgggacttgagacatgggacccggacctggacctgacctgttcctgaaccctcgccgggacctgagacctgtgaaccagactaggataccgacctttacaaggacccaaacctgaaattggacaaagattgggaccgagacctggccccgaaccctgaccggcacctagactaaaaccaagactcgggacccgaagccgaacctagacccagaccatgacctaggaaccggacttggatgggggacctagaccagggacctaggtcccggaacccagacccagatctaaatccgggactcgaacccaaaccaggacctaacctagacctaggaatctgaagtcgaacctataaccgaacccgaaacttgccctagacacaaactaggaaaggaacctagacacaaacccatactaggaccgaacccgaacccggacctgaacccaaaatcaaacccgaactcagacccagacccagacccagaatcagaacctaggacatcgacccgaaactaaacctggactcagatcgagatcgaaacctgggactcagacccgaacctgaacctggacccaaacccaggaccttaactcacacccgaagcccgatccggacctagatcgagatcgggacccgaacccaaactcggaccaggactcgaaccctgacctgaactagaacccaaacttgaactcgaaatcgcgactggaactggaaccagactaggactaggaccaggaccaggac

SEQ ID NO: 235257 - DNA, 626 bp, Cannabis indica
ttcaggtcggccttgacacacttgtgtaactatgggttattctttctaatcaaaaactcaatttccctcttcagattattacatttgtttgtgtcgtggtcgtaattcacataaaaacggcagaacttggatgtatctcttttacttaaatccttattcattggagattgttttttgtacggcaccataactgagttgttgcatagattgtctctaggtcttctattagaactgagaaggcagtaaattttgaggcattttccctggggtgttgttcggcattgctagtgaatttgcctttctttctattactctgcctgttactgttgttagacctcttcccatttgaattcaagctattgaggtattatggattctaaactgatgttcctactgaggtgacgcattgctagcttttcttttgtctgatagtcttcacacgccaacagcctcctcaagcttaatgaacccatctgctcaatctagaaattcagtcattgaccccacagtcagccttttgatgtcatttcatagctctctgagtggctcaatggccccagtattgcggacagccttccttctttggtcagccccttcacttttgtagcttcggtcataaacctgct

SEQ ID NO: 235258 - DNA, 907 bp, Cannabis indica
acaaaaactaactaaaaaaaaaaaaaaaaacaaagttaacccacctaaatgtcgaactaggggttaatttacggaactataacactttcccaatttttcttttaatcctttgacctcctttgacttatgcctccctttcttctatataatgtgtatttaattggccaaggaaataataaagcataatttaaattaatatctattgagaaggaaagtgaaggtaagtctactaattaattgttaagaaaatgataagcagcaagagattcgaaggaaaagtggccattgtgactggttccactcagggcataggctacagcattgctcaccgccttggcttggaaggtgcctctgttgtcatctcctcccgcaaccaggtttaactatttattaatcattataatgatctattcatgccatagtaattagaattcatttcaagtatatatattatatcttttgtttaattaaacacgaatactttattaggaaaatgttgatgaagcaacccaaaagcttaaaggtcaaggaatccaagtgttggggcttgtttgtcatgtctctaatgcccaacaaagaaaagatctcatacacaagacagtcgaggtcattttattatttaataaattaattagtgatgaattacatgatccatatagtgtttcataatgtaattagattaataatgaattgacatgttttgtttatatatgtaactcaaaataaattaataataaataatttcatgcagaaatttggaaagatagatgtgattgttttaaatgctgctgtcaatccaatggctggcaaaagcatagccacgattatgggaactcaagaatccattcttgacaagatgtgggaagtaaatattaaagctacctattcttcttatgcaggtacataa

SEQ ID NO: 235259 - DNA, 1678 bp, Cannabis indica
ttattttctataatttctgtgctaaacctattacaaaaataggttcatattcgttaacgaaaatctgcgttaacagtttggtgctttcattgagagcctacgttattaaagctcagaaaaatccctccaaacgaaagaagaaattctttgtccatggttgataatggggaaaacgacaacattcatcctgaagagactactcaccgtcaagggaaagagctgatgggctcacggaggccacccaattcacaaacaacatgttctacacggtcaacacattcaagaagaagccaacgtgacgatgaccaaaacctaataagcatctcttgttgcagtagcattccaaaaataaatgcctttttatcttccctctgtttatcacaaactaagcaaagattatcttgacatatgttaaatctcaatatctctcatttgtctgcaattgacctctaacagtattaggattggtattcctccgattcatgatgaaaagatcaaagaacaatcaaatgtaaaaatgaacaaagaactgggaagagtgacggaaagcaagagaaagagaattggaaagagtcattctattattgttgtttgattacagagtacaagtgacttatatatatgtcacaagagataagcaaccggcttaacagaaaataactgaaaaccagttagtacaactcagcaataacagaaataacaaacaacagtaacagactaacaatgactccttaatacctccccgcaaactcataattagaaggagtggaaattgtgagtttggttcgaaatcgaggaaaattttggcttgagatggatttggtgaggccatcagctaattgatccgtggaagacacatgtttaacttgaacttggtgacgaaggacttcttctctcacaaagtagagatctaattcaatgtgctttgttctggcgtgcagcacggggttggcagcaaggaggacagtactgaggttgtcacaccagacaacaggaggctttggttgagagagatgaagctcagaaaacagtgactgcaaccatgtgagttcagagacaacattagccaagctgcgatattctgcttctgtgctcgatcgggagatggtttgttgctttttgcactgccatgtaattagatttccaccaagaaaaataagaaagccagatgtggagcgcctgtcatcgggatccgaagcccagtcagcgtcacaaaaggcaatgagatctgttgattgtgttctatgaagatgcagaccatggtcaactgtgccactcaaatatcgaagaattcgttttacagcttgccaatgtgattgaagaggattcttcataaattgacagactttgttgatgctaaaagctagctcaggtcgagtgatgagaaggtattgcaatgccccaacgatagacctgtagagttgtggatcatcaaacggttcatggccataagctgagagttttaagccagtcaccataggtgtagggagaggttttgcctctgtcattttggctcttgtcagtaggtctttaatgtattttgcttgagataagtgaagtcctgctggtgtactttagtaacttcaatgccaagaaaagtagcttagatttccaagtatccctttagagaaaacttggaatttagcaatgtgataatgttggcaatgacttgagagtt

SEQ ID NO: 235260 - DNA, 1615 bp, Cannabis indica
taatccaatctgtacaagtgcagatatctgcactttgtggattggatcctgcagattggattgaattgagtattttatgaacaccccactgaaaaacatatagtttgatgaactcattagggacctgagacttgttgatctcaaattgaataacgggaggaacacacggttagaatttagacaacgacccatttgttgcagatttggataatatatttattttccttaacaaatggaatgagttatattcctttgttaggcaggacgtacatgtaagaattgtatcagttcatagcccaaccgttttagattccaacccacttttgtggggaccatgtcctttccgtttcgacaattcgtggtttgaacataattcctttaagaaggaacttgcaatttggtagaaggatgcttgagcagtgggttgtccaggatacaaatttatggaaatgttgaaacaagttaaaagggaaggtcaaggagtggaatgagtggtaaacgttttctgaaacaagtgttaaagaggagaataacatagcttatcaggttggaggagaggggtaacttggatccacaattaggggaagaaagaagaataataataaaagtttggcagcaaatttcttttgaagaaagaagaatttggctgaaattaagatgtaaatcggccaaagaaatggttgcaaactcaaagctatttcatcgtatgttaactgtcaggaaatccatgaatttcatttctagaactgagagagatgacgaggtaattcttgatagagaagacgacatagtgaatgagatcgcttcattttgttctaatttatattaatcaagaagcgattgatattgagggtattgaatggaaaggagtcccacattacctagcagcacaccttgagaggtctttcaaggaggaggaaattaaagaggcagcttttgactatgatgtggtcagcaccagggccaaacggtttctcattggctgtatatcaagctaaatgggaaatattgaaggatggtttgatgaggatgttcaaaagtttctcagaagatggaagcattcaaggaagcatgaatgggacatacatatgactcgtccataaggtcttgtctctcaggcttcccctgcggggttcttgacgatactatttttgaaacctaggtcgcttttttggaagaaagacaaattttgttagttgaagtattagaaaagaagctagaattacctgtcatatggtctgtagcaccagaatctatgatccatttggaagacgagtaaaggagacacgaattttgtttacctaaatcagcaatagtagtgatagaagaagatgaatacttaaatactgtaagaatttggcatattcatctgcagaaacaagaactggtctaccagaagccattacaaatatgttcgttccaccaaacttcacatgcacaaattagcgaagcatataacacatatttaactgaaatggacaacgaaaccacaggggaggtcgaggagaacaacgagaagaaaaccggtggcctggaacagtgccacgcgcccccacgcgccggcgcgtgggagtcggggcagtggagatgggcggcgcgtggggcccacgcgcgg

SEQ ID NO: 235261 - DNA, 1106 bp, Cannabis indica
atgaagcttactcctatttccatcccaaccccaaagaaaacctctgcaaagtttttcaatctccttagttatactttgagggagaataaagatgctcatccagtagttacggagtctaagtaaaacagaatgaatacattgcgatcttcctgcaaaggacagatgtctactcgcccaactatggagtctttgcttgattttctttaggatcacatcacagtcttccactttccattttgttggtctcaacaggattcccaagtattttaacggaaatttgccttcaaaaaggtttatctctctcaggatttcatgtttggccttactttcaacccctcccaagtaaatttgggacttgttggtgttgatagctaggcctgatgtggcataaaattcattcatgatatccttgagaatatgaatcgactgaatattacccttactaaacaagatcaagtcatcagcatagcagagatttacaattttgagacttttgcataaggggtgatacctgaaactggtcttactggctgccatggagaatctcctggttagatactccattatcaaaacaaagaggaggggagagagggggtccccttgccttagaccctttttgccttggaagttgtcttgcactcttccattcataagaatagaataagaagtggctctcaaacaagtcattatccagcttatgaatctggctggcatcctaaatgcattgagtaaagcctctaaaagatcccaattcactgcatcataggctttactaatgtcaactttgatgatgcacctttgggagatgtttttcctgttgtaattcttcaaaaggtcttgaagaatcataatgttgtgagctattgatctcccttgaatgaacgctccttgattttcattcactatggttggaaggacttgggctaatcttgaacaaagaagcttcgaaatacacttatagattgttgaacaacaagcaatcggcctgtagtctatagcttttgagggggagtcaaccttcgggataagcgtaagcattctggcatgaagatcccttggcatacttcctgtttggaagaagctttccactactttagtaaattctt

SEQ ID NO: 235262 - DNA, 739 bp, Cannabis indica
gaagcatcatcatataccttttcaaatagaccccgaaaagaatgggtttggcctcacaagaatatggagtcatacaaacaacttatgtatagtttcagcaaagtcgacatcactctatgtggtgaaatcaaattaccactaacagtcgaaacagccccacggtagaacacccctataactaccttcatagtgatcgacaccaagtctccttggaaggtcaacactctacgacctttgagacatctcatcgatctactacctgtctgtcaagttctagatagcagctggtatcaagttctcgacagcagttggtatcgaccgtctccttggcattcaaagagtagcatatgaatgttacaacactgtgctaacaaccgaggggatgaggatgacctcctctggtcgagggaacgaagaaggcctcttccgctgtaaattcagtcgaagggatgacgaaggcttctatggttaagaccaaagaaataatggagaccgcacctacaattactccaaggtgcgcccaagacggggaagacattacccccatcttatgtatattaatttgggagttggtcacattctcaatcaaccaaagaacaaccagcgactgctacaacatttcattgacagtcgccaagaagacctcaaccatttcaacaaggtggaatatcgacaaaatcggggagttttgagttcccgatttcacaaaacaacgacatctctaagaactgtgaacaac

SEQ ID NO: 235263 - DNA, 1689 bp, Cannabis indica
tcatgtaatcatccaaaacaatatattgaactctctcttggcttttgatgatcgatataaactacaaatctacattctattttttctttatttggacaaaaatatgtggtttacatgtatattcagcttcatttcgaccatgattcaattttgtagacctttctcctcctaattatctctttggaataagtatcgctgataaagtgactttagtgtcactaatcccacattgaagagtaaaaggaactatggtgagagaggtctataaattgaacacgtggtctacaatgatacatacttacctggacagggtcaatgggcgatcaagaaggcccatggcctagcttagtgactttcattgcacttagaaagggtgctgagctaaggtctacccaagttggtggaacctatgtcataatttgtgttagcggaggcctgcgtacgcgcggcctctatcaagtttagttaaacattctttattgggttatatatttagtgcattgtgctatatctaaatataaatttagtatcttgtatttttttttttttgaaatataatgcattaataaacattgaacagtacaaggatttggcaagtcatgcataatagcatggctagcacaatgggtaccaccccaatcaacatagcactagttttacaatctaaagcataattagctaacaaatgggctgctctattagcttcccgatacacaaacgtaagccccgaaacagtagaacatgacaacaactcacgtatctgcagcaataaaccatcaaacttgcgacaactttgatcctccctactgtgcaccagcagaacagcctccctgcagttcgactccaccccaaacacaagcaaccttctctgcaattccacccgtagaccatcacgaatagcagttagttcagctactaacagtgaagtcttcaaagagcaccatctactcgaggcaaactcaacattaccaccatcattacgcaccacatggtattttgtattataatcatgcatatttaatatcttaaatttaaatttttttaataaaattttatcacatctaaaattttataaattttgaatttaaatttaattatttgattacatataactgagaattgtttggttaaatattgattaaattttactttagagtactaaatatatataatttgaaaatatgagattctaattaagtattactaaaaatacaggatactaaatatatttttcatgaaaacacaatgtactaaataaatatattcctttttttatttttatttttttttattttcaagtctttgttgctttttgggcataaaacttgggatggtgtgattttttgccatttatagtattttaattcaattattttgtgccaattcatttacttaaattagtattttatcttttatttataaaactatgaaacaaaccgcgcttcgcgtgcagttgtattttatttagtgataattaatcataaaattatcaaattttaatttttatattattgatataatatatatatatttttaattatatgaagcaaacctataatttttatgaaggaaactttcactaaattcgtgtagttattggtcaaaaatagtgttctttttattgtactgtaacagtgcgaattttaatgttagggccttgatccatgtgttgttataggtagtagtgac

SEQ ID NO: 235264 - DNA, 602 bp, Cannabis indica
atgaaaatataatacatagaaattgaggaaaaataaaatcatattagaaccataaaataatgtcaaacaatatccatctagaccctaattaagtgtttagctactcaatgtcattgtagcgaaatctcacatatcaacttaagaaaagaggagaaaatagagaagaagagaatgttgaaaatcctctaaagaatgcctccagtattgaatttggtctctgaatttcgtactcctttttctacctttttatttcctgctaaattgctttccaaaataaactgaagttcactccttatatagccattgagggactaaaaagatagaaaaaacgcacatgctataaatcatgttcagctttgaattaggaacccaccataagcccacgagtagcaagaaatctttttctacttcaaaataggggcgggccgcagcccgtgtgcaatcttcacacagtgatagaaaaatttcaagggacgggtcgtggcatgcctttcctaggccgcggtccgtgtgtaattttccacattttcaaggcgtgtaatctttttttctaggccggatctcaattttacacagctaacttttatgcgatcttttatctt

SEQ ID NO: 235265 - DNA, 1364 bp, Cannabis indica
tgcctgcctttgaaatcttatgccccagaactatcccatcttttaccatgaagtggcacttttcccaattaagaaccaagtttgattcctcacatctgatgagcactttctccaagttctccaaacaatgatcaaaagaagaaccgaaaactgagaaatcatctataaaaatctctatacatgtttcaatcaagtctgagaagatagccatcatacacctctaaaatgttgtaggagcattacatagtccaaagggcattctcctgaaagtaaaagtgccatatggacatgtaaatgtcgtcttctcctgatcttcaggtgttatggatatttgatgattcccagaatagccatccaagaagtagtattactcctgcccagccagccggtctaacatctgatcaatgaagggcaaaagaaaatggtccttcctggttgccttgttgagattcctgtagtcaatgcagattctccaaccagtaaccgttcttgtggggattaattcgttcttctcattctttatcactgtcatccccctttctttggtattacttgcaccgggctaacccatttgctatctgaaattgggtaagccactccagcatctaaccacttgaccacctcctttctgaaaacctctttcattggtggattaagtcttcgttgtgcatcaatagttggtttagcgtcctcttgcatcaaaattagatgcataactgttgagggactgatacctttaatatcatccaatgtccacccaatggctttattgtgtgcacggagtactctaagaaacctgtcagtttccacatcagaaagttaagctgacactatcactggaagattcttgccttctcccaagaattcataccgtagatggttaggaagcacctttagttctaactctggtggtttttctatagatggcacaagctcttttggcacaacccccaattcttcataatacttcctattcaatggcccataagagtcaagccatttagcatactcaattgcctccattccttcttgctcagttaattcctcctcagtgaagctcaattctaaaggatcttctatcaactttttcttctccacaatggtatcaatcagatcaacaaagaaacaattatcacttgcctttggaaaagtcattgccttaagtacattgaagactacttcttccccttacacccgcaacttcaattcacccttctgaacatcaatcaatgcttgactagttgccaagaatggtctcccaagaataattgggacattgctatattcctccatatccagaacactaaagtcaactgggaatatgaacttgtcaatttttactagtacatcctcaatgactcccc

SEQ ID NO: 235266 - DNA, 1787 bp, Cannabis indica
ttaattttaatttttttgtgttttatttttattttttttataaatttttgttaattattattttatttttcttataaactttgcttattagtaaataatagtagaacgaatcatatgagcatacatttagacaggacaactgatgatcttagctttaataagtaaacttatactacactatgtatttgtttaaacataactttttttgtatttgtttaaatatataattgatgaaagtaaaatatatgattataacctactggttttaacgaggtttacgtatctgtggcacgtcctctatgtctatagtatatatatatatatatatatattgaacataatcataccatatgtataggatatttatatggggataaatattattttggactctgtgttttgcaaaaattattaattggaccttctgttttgttaaatgacaaaatagaccctatattttctaaaatagtacaaataggatcctgaactgatttttttgtcaaaataaaatttaataataatccaatctaaaagtgttatgacaaagctgtttacattttctgtgtttgttcatattaggaattgttttcaatttagtcatattaaaaaaaagttgtcaaaaattaagctcactgtcctctttttactattttagaaaataaaaggtctattttgtcatttaacaaaatagatagtctaattggtaacttttataaaatataaagttcaaaataatatttacctatttacccctttatatagtgggtcatgttttttttgtctagcgtctttgttacatggaaaaattatattattatctaaacttggtcagttggttatatagttatttacaatgttaaaaattaatttcaagataatttattttgtgctagtataaaatatactttttttagaaaccatataaaatagactttaaagcaatttattttgtaattttaatactataaattattttaatttcttaaaattttgtgcacgattctaaataattataatatatactgtcttataaataaattagatcatactaatctatataattcgtatgatgaaaataagttgttatgaaatatctatataagcacgtgaaaatgtttgttttgaaacttattttcgacattataaataatttaaaattttataaaagttataggatgtcgtaagtaagcacaatatttatcatcatataattatttttatatttataattatattttctatgtacaaaaaaatatgttgatgtaagaccatttctaacaggtggtataaattttgtactgactcaaaaaataaatcaatattatatttgatccaaattttataattatgttccaatgtattaagagtaaaataaacttcatttttatagaaatatgtaaaaaaaaaataaaaataaaaactaaaacaaaaaaccctaaacttccctttaccttttactgtggataagaatgtattttgaaatattttaattttcactttgatcatgattcatgaacatgaaaatgaaatttgatttgatgaacaagtttgttggtttgattgattaatgcttcttttcttcaaatttgatgaacaagttgttatattatatatgtttaatttaataaataaataaaatattaatttttttaaagagttgatcgagttgatcgggtcaacccgttgacccgatcaatccagccaaccaaaatccgccaaccagtgacccgccaacccgacccctattcgggttcgagttcggtttcatttttttaaacctgaaaccc

SEQ ID NO: 235267 - DNA, 841 bp, Cannabis indica
agaactatcgactttgatgcaatgagacacatgatggcgtctctttggcaaccgggacgaggcgtttacataaaagagttagatactaatcgatatctttttcagttctaccatgaaattgatattcaagccgttattgatggcagcccatggacctttaatcgtattcaattggttttccatcgattgcagaggggggaagatcctcggttggttcggctgcacaagttggatatgtggatccaattgcatgagttgaaatatggatttatgtctgattgggtagtgaaacatgttggtaactacattggatcgtatgtgaaatctgacccaaggaactttgtaggaatttggcgggattatctcagggttcgagtcacgattgacataaaaaagccattgaagaggcgtaagaagctgatcaagccaagtggggaatggatttggactacctttaaatatgaacatgctcctatgttctgtttcatctgtggccttattggtcactctgaaagattctgtccaaagcgctttgaggaacactttgatgattcgatacgtctgtatggggaatggatgaaagcacctacacgaaagaagaactatctgataggggcacagtggttgcgcacagggagggaggaggagacgggagttgctgatggtggtgatcggaaccggaatatggtggtggagagggtgattaatgtacctgctgtaattggggttgatggaagaaattatggagaaaatcatgggatacgaatggagacaactcagatgaatcgtcaggaggagcaatttgtggaagtaaatgatgatgaaagtaatgaccaagatt

SEQ ID NO: 235268 - DNA, 1027 bp, Cannabis indica
atagatattatttttatttttagttttttaagggtgaaagatatttattttgcatctatttattaattaccatttgtttatatttttactttaaaaattataattcgagagatattattaacgagttgtacactataagggatacaacttagtagtagaaaaagttttggagacgaaaatattaattatttatcaagaaattaactttacattacaatactagagattatacacaacgtatatgtatgatgagttaatattttgtaactacactttaaaatgtgaagttctcacgtgaaaatattaacatgttaataagttaataactcatcgtgcatgttttgtacgtgccttgggagtagagttgtacatttgggccagactatttggcatcatacaaaatcggcacgatcctaagatacgagcacaacaagtaaaaaaatataagcttaaacacggaacaaaaaaatgaatttgagcacaatacaaaaaatatgacacaacacgacatgaaaaaaagtataaatataaaagtatgaaaacacaatatcaaaaatatataaatttagtaccatcatcatcatcagatctctgtctctctctctgaagaagaagaagacgcagaggcattatcagatcttggaaatgcctcgcctgactttgaaccctaatcgtcttttgcctaggttcgtcttcggccagtcttggtccctttctttgtctttggcgtttaagttcaggccatggagttctgttcctgccatggcgatcctgtccttgttgttcacataccgcccttgctccgtcgaactgagtagtggtggcgatggtggaaaaatctcatcccctagacgtccttgtccctcgaaccgtgcctcctgcgattgagagaaagagagagaagaagtttgagatttgtagaggagaaagaggcggctgtgaaaaatggtattgttaggtttcaagagctttctttctcagtggtggcgatggtggaaaagttgcccttgcgattgagagaaagaga

SEQ ID NO: 235269 - DNA, 908 bp, Cannabis indica
caaaacccgtagtcggtgtctggatttgggacccagccctggactcgaaacctgacaaggactcgaacccaaacccggacttgaacccaatcccaaaagcaaaagtggacccgaacccgtaccctgtgacaaaaaattggaaccaaaaccggaagttcaccgggattggaactaggacttgcatttggaatcataactgagattggacctagatctagaaccgtaaccgaaccaggacccggactccaaatcagacatcaacccgaattggaagctagacccgaatccaaacctaaacctgaactcgggacccaaacctgaacatgaactcagatccaaacatggaactagagtagggacacagaatcagggtccggagctaaaaccgcaccccaatgttggtcctaaacccaaactcagaaatgggacctgggatctgaaccagaaccagaccgagacccgtgacagtgattcagatctcgactcgggatgcgggtaacgacgcctagaacagaccagtagtcggtgtctagatctaggactcagattaggaccagaacctagacgaagaaccaaacccgaacccagacttagaccatggacccaaaattacaacctaaataagaatcgctgaaccaggaacctagaacaagactaggaccgtgatcaggaccgaaacttggacccgcactcgggacccgaacttggacctgagcccgatcctagacccagatcgaggtccagacctggacacatacccagacatagacttgaacctggacccagaatcgggatagggacctgggaaacagaactaagaccgcgagctagaaccctacccagacctgaacatgaacctaggatccagctcgtgacccggaaccagaaatggaaccagactgggaccc

SEQ ID NO: 235270 - DNA, 1638 bp, Cannabis indica
aaagaattagaatcagcatagaaatttcaaagcttttatttcaaaggatgaatttttacacaagatggatggtccaatctatagtgccaaacggtttcattagaaatcttagaatctgaaaaagatgcagaaatagaaacaaggtttttattacagctttgatcacaattcaggtagtacaagttgtcaaactttctacccatcccaatcaccttggtcttggaagtgtcctgaatgacacaattatcatcagaaaacaagaaagtgcaattagttgtggctgttaatgaattgacagacaacaaattacacttgaaagtaggcacatatagaacattttcaaggataagctcaggatttaaatgaactgttcctatgcaagaaactttagcatgcaatccattaggcatcaaaacattttttaaattggtattgacactggtatttttgaatgaaagaaaatcatgacacacatggtgtgttgctccggtgtcaattatccattgagaattatgagtaagggatttcttaccagaaaaatgagagactacaggctgatcttcagaaacattttgagtgctgttctcagtggctttttgagcaagaatggccataagtttctggcattggacactggacaaactagagataagatctctttccattgaaggctcctctatttttccttcatctgctcctaagaaattaacacctgctagttttccagcatttcctttagcatcacgattaagaaattcattccacagtgtgtacaattgtacttagatctgaaaggttgaatagctccagcaaactgtccattgcttcctgatgtacctttatcagaatcagtagaattgttgaatccactagtcaagtttctttgtctttcttcctgtataacagcagcgtaagctttgttaacgcttggaagaggatcacgcattaaaatctgagacctaaccagactgtaggaatcatttaatccaaccaaaaactcgagcaatctgtcctattcttgatactcttgcatcaccttcattgtgccacaagaacaaacaggtggtggtcgatactctcttatctgatcccaaagagctttcaatcgagtataatatgtagtaacagagttggatccttgagtgagactttgcatcgtcttcttcgcttcaaaaattcgaggcgcattcttctcattgaaccgttcgtgtagctcagcccaaatttcagctgcattatcatgatacatgatactgtcagcaatctcatcagaaatcgcgtgcaagatccatgaaatcacggtactattgcatctacaccagctatcgtaatcatcgtgatcctcattaggctgtggcaattttccattcacaaacttaactttgtttctagcaactaatgcaatcagcatcgaccttctccaggtgttgtaattctcaccgcccttgagaattttaggaacaagaacaacacctggattatcactattcgaaaggaaataaggattcgaaagatcattagcagttgtcgatctcgaattttctccaagcactaagaacatattcgagttgagagaagtattttcagcttcacgattcgcacgagtgtgaactctattaccacggccttgagctccac

SEQ ID NO: 235271 - DNA, 542 bp, Cannabis indica
ttattatagtcttttaataaaaacaactttttttaaaagttgggttgtattagtgttagcttttaactgtagcttcttcataaattctttaataagttatttttaaactgcttactaaatacttttttatcatagtttttttttaaaagtagcttttaacttttccaaaaactgtgttaaactggcccgtaatactctcagcaaaacaagaacaaaattttaatattgtaattaataaataatgtttaaacttttaagtatatacaaacaatttatcctaggaatatcatttttatcctatcaatgtaggaatgtttttatctttagccctttaaaaaattataactaacctttttttatatgattatatacattattctattgttttcaaaaaattaaattagaatgattgattacgttgaaaaataaagtttaaatattcagtagtatatatacgtacaaaaagaaaaaagtacgcgtacaactaatttttttaactctcttttgtagattataaaattattcataattttttaaaaatt

SEQ ID NO: 235272 - DNA, 1078 bp, Cannabis indica
attatatataaatttatgtttacgcagaaatttgacctgataacatggacaacacttctgacacgtggtaaaaaggaaataatcatgggccctaaccaccgggactaaaggtggtcaacttgggcattagaaactgtgtcagtgctctagttgatagtaatgggcgctcaagtagggacaaagatccaatgaagatgtttttagctaccatcatttgaaaaagttcaagtgaacaggtcatagttaccttaaaatgataaaccatgaagctaaggatgtcacatgaacatccaaggactcaacctgggtctaacttcagagttgggcgcctaggttgacatcctatgtgcagtcttggatcagcctaggtccttggggtccgtttttccttaatacaactccatttgtggcattctgaagtgtgacagtaattgtgcttctatgattcttttcacacatggttatgtgtcctcgtcttctaagttggacataattccattttgctcttattactctttttcaatttctatagttctcaaaattaaaaaagaagttgaatatagagtgtatatgataaagaataggaaaagatgtatagaggaaattacttttttacaatatttgttttgtaattaatgtgtgttgaggtgtttgttgctctttgatttggagtgttttttgtaattaataaagttcttcttcattgaaaaaaaactaattgacaaataaaatttaataaatttttaaaacaaacaactaataaaaatatataaggtaagacacattaatatacaaagatttaaagaatgcgccgctaagggcatatccaatggagaaacttaaatttggtgttaaattaacatcaaaaagttactattttaatactatttttttttaattccaaccactaacactaaaaattataccaaattttatattttttattattttattattataataatattttaatgttaaatatatataaatttttatttttttaaaagtattatttaattaataattttttttttaaaaaaatagtatagtttaccgtggctcattaaatttagtgaga

SEQ ID NO: 235273 - DNA, 3159 bp, Cannabis indica
atcagaagcaattttattttatctaattatcaaaagtatacaattgtgaagagacaatatgtatttctagagttagggagaaaagttagctacataactctagttggagtgggcctgctcattaaatgcgtcagtcaactagaaaagcccacacttctgcttcacctagactttgtacacaaatgctaagcctagtgacgtacccaagatttaaaagtgagcgaggcgtaattttttttgtaaggcatcgggccaaagtaaacttagaaaaggaaaaaacaacactttttatggaaattgaacatttaacctctaccctatatgtaatgtagtttaaccattacactaaaactaatattatgtttataaatattattttttattacaaatatatgttgtaactaactaaattgcatatatattattttctcattttttttttatcaaggaggcgactgccccgtctcgcctacatgtgggtccgcccttggctaagcttattaactactgatattcaacaatatgggactaaaaaaaaaaaaaaaaactattcaatcaatccaaatttcaataaaactaataaaagttaatgtaagcacaattaaaaatttaatatttaaaccaatgcaatttactctataggtaaagaataaatagttcatgctctaaatttattttaataatatacatacatctatataatttttatttatatatttatattatatatatgttaaaaaattattatttagttggtgtagagaataaaattaatattattttaataatgtaggaaaaatataaacaagatgatatagatgtaatttgatgtacaataaaaaaattaaaattttggtgataatgtattttaaaagatggagttggagtaaagaagctgttgatgttgttgttgtttttttgataaaaaagaagttgttgtttttataaataacaaaacgtggacaaaatttcaaatataaagaggtaattaatgataaaaggttaaatgtcagaagaccaggtcctgataaaaataaaataaggtaatgggaattttttgtccaagtgaaaaaatgtcacaagtaaagattaaatctgttaattaaaaaaaaaagtaaagatcaaatatctatatcatatataacctggtttgtatgcctattcatatgaactgtgtgcgcttagtatagagagaagaaattacatacgtcgttactctcatgttcttacatcatttgtttttaactattagttttatgtatataaatcttcgacacgtcaaaatcaaatcacgtacaatgtttcaactccacaaaggagaacaacgttaatataataatgttattttatatttatattatatatatacacacactcaagaagaatgtgataagatctctcaaataaaattaggacaaaatgggcctaccccattttgtttttcttcttataagaataaaggtttcttataaaataattgatgttggtgttgccttcattccctatagacataacacaatagcaatgaatgtttctccctatctcacttgtgacactgtagtagaccattaatgataatattattaataattttatatgattttcgcagaatataaaaaaagaaaatgaatttgtagaatatatatttcttattttctttattggacatttttatttgggaagcacaaccaactcttaataagggctgccagcttcacatgtttttgtcacttttcttctttttactcaaaccaaagcttggtgggcagtggactccaatcccacatgcctctccatatcctgtcggtggagtaattatattaaaccccaaaaattaaactcatatttaaaattattattagcagcagtagtactgtgtagtaggtataaaaaaacaaataataataattatccatttgacccagtttttagttttccctctagtgtttctttatgtaaaatatttgtttatcaaataatgcactttttcaatttcctgccaaatgtgtatcaacctttttgattagctttatgattatcaccatcaattcaatacccattaacataatttggtttttagtaccacaaacgttccatagtgacacgtggtgagctatgacagggtaaaatagcttggaataatgaccattacccaaatatgattaattacacacgtgttagactagtatagagcgagggataattattttttctcttgttcaaacaaaaaagtaggaatctctttttttatttttaaagaaaaaacttttaattttattattggtttttcagaacttaaacgcaaaggaagtgatccataattaaaatataattcaagattgatttaatttttttttgttttataatcatccaatacgaaaagataacttggtgaagtctgtgagtgaacaagtttaataccatatttgtttggtaaaaagcgtacaaaacgaaacttattaattttcaccaaaagaatggaaactaattattgccgaaaccaaagcaaagaatgtatggctaatgaaaacaggccacgtggtggaccatataaaatagggtccatggttaaattaggcaatgtacaagtccgtgtgggggcaggtgggaccagcccacttcactatataatatatatataatactttttctattataattattttttgggaagtgggacccgattcgagcatactgatgagtgatgagatgacagtgacatttgtgaaagagaggatacagctggcagttggtttactgttgtgcaaaagtgaactgtgaaccacacaacacacaaaattgagagaaaaatctagctactgacctatttttctattttgattacaattgaccggaattgcttttgattggtggaaagggtaatagggggcacagcctggagccagctcagcaaatcccaccgtcaagtcaattacctttcgttgcaaaaggtattttgtacggaaaccagccgtttatatattcgtttttaattgtttcactctctgtggattgggtttggaccaaaaagggcaaagtttaaggcttgtaattgttatgggcttggggtaatttgccttctaatcaaatgattgggtagagtccaaatctggaaacataaacataaaacagttttaaattcaacaaattatattatta

SEQ ID NO: 235274 - DNA, 1172 bp, Cannabis indica
ctccctgatctatcaaccagtctaccttagaggatctctaatgagatcctagcctattctattggttttctggttgaaccgccaatcaagtcgctggcctctctgttgcggaaatctagctccgcttgttgagatcaaaggatgtactcttggtcatccatccaccttaagaattcacgtctctactgagcgaatacattgcactcagcagtgtgtggttcttccattaggccggcttggccgacggcttctctaagtctggcaaacttgagattttctccctagtccacatagggctcgccaattgaaggctcaccaactcttgaacatgtctctccagcatagtaccggatacaagatccagttgttagatcttgggggttgtcgcccaatagtccttcctttagtgggaggcaccagtagtggagggtcctccctttgaggaaagagcctgctatttagatccaccgggatgttcatgtcactttggccagctgtagtggccagacttgtggtgcctattgtggtgacaggattgaccacatcagcattgttcataggaattctagttgtggttggaacacgaacattaggatctgcagtttgtgagtcttgagggagacccaaagatgcagatggtgcaaccagagttcttctcatcttaaccatgtaatatccactctctcttaatggaagcaccaaactattgaccttgaaaagtggccaactgacagcagggtcgtatgaatctgatgtttgcccgtgttacacaattagaattcaaaagtaaagaacacaaaaaaatttatagaggttcgacccccttagttagtgggtcatgacctattctccttttagttgtactgataccaatggataatactattaagatcactataggtgggatctgatatagctcccttaaggatacaaagtaggaatcaaagatggcaaatctcaaatgttgagaatactatatgggcatgtagatgagagagagtgaaggagagagttatcagacttagagacttaggcttagaatgaggcttagcacttaatgactttgaggctagaattagacttaggttttctaggttacagttaaggccctttatataggagagcttaaatacctaatttacaactagaaatcctaaagatattttgtgtat

SEQ ID NO: 235275 - DNA, 1428 bp, Cannabis indica
acatcttggtggtgccgggatgtagggaatatggagtggtgtgagcctcttcaagaatttcatttctaagtttcgtactacttggaacacaaaccctggtcttgaataacagcatcccactatctgacactgtaaaatctttggcttgaccagttcagacatcttctctggtctttactaactctggatcagttagctgggcagctttacttcactcaaacagatcagattgcatcgtcaagttatgaagtttgcccacaacaaactcgatggttgatctgaccatgtattctgctaattgaggtgaaatctgaaccatactagttacttgtccgggacccttcctgctcaaggcataagccactacattggccttccctggatggtaaaggattccacagtcgtaatccttaaccaactctaaccaacgcctctgtctcatattcaaatccttctaagtaaagaaagatttgaggcctttagggtcagtataaatttcacacttctctttgtagagataatgctaccaaattttcaaggcaaatactaccgtggcaagttttaagtcatgagtcgggtaccgctgctcataatctttcaagtgacaggagggataagcaataacccaatcatcctgcatcagtacacaccccagacctagtctggatgcatcacaatacaccataaacttctccttatctgaaggtagggctaacactggagctgtgatttacctctgtttcatctcctaaaagcttgctttgcacttatcagtgcatacaaaacgttgattctttttagtgagctcggttaagggtgttgaaattttggaaaacccttctacgaaccgacgataataactagccagacccaagaagcttctaacttctgttactgttttcaatctcggccaatccctaacggattttatctttcctggatccaccttgatctcgtctttgctaacaatgtgctcaaggaaggacacctgaggtagccaaaattcacacttcttgaattcggcatataacttatgttctcgaacttgttacaaaactattcggagatgttgctcatgctcctcttcagatttagagtacacaaggatgtcgttgataaatacaataacactaatatcgaggaaatccttgaacaccctattcatcaaatccatgaaagttgcgggagcattagtcagtccaaaagacataaccaaaaattcataatgtccatacctagtgcggaaagctgcctttggaatgtcctcctctcagattcttagctgatgatagcccgatcaaagatcaatctttagaaaattgtcttcccctgaagttgatcgaagagatcttcgatcctaggtaaaggatatttattcttgattgttagcttattcaattccatgtagtcaatgcacattcgcaaaga

SEQ ID NO: 235276 - DNA, 578 bp, Cannabis indica
ccacacgttttaggtcctcattcaaaccgaaaccacttgctttttctaatatgttttaaattgcattgaattgtttctttattatcttgatgcgatactcaatgtggggttgtcctttcaatccgcaatgagaaactttttcattcatctatctttccaattgttgtagatagccagtttgaaagttccattgtctgctctccattttcaactatttaccatctccaacaagcactcaacaagttttaaatcctcaattgaagtccattagtgtttttttttttctggaatcaatgttgcttactgcaaagcatctattttcctaagatatgtatatctcacatctacttgtttgtgtagcaataaatatattaacgtacaaaaataaattaacaacataaatatataaatttgatatccaacacataagtctaaaactaatatccaataatataaaaattcatacaagttaagcacaaataatgcaaagaaatgaaatatccaaaaatataaaaatcgatacaaattcaagcaaatcaaacacaagtactgtacagaaacacaatctaagtatgcct

SEQ ID NO: 235277 - DNA, 1776 bp, Cannabis indica
tcaaaacaactttttctaaaagttaggctgtactagctttagcttttaactgtagttttttcataaattttttaataagttgtttcttaactgcttaccaaacacttttttataacagtttttctgaaaaacagcttttagcttttttaaaaactatgccaaacgggcatgtaagactctaaaaatctataatgacacacagtaaaagattttaaaaaatcactaaatattacctttataatcacccacgttaataattcacaccgaaaggtccctaaaaatctttagtcatgggggtcacaaaagcttattttcgtagtagtcatgaatattttaacaccaagggagaatggagagagtgaacattttatattgagaaaaagtcaaagagagagtccagaaataaagtggggtacacggtcatccaaatttaacatacaagaatacaattacaaaaaaggtgccaagtggcacagaacttaatcccctctcactaacaaactgacatgtttgcaaataaaacatctccaatagttatgtgtatgttaaatttgcttgtagtgtttaactaagttgggcttgggaaggcattcacagtaaatccaccatcaatacttattatttgacctgtgacaaatgaagcagcaggcagacaaagaaaaaccaccatagatgaaatctcattaggctcagcaagtcgtctgattggagttcgatcaataaattcgccgagtgctccttctaaattaccatcttcctgcattaatgataactaaatatgagttctaaaataagtaaaaaaataattataaataaggaaccacacatatatgttgtatttataaaaagacaatatcctttaagtgatatgcaatattaatataaaaccaatttactttaaagagtaagtagatatatatatatatatatacactttttcattatgtcacttcttttgtgtgagcatgaaaagttttacccctaactgattgataacacatatatatataaaaggaaaatttgcggcataaatgctcattttgtttattttgttgctaataagtacccaatttttaaaaattacggcattaatactcaaaatttcactttttaaactctgccgttagtacccacttaacagagtaatataaggacacgtgtactgtcctcataatttctcttttttttcttcacttaattaattaacaaaatacataaaactaattaaaataaaaatatacaaatcaataatggtatgataaaaaaaaaaaaacatccgctagtacactcctccaccatcacgatccgacgttgtagggtccggcccacaaaagaatttctggaagaaacttcgtgcggcgagaaaacacctgtgtgcgtagactaataagtacccaatttttaaaaattgggtactttagtggattcaaaatcattctttttattaaaaaccctattactatccaatcccatatcaaacttttaaaaactttaaattacaaactaattgtcacatttcttaaaaataattttcattaccaaattgaatatttaattagctcatatttacgattttaaaagaagtaaattatctgcaccaaattacaacaaatatcacaatgagattaatttttcgcgagaataatacttaagttatatttttagaactctgtaggtaccttatcattaaatgttaagtcattatgtacgtatcattttcttattagtatattttaaataattttcttaaaaaataaaaatttattaacttggaac

SEQ ID NO: 235278 - DNA, 797 bp, Cannabis indica
atatgatgacgtctctttggcaatcgaggaagggtgtttatgttaaggaattcaatacaaataagtatctttttcaatttcaccatgaacttgacgttcaagccgtcattgatggtagtccatggacttttaatagaagtccattgatttttcatcgtctgaagaggggggacgatccaaagtcggttagtttgcatcatctcgacctttgggttcagattcatgatctgaaaacagggtacatgcttgaaagagtggtttgtagggcaagggattatgttggaaaacttgtcaaggctgatacaaaaaatttcgatggaatttggagagaatatcttcgggttcgggccactattgacattgaaaaacctttgaagcatcggatgaagttgtgcgaagagaatggtgattgaaaatgggtaaattttaaatatgaacatgttccaactttctattttgtatgtgagttaattggccactccgaacgcttttgtcctcgaaggtttgatgaatcttatgatcaacttgtcatgtcttatgggatcggtatgcgagctcaaatgaaaaaaaattactatttgataagggctcaatggctacggtcaggtactgaacaacccgagccagtcgacggtggcaaacggggtagtcgtcctggtgtgaaatcttctgcaactgctgggcctagaatcatggagattgattatgataaacagggagaggagattgtgtccatgaattcaggaaaaaataaaggtgtgatattggggcataatgacaataatggagatgattct

SEQ ID NO: 235279 - DNA, 877 bp, Cannabis indica
agaagaagagaactcatgggaccgagaagaaactttgcaaatattcttcatgggttcgaactcgtccacgaggtgtaaatttttaggattttaggctctttgcaaacacaactcctcattcggaccatcaccattttcttcttctttgcacaataatggtacctagtttctttctcactcttcgaccctcttctttctttgtttttgtttatttatttccattttttttattttaattatattttaaatttttagcttaatcataatgagtaatgaagattaattagtcctagatttgacgtggagggtggcatatgatatggaaatgttaactttgtgccacggatgagccatctagaaaataacagagccagaccaacgaaaggggtacagagaaaaacaattttgtaatttgaggagttcagcccctaaaatttaagtctaggggttgatcgtgccaaactccaaagttcagggagtttggccacaaattacccaaaaaaatggacataactttaaaataaaaaagattttaacaaaactaagatagatataccatgatatttaagtaatatgtttctaattctaaaaaagaaattaaaaaatatagatttttttttatgtagcaaaaaataatataagtaatcaatagtgtaaaagactatttctctacaagttatgaaatgaggatatttacttacataatgatatgatttatggtcattagttatactttctctttattattttgaatctaatttaatccgcataataactcaaatctaatccaatctaatccgtaaaaatgcgaattcaatcagttattttagatttgttactttttaatatagaataatttaatatttattaaaaaata

SEQ ID NO: 235280 - DNA, 576 bp, Cannabis indica
tatctgagatagctgactcgacaaagcagtgcatctcattgaaagatgtctggagttgattagtgaaggtaccatgagtatgccttcctatagcaagatggatgcctcgctatccgtcacttaggttcttctagcattttatacgtagcgaggttggtgcctcactttatattactgatgtcatccttatgattgtgtcttctgacgcgaaatggtttctttcaatgcgtgaatcaatagttcgtacatccctgcctcgcttaagactatacagttagcgagttatagatatgctctactaactctgcatttaatgagttattctattttaatatccattaatatatttgccattatatttgttgatttgaatggttcaagattgacatgtgtcttcctctgaagtgccagccaaatttcgggtatatcacctaaaataataaaatcaacacataagagattatgaatccttacattgatggcagcataataataatgactccttccatttagatctctattccttgattcttgtttgtaggagagcattataaagatttaaacttggatcttctc

SEQ ID NO: 235281 - DNA, 2023 bp, Cannabis indica
gcgagttaaataatttggattagattaattgggggtttcttctgataataatcaagcatttcatgtgcagttgacccaccccaatttcgtatcacaacactataatcacttcttgtgaggacaaccaccccaaaaatcacgcccgactttatcatcaaattattagcttatatatttatgcatatataataatataagtaataatctatctagctatatctaatcattaagggttggtgtaaaacatgacacattttggtatatatataaatataacactgcttatgtatacattattagcaaataaagcctaattatagagggaatcatagaagtaaaatttaatttttctaataggtaatacattaatcttacactatatgtatgtgctagctagctagggattaattaattttatttataacttaattagtaatttatgtttttaatttagtgtatttatttgaatgcgtccaatttggaaacatccatatctcattaatttctacaatattgggagctattaatagtttagtatatccgatgttgaatgaagtaattgactttttgacacattttaaattaaacttaattatacaactctcatgcaacatgcggccggttatactatacatgtccatgattgtgtaatagcaaccacaacaacgatggtacaaccaaaacaacaatattggatttagagccattccaatataaaaatatagatttaataaattttaattgtaatatatattgactaaaacctgtgaacatgttcaaatgtaaagcaaaaatagaccgatcaggtataaaaaatcttaaaaatgaaatatgatcactcagttatttacttatataattaggattttcgccccctaaattttaacatgtactaaatcatgctctctgaacttttctggccgttaaaaattctccctgaactattgagattgttaaatttaaggaacttttatttaatttcattcaatttactattttagtgattgtttatgaactttgatatctaccaaataatcatgccctcgaacttttacatgtactaaatcatgtcttcttaattttcatccatgttaaacttttttttactaaaattaaataaaaaattcttaaatacaacaatctcaatagttcacgagacatttttaacaatcttaaaagttcataagcataatttgatacatatcaaaattcgagccataaaaattactaattaacctatataaatatatagattttatatatatatatatatatatatagagagagagagtttgttgttcatgtatactattcgggattctgttcagattacaatgaccctatatatatttatgggaaaaataatatttgggtagggataaaggttagccaaagttgaaactacctctctagagatagtagttgtgcggcttagtgggaacttttggtgtacatgaaatagaaagcaagcaacgataaaaatattttatattaaatgatggacggtgaccttataaaaagggttacctagctcacaataaattaaagtaaataagagagtgatgaagtagattgagtgaagcaaataattgaaaggaatgaaattggagggtttgatgatctaataagtgggttttgtggagagatcataataatagattcttggcgtgaggaattaaggactatgggtggtgaggggcacgtaaggaagggccaaacgccagcatcaccagtagttagtgacccaaagtaaagcatcaaataattatatacttgattattattcattttcttatttattaatttgggttctaataataacaataatacatgaatgtggattttgtgggatttggttggtaaaattaacgtgggctgtgccttcctattctcaccttcttgcttaatttctggcttagctaatatctatccacatatatatatttccactcctctttgtgtgatcttaactcttctcctactactacaactacttctccacctctcctttattattgaaatt

SEQ ID NO: 235282 - DNA, 573 bp, Cannabis indica
aacaagcactcttaattttttatcattagagatgctcttagtggtcttttttttttttttcaaatcacaccaattataaaatttatcaaattactaaatcatattatgagttaattgattagtggggttatgaatgacattttgtgaatgattagtaatatttaataataattattaaattaaaatttatcatatttaattattttaatagtagtatgatacaagcatctccaatagtactttttaatttttttagctaaaaagctaaattttaagagtcatttttattgttgttgctctaatcatacttcctagtttagttcatatttaattattttaataatattttataatttgagtttatcaaatataaattaattgtataaaataataaaaaaaatatagtattttttattaaaatactattaaaaaatattagcaaaaaagtaaggagctccttacatttagagaactccctattatagagagctacttttggtatggttggagtcatggccgaccagagggtgggcagccggggcctaggccttaggccccacaaatttggaggcc

SEQ ID NO: 235283 - DNA, 1610 bp, Cannabis indica
atttgacaagatgtgtcaagaattcggaattactaggcatagaactatagtgaagatcctaaagcgaaatggtgttgctgaaaggatgaatcaaaccttattgatcaaagttagatatttactattcaattctgggttagaaaaaacattttggggagaagccttagaaattacaacctaccttttaaacaggagcccaaatagagtaatagacctaaaaacaccttatgaaatggtacaacaaaacccccaacctaacgcatttaagaacatttgagtgtacatcatatgtacaccaatctattgacaagatggaacctagatccgtgaaaggaaccttcttaggttatgcctatggaaccaaggggtatagaatctatatttctaaaaatggtaaaccaaaggttgtgattgctagaaacattgttttcaatgagttagaatatccttacttgacctccaagaagggtagtgtgtctctgtacgttacaagaaaaataaaaaataaagacacctcaagtgtggaagtggagtacggaataaagctcctgaaaaaagtttcataggcagaagatagtgtggaaccagaggacaaagcacaaccaaaagctattgtggagctagaagaacaagataacgaacactaaatagaggtgtcggaagggtttggatagacaggtctggaaagttattagttggctcgtgatagaacccagagagagatttatacttcggcaaggtttgtggaagcagacataatagcatttgcacttgcgccagttcgacatactaaagttgaagagcccaagctatgaagaggcaatttcaagaggaaacaagtataaatggcttcaggccatggatgaggagatggattcactacggatgaacaaaacttgggtagttgtgccaaagtcagagaacaagaagattgtggagtgtaaatggattctcaaggtgaaagaggaaatcaataaggatgaacccacgaggttcaaagtcaggttagtggctaagggctttactcaagtagaaggtataaactatactgaaatcttctcacttgtggtaaatacaagacgataaggctgatgctgtccttggcagcacatttggagtttgaagttgaacaacttgatgttaagacttattttgaatggattcttggatgaagagatctacatgaagcaactatctagattttaggtggaaggaaaaggagttgaattggtgtgcaagcttaacagattatagtttgaaatagtctccaaggcaatggaataagagattcgatacatatatgtatcaaattgggttcaaaggagctgcgtacgatcactgcttatattttaagaatctagaggaatctaaagtcgtgttcttattgctctatgtggatgatatactcatcatgagcaaggataaatctgtaatcaaaagtatcaaaaccaagctcaaaagagattttgaggtgaaagagcttggaccagttcaaaagatacttagtatcaaaatctcatggaaccggaaggaagggactattagcctaaagcagtctaggtacatctagaagattattcagaaaagtagatatggaatctatatctttt

SEQ ID NO: 235284 - DNA, 7386 bp, Cannabis indica
gtcgcctggaatgagtttccaagatcggatgaatcttataaaatttgtgtcgtctgatctgtgttctttcatactggataagaattaaagtttaaaagcaactaataagaaatcgacattgttaggtttattagatctcctacagatctcaaccctccatgtctaagcagttagatatgtacaatcttccttagagccttacaacactgtttttcagctttcagttttctcttacatgtgaatgatatgttacctgaataatgataaaagtttactatataaagtgaaataattcattttgaaattatttttgagataaataatataaatagtatagaaaatacatataattttaattaattagagagtaaccacaacattttaattaaataaaattatagattattcacctcatattgtttttatttttaattaagagtggtaaattcaactcaaactaatgtctaaaaaataatctggaatttgaagaaattaagaacatgtattccttttgcttctattagtgtcaatggaagctttggcttgctgctttgagcataaagaaaaataaaaatagtgaaagaagacaaaatgaggaaatgaattaaatgtgctctggctcttgaattgagctgagaccttttaattagagtttggatctgttgaaaataacaagaagctactaactaattttgttagagctgaaatatagggaatacaactagactaactaaccaaggtggttagtaagctaactaactcagctaatgaactctaagcttaaactaatcacacaatgtactctatcatgtcccttcaagttgacacataggtgtaggtgtgcaactgtcatgttggttttggccagaagatcatgaacatacttagcttgattcaggtaaaccagttttgtctctaaaaacttgaaaaccaaggaagtagctggctggaccaagatccttgagagcaaattgatcatggagatcagtctgattttgcaacaccggttctagcttgagaatccataccatcaacaaaggagagtaaatatctcttaacaaagataaaattacatttctaaaaaaggcaaagagagttgataacataaagatttgtgttgtattctgcaaagctggcaactcaaaacgcttggttcttcgcctctcgggtgtaagagaactatatcatacatatgccaaattcagttacagaattagtcaccagaaataaaaggttgtgaaatgttaatgcaatagagtttaagttgcaattttgtgtaatgaaaatcaaacaaattcaagcccacattctcagctagtaaggaaaagatgttgaggaaacaagctatattcctcaaccagagtgattaccacaacaaattgagaaaaattgtttcaagggctttcacaccagatgcctttaaattcattgtctctgatatagagaccttagccaaagactctcttcatcatgggaaggtcctttgattaatacttatcaagaaatgaaaacagttagtactctcaaaaaacttcaatttcattctttcatggtgaattaagagactcagtaattaatgtttgctctgtttgttttttgagtttcacttttaatgttgcactgttatccttatttagaaaagatgaaatcttgtacagagaagatttgaaaatgtgttattacatttacatacttgaaaagggttacaattcaatgcccataaatccatgaaagtaaggaaagagcttgcttagatcttggctcaaattctctcaaccagaagacagaacaaggaagaagaacacaatgaccttttggggtctttcatggggaagaaagaagggttacggatgaacagatcactgataacatcattggagttatattcgcagttagggacactacagcaagtgtattaacttggattcttaagtaccttggtgaaaaccattccttacactagacatgggagatctactttgatttcttggggaagagaagtcacattgtgctagctcaacaccaacaaagaacgactctttctaacacctagggtattactcgaattctgaacatttgagacttggaaaataaccctttgggacttggaaaactactctcagccaagtgactagcttgacttgatgacagattctcagggtaactttcttcttgttttgatgattgagaaaactctttattattagagtttccagtgccaagggcagaggatctaaaaaagaatagttcttcatgtgcaaatcttaaactaagactgctaacaaggtgtcatgaaactctgtgaatttcagttctaatctttactcctttttcttttcttttaaaaggggaagaaattagaaagagggaaagagcaatacacacacataatcatcattggaaatggtagttggctggaaattaaattgttgataaaattacatttctctctcaactttatgttatcaattttagtcaacacttcataatttgggtacttcgtagttgatattttgtataccatgaaaacaaaaagctacaagaaatgatttcttcatttatataaatagcattagtttgatagtagtcaattgtattgtttgattttgacagtttctacgacataaatctaacaacaaatattgttcaaagaaagaagaagctgtgaaaagagataatcaaaggagacggaggagaaaaataacatttaattgtttttataaataaatatttatttcttcttcaatattattaaaaaaatatattataaataatcctatgcaactcaagattaattattatccatacacctacacctattacaatcatgtcctatattacaatcatgtcctatatttatatttggaggtccaatgacagatttctttctctcacaaaaaatgcaacatatcattttttttaaattaaaataaattatgatatagaaaaagagagataaaaacagtagacatagcatgtccctttattgctaaaaaggcacatatggtgcccaatactattcgagggtggtatattattgagcaccatatggtggtcacttttatccattattgtttatatgatgagaaaaaaataagtaacaaaagaaactatccttaaaataataaaataactaaaactgactttacatgtgacaatggatgaactaaacataatagaaagaaaaagctaaatcatagtatgagagttgccacattggccggtggaaatcatattgatgcaatcaatagtacccaatgcaactgtgcatcagattgtagaaatgtcaatgttcatacttcaaatcggttgaatcttgaatatttcctcgcaaatgtacaacacctttgatgacatgatatggggcttcatttttgcttgtgaggatccatatgagggtatagtcccaaaatgtgctcctccatgaagtcgtgcctcgtcaaaattcccacaattggatctgtctgtcattcgtttccaaagtacacaacatttaacactaatttatataattatatatagagagagaagaatgtgaaaagcatataatacctttttggctccttggcaccacgcacatgtgcctgagaccaagttggcgaaagagaatggcagctttggcaagtgacatggaatcaaccactgtgtatggagatgtgtttgtaataggatgaagatccacgtacatctccatctcctcctcttcaatatcaatatcctccaatttgattcctttccctgatcctgcttttgcaaaatcagacgcagagaaccttcctagtatctccctaccacacataactttctcctttgtaaagtttttcccctttagcaaaacaagcaaatgagacctcaacactagaccacacaactctggagagtctgaaaaaggcggttcatcaatcaccggaaacccattatgccctgttatccttagcgcatgtagtatagttcccaccttttcgatgccagaaaaggttattaacggacaggaaacaacatcacctgcaaccaaatgcctcatgaaaggctcagaatgagcctccatataaggcaatccctttattttcaagatttggtcatacactcccttgttgaagcaatcacccacagttttagatattagaagaacaagcatcacaagagggagcaacaacagatcatttgtaagttcaagcagtatgatacacaaggaaaccgtcattctcattgtgccgccgaggaaagaggctgcaccaagtaaggcgaagagaccagtgtccaagtgagaggctgtttcaaagagtcttccaacaagtctgccataacaagctccagcaagtatgactgggataaaaagtccagaaggaatagctattccataagttacaattccaaggaagtaaacagctgcaaagaagatgaagagtgaggatatctggaactcctttattgtgcctgtactgacgaggttgcgaatagcatcatcgttggtgtttaagaaaagggaggcaagatcattgtagtggcctggtggacactggaaggccttatagttaccagaataaacagtagggcagctaactgtgaggccttcagggcaagggatgcacttggcagaccaaggcaagaagaaagagcaacatgaagtcaaaatggctatggtcataaccagtaagatttttgcaacaggaccttttctgcaggtaaatcaaagaatgcttaggattgactgatattatagtattgtttcttttctattgaaataagagatggggatacatactcattaataatgctataagttcgaactaccttgtccacaaggtagttgtagagacttccaagtaagcctccaataacaccaaggaatatcacagctaaaatatcagaggcactaaatattgcttcagctgagcttacatcgtacatgatcagacctcctagcccgaatagaccacattttcccgtagagcaaaattgtatgaaagctctcattactatagcaactactgctgttgtgaaaaatgccctccaaagaagtgctcctcgccacctaaaccaccattgtccagacaccaaacacaaaccaataaatattccatttatttattgctattaatattttttatttgagaagcaaggtatggaagctatgtaccaagaagcagcctcctcaagggcaaacagaacaccaccaacgggggcacgaaatgctgcagctactccagcagcagcaccacaagtgatcaagtctcgtcgatccctatcattcttgaagtatctcagccacgaccatgtcaaatgatacttgcgtgaacctccttgtccaagcagagaagctatgcaagcccctgtgtgtaccataggcccttctttacccaccacaaagcctgcagagactcccaaaatggatccaaaaatcttccaaatccgagtaaaaccaagtaagaagtgggaaggagaattcaaaacagataagggatatgctaagactaagagaagggacttttcttgtataccttgacaaggagggtgcttggagcgagtattgaatgagcatcaataccattgagataggctttaacctctggaataccagaaccagctgcagctggagcaatataagcacataaagcacctgctgcaactgccaaaccaatgttgcaaccagcaaatgcagcaaaagccgtgtagtatctgcactcgaaccacttctattgtcttagttacataggacgtttctttagcatttagctcagaagagtaagatgcaatgtagaatcaaagtaataatctatgatatgaaaactcttcaatgatcatcaaaacaaatcaggctaaaaacacaggaaaaactttaatagataaatgaaatagtggagtcaaatttcacctatgcttagacataagatcagtagtcaaaaggagcttaaaatctgcaatattctcgactgcaatattatttaagaagccaactagtcctgttccgagtccaatgagaagagcaaatgcccacttgagtagtacatactgaaatatgtgtaccttcttctttgatctccaatcctgcttaaagagttcattttcagcaatcctgaaatcattttattattagcctcaatgaaaagaaagaagaaacattaaaaaaaaaaaaaacaattgaattctcgaatcagaaaaagaaaaattaacttcgaaaagagcttagcaaacaattccagttaataattccaacaaatgtcaccgtcagaaagatatttgccactcaaataacaattcattctcaaacacaaatcaaaatgtaatacaaacccaaattcattatataaaatatatcgttaaatccatcaacaaatcactaaatttgcaacaataatttcaaggtattttcctagaagaagaagtgggttgatcgacttactcataatcaagactctcgattgaatagagattggagccaactatggcaatttgggaagtagtgtttctcctcttcagcaaaagaggctgagtagtagagaagctcttatcatcggcatcgacagacacagatatctccgaccaatattgtcggatctccttcccattcgcatcccacagttctcgagtctccaccacctcacaattatcatcatcatcaccattaccattaccaataccatcaccatgcggatccatattatgcttcccctgcaaccctgcatatacttatcaccatcaaccatactcttcctttcatcgaatcgatacatatccatatatatacataattttttgacaccaaaaaaaataaaaagctgggatcaaattgtagcttgtgattctaaaattcaatttgtattcttctatttgtactgaataattaattttatatttttattgaacaaataaaaatgaagttgtgggattgattgattgattggtggtgtagcataacaaaatttaatctagcaaaaagaaccaaccagaatccatgtcaaaggatcattagaattagaatactaatttcccagatgccaacaaaatgaatagatacattttttttttttttgtcatgttatgaaatcaaagtaatatatagaaaagtaaaataaaattgggtaaggaccacatatgcctttgtgtcacaggatccttctttcatcataaatgtccatactaatataaatagggacacgttcactccacaaaattttataaattattttatttaatatgctaaattctaaatactaatcaaccatgattttggtcaaaattttgttcaactctaaaatttaatcttatttttaggggtgtttcattggatcacatccaatgtttttaggcctatccagatccgatccaatcatatattggatgttagatttttaccatccgatccgatccataatttcatcatcc

SEQ ID NO: 235285 - DNA, 659 bp, Cannabis indica
atatcagtgtgggccaccccacggtcaccaccttccaacaacatagacccagattgcacattacccacgttctccaccagattctcaatattttcattattagccgtgggccaaatctccaactccccaggcctctttccgtgatccaaagaatttttaaaagtggacccatcacagggaagtccattcggcccctcagaaacaactatagcctccaaagggcccacacggcccatacccgactgcccacatctaaacccagcttgactaaacttagcattattgctactgttgctatttcccttcggcccagacggcccaatagcttttgaaatgggcaaagtgtccaataccttgaagccctccacattacccaatggtctttcctcatttgactcattatttaaaaccaaaggatgtccagccttttctcctacagccaactccttcaaattaggcaattgagcaggagacctttcagctgaattcaaaatttctggagccataataccatttttagcatttcctcgtttcactccctcagccaccttcttgggaacccagcgattcagagtcttttgtcctttccccggagaaactcgatccgtcaaaatcatgcctcgtctcggtccacgttccacgttgatcttcaccttagc

SEQ ID NO: 235286 - DNA, 1526 bp, Cannabis indica
ttccaataagcagctgtagaatttaccaagtaaattcactgacttattattccttgttgcattcaccatagaacttggaattgcactctcagttatatagaatgctctatatgctccacgatatagatacactattagttatccattgttataatcccaataaagttatatctaccaacataaagttaattcttatgataaatgagataaattttaagtaaaggaaacagacaagcatgcctctttagctaccttatttaaataaaggataaggataaagttaaaactcatgatgttgcatataaaatactaaaaaaaatacaaaatatattacatctgaaattatctatgacttttgcaagaggaattaaaaataaggctaaagtgttaagtatgacattcaacatatctaaggaaaatgagtttgtggtttgtttgtaaatgatttaatttattgtacctatatatatacttagtaggcaaaattttgtgttattgcttagtataactatagaatgttatctgtgaaactaaaagccaagtgatgatgaaagattcatcttttaaggcaataggaaaacaactacacttgatgctataatgatattcaaactacggttaaaaactagttattttttagatttagaaaagacttatacagtattgacacctagacgacgttttggtttggaattttattttgaataaattaggtcattcttgttcatttagaatttcaaagtctttttcaatattggttctactagttttttaatttataaatttattgaaatttatttcataaaaagaaaccttataatttctcttgtggtacaaaacataaattgaatcatgagaattctattatactttagtataagtattaaggttatatctccgaaaggaaagtataaagacttacttttgatagaattcttgaccctttgattgaataaattttaaattttgtaaagggataacaaataaacaaaaagaaaccaagtgacaaaataaagtttcattgtctaaaaatttatgttatattttgtggatcttttctcatggtttcatggaatgatagtatcttgtctttagactaataaaatttattttattcataaaggcattaatctttagacgttgttttcttataaattttaaaccatagttgacaaatcaactaggcaagaaaattaaagttgttgaaactaactatggtggttaatactaccatggaaggtatgacgaatcaagtgagtaacgtctaagattattttgcacaactactaaagaaatgcaatttcgtcttccaatacaaaatgttaggcaaacctaatgtaaagtccttttttggcaagttagttgacaaaatatttttttcttttatggtaagattcttttgcatacatacccgatttcttaccttgtgttttcggcttttagttgctcttttctttgttaggaaagttgtacttttcagttgtattttcctttgtttggaaacttcttgtaagagaagcaatttt

SEQ ID NO: 235287 - DNA, 643 bp, Cannabis indica
taccttgagaacttggcaaatttatcagcagaaataaggactgagttgttagatgcatcactagtgcttgcaatattagtagaatatttttgttgatttttgaactgtaatttcctacactcaaacttggtgtgacctggtttcttacaataattgcacatgatgctcctagaatttggtgttcgattatcaagtctttgtgaattacttcttttgtattcacttggagtagagttttttcttgatgcagaattgttacgactcaccaaggcgctattaagaggagttgaagaggtagcttttgtgtgaagaccacgagtaaacacatcttgtgaagatgagacatcggaatcagagagaacttgtgactttgtagagtcaaacttagatgagagtgttgctagaaaactcataataaccatttgctctcgttggtgctgttgaaccttcacatcagtactaaatggtaataacacattaaactcttcatatgttttttaaatgccataaaataacttataaaagtttgatcttatttctccgctcgataaaaaactttgtaaacatcatatatgtgagatatgttgtctttgtcagaatacaaaaactcaatgtaatccattagttctttaaccaattcaca

SEQ ID NO: 235288 - DNA, 881 bp, Cannabis indica
caaagcagcagccataaacaaacaaaaagacttatccttattagtatgataaaaagcaaaaaatttagaatgtttccaagcttttttggcatgaggacatccaaggatagcatgttcaaccgtctccgattgcatctggcacactgggcaaacaggagtgggaataatatgcctgaaaaaaagagaggaagcaacaggaagggaatgagagatagcacgccaaataagatgtttaacttttggaggcacaacagaattccagattttggaccagaaagatttgcttgaagtaaaagaggaagaggtaggcatatcacgagattggagtgatagatggtaggcagatttgactgtgaacatcccagttgcttctggcccccaaatcatagtatcattgcaattatgacctgatataggaacctgtaaaatatcctccaccagaacattgtcaaaaaaattgtttaacttacctctatcccagcttccagaaggggaaataaaaaaagaaagaaatggtgagggagggctagacgatgaaaagtttttaaaccgactgccagggagccaatgatcatcaatagtacgaatatctgatccattacccaccttccaaataaggccttgtttaagcaaagcacatccccacagaatacttctccaagaaaaagacggtctatggccgggaactgcctccagaatggaagaattagggaaatatcgagctttaaggaccttacttaacaatgagtgagggtgctgaaaaattctccacgcctgcttagctagcatggcctgattgaaatgagtcaaagacctaaaccccagacccccaacaaacttagattgacacacacttgaccaactcttccaatgcactttag

SEQ ID NO: 235289 - DNA, 981 bp, Cannabis indica
tcgattatgatcgaggtaacatacggtcattaccgttattgagaatgggtaaagatacggtcattaccgtttattgtgaatgagtaattactcgcttaaaactacaaatagttttcttacttatcgattgctgtattaggcaacgatagtgacatatgtagctcgtggatgacgagtggtaagaatgctttatgaggcatcaagaacagtttgtcttattagacaaatagttttcatgtaatgcttgattatgtgttatataagcgtttattgtgaatgatgaaattgtatgctatgcactgttatgttatctcgtgttatatattgtttgtattttaattgctttcttattgagtctttgtgactcacgggtacttcatggtgcaggtaaagggaagggaaaagtggatcatccatgatttagaggtctcccagcgatgtacatatcaaccgtggtgtctcagcttccagtggacaaatgctacccttttgattatgttttgaaatgtaaccctattttgtaataccaattttggaactatctgtaaaagtttataaacaggggatccccgtattcagcagtattttatataaaagttatgttttttagtttaatccaaaagttttttttaattaagccacacttttcttaaactgatagattaattataaattactttgtaaaaccacacatgtggcgtccctatgggtcaggggccatggtattacagtttgggttggctcgtgccttcattggtggtgttggtgatttgcccaaccattgcctgcccatcagcaacagtttggccgggtgtcccatgaccaaaatttgtctaggtagtggcttgagtagtgattgcaccactgtttccaggatgtggggtcattctccattgtttctagtgagattgcttgtaacgtccccgcttcaagcctctattgggcccttacacccacaacatgatggctcttatacacgag

SEQ ID NO: 235290 - DNA, 1130 bp, Cannabis indica
gaatcctggaggataaccatgaatctgtaacacctttcaaccgtgtgtccgtgtatgttgcagtgagtgcaaaatggtctgcctttcttgggaggataggttttgttcccttgattgtcactcttgttctgcatatttttgtccttttgaaaggcaaaagccatatcagtattggagttatttgctgcagccatgtttcccttctggttttcttcttgagtaatgagatgaaaaacccgattgatttcagggagagggtccatgagcagaatgctactgcaaacttgagagtatgtatcagtgagccccatgagaaatgatattacatgttccatgtgatgaaattcttgaatcttcttaactccaccacatgtacagccattacaagtacatgtgggtttgtagtttgacagttcctcccaaatggatttcaacttggtgaaatacatcccaaccgattgtgtatcttgcttcagattcatcaatcctttcttcaaattgtaaatatgtggtccatttctttgatggaacctaactttgagatccgcccatatgtttgcagcagattcatcatagaggatactggaagaaatttccttagaaaccgaatttaagatccaagatataactatgttgttgttacggacccacgcattatagagattatgatcagaaatattaggtttaggaatggatccatcaagaaatcctaacttatttttaacagagatggagagctgcatagctctactccaagaaacgtaattgtcttgaccagttagaagctgagagacaagaacgttacctgggttgtctccgtgatgcaagaagtaaggattagtaggatcttccatgggattcttttggctgttgattcgaagaaattgattttcttgttggatcgaagctggagaagtatctacgcctctagcttgttgattcgcagcatcggactgggttgatgtttgatcttcatcagccatgtcgaaggaggacagaaagaacagaaagaaaagaaaaacaagagtatcggaaaacagagcacgatactcgtcaccggagaaggtgaacggaaagacagagattaggatcgatcggggaaagcacttctttcccgctctgataccata

SEQ ID NO: 235291 - DNA, 1249 bp, Cannabis indica
gtgagtagatctaagatccttgtgaaataaattccaacattaatgggggatgggatgaaacttttgccatgacagacccaaggatccttccagatgttcgtttctttaccatcagtgactagtttgcaagctcctttcattaaaatggtcttggctttgatcacattcttccaaaactaagagtccaaactcttaaagtcacagttaaggaaatctttgccttttaagtacttagcttccaagatgccatagcaaaacgactggttacctgtcattaggttccaaccccaattggccaaaaaggcctgattcatctccctagtttttcagacccctagcccaccacgagattttggcaagcaaagcttatcccaagctttcaaatgaactccacaattacctttttcaaaaccccacaagaaatcgcagaccatgccatcaatcttagaaaccatacaatttgagagctttattgtttgcatggcatacatcggcatcgagaggcccacagatttgattagggtggaacgctttgctttggaaagcgttttagccttccacccctgcagtttggaagataggttgtccagaatgaaattaaagtcagcgtccttttgtctggatctaaagagagggagacccaagtatttaatgtttccatctggcaaattgattcccagctcttccttaatacctcttttaagcccatcagacgtattcttactaaaaaagatggaggtttttagcttattaacttgttggccagaccaagagtaaaacttctcaaggcaaatccaaaagcctctaacctccctgatcgtggccctactcaccaagattagatcattcgcaaagaaaatatatgtcaacgccaggcccctgcaactaagccttatatgactgtttgttaatgtttgttttgatcaaatttatatgaccttgaaaattaccagataactaatagtcgcgatctttttccccactcacaagatcattgaaaaagtatcaaacatttttttctgaagaaaaaaaaagagttttaggcaattgtgactttataacatagattgccctataaaaatataagtaatgtaattgggggataatacttgaaaaatcttcaataagcagaggataaaccatgctcgatactcaaatggtccaattgtttgaattattttacaaggatcttagatttactaacaagtattttgtttaaacatcctaaatatgaacttctaaaacgata

SEQ ID NO: 235292 - DNA, 1024 bp, Cannabis indica
ttgtgactaaaaacacatttatataatttgtcgtgactaatacttttagccacggaccttttagtcacaacataagaataataatttataattagtcacaccactcttttacttttagtcacaaattttgttatgactaaaagtaagatttttatagtattgacgctaaattattaaagtgaaagagaagatcaaacatgtatgtacagagcaacaatttcttttgtctactaattattcattcagtaaaggatactcttggctcaatccaagacaagaggttgtcaattggagtactcatgtttgtggacgattcaatgtgcccaaacatcgattcatcatgcggcttgttgtaagaaatatataggttgtagacgaaggagaaagggtcaagttttaagaagcaaataatatggtgttagtggcagtggtgtatcacttttggagaaatagaaatgaagttttatggtatcagaaggtattaacattgtcctcaatcattaggtgtataaagcatgatattataaaagtagattgcattttgttttgccaaagaaaatgaaaaaaaatgatctgaaatagatagagaaattatagcagagatacttgtaatatgtatagcatagataaccaaagaattcagaacttgtttggtgctatagtcatgtgcatatatatacagtttttgaaggagtataatttctcgttcattaaaaaacaaataattttttccaaaaaaaaaaattgaatgctttagttaaaatatgtaaagaccgcttagtttaatttggaaattagcagttgattatgattaattatgaaaattatttatagctatttaaataatttatttatactgttatttattgaagtgatgcattttatgtcattcagtagttttcatattttgcatttctggtgcccggtattttggaacccggctcagtagaaatcacaacttagtatgttagtagtttgggacggtttattagacattgggaatgtcgggaatggccgggaattt

SEQ ID NO: 235293 - DNA, 623 bp, Cannabis indica
aaatacaaaatatgaaatggtaagcacgataatacatgtaaatttggaagataacaataatgtttaaaaaaagtaatgggaaaataaagaataaaatgagataatgatctaccactaaatgatgtgactttcagacatctagcaacaatgataggcgtagtagctattaattttgtaattgcagcacattcattaacaacaaaatgttcccggcatgtcaggccaattggttttttcctgtataatagctttcaattattaagaaaaatgaagaaatttaatctaaatgtacatgaattttgttttgtaatcttactcttcattaacaactattagctcttgtaagtcttgcaaacaattactggtgtatatttgcttcttaggattcacaataattgcaactgccatcaagtctgtataaacaaagaaaccaagaaaaaaattattaatattttcacttgtatagcaatatgttaatataagcaaattgaaaagagaaatataattaccaactgaagttgattgatccatatgatctaagaagctaacaaaaggagtgaaaatgtattctactaagttaacattgagatatcttcctgtggctacatttttcaactaaagta

SEQ ID NO: 235294 - DNA, 1362 bp, Cannabis indica
agacttgtaataaagtttgtaaatatctttgggatcccaactgttggaaagtttaaattattacaagttttattttcattctgtttattacgaaagtttaaattctgtgccttttggattagtaatcccgattaggggattagggtttcgtaagtaacttgggtagcgtgcctaattatttagggtgttacataacagttgtggaccctttggttccaaaaactgctaagtccaaggtctctcgaggaggaagcttggacaggcccgaacagtcgaagggcatatttgagcagatctgggctcctaccccacctccattattgcatccagagaccaaaacaggtaaggagatgctcacccattacatgaatcggtcagtccttgaggtaaatgagcaactggccggagttgacaacgagccttctctggagttgttgatgtgaggagtcctgaaggagttcatgagggcgagtctttcctgacagtttcctttaatccttctttacttggctcagattctaacattttttctctgtgcagactagtctgaagatggcctacacttattctcgaactaagtctgctgcctccaagaatgctgccatgtccaacaccatgagggcagaagtagacttggccaggaaggacgctgatgaagccagggttcaactcggagccgtccgaatggaactaggtgaagtcaacaaaaagcttcttgctgccgagaagaaagtggccaagctgaccaaggatttggaggcttccgaccaacttgaggctgccatgacttcctttccaaagaagtgactgacctctaggaagaaagggaagttcttggaactgtttttcgcaggttggaagcagagaagaagtctaaggaggaggagctaacgctgtggtagagaggtgcaaagggaaggtgaacgccttggagacagccggtctcgagattttttataacttttggaaggctaaccctcaggtgaattttgattacctgggcgaggccaaatacatgtatctcgagtattgtgcttcccaagtggcctatggagagtccgaggcaaccacttctacctccggtctgaacgttgacatgcctcccgccgtgacaacagatcctccagctcctactggcccaaaagacctgtataaggagtccggaactccagccgtctgaacacttatctttgtctttcttttatatctgtctggccataatgccttttttaagacatcgtgaccagccaagtggtctttaaacttggaattatttttcatttttcagacaacaggttgatcgggcagcttttaatctcgggtttacgtgcttttgttatctataatgaatttcattctctg

SEQ ID NO: 235295 - DNA, 891 bp, Cannabis indica
caatgagctatcttggttcgagaaagtgtcgtcgtcaattgtggattgctgctttattaatcttgtgtgattttgatcaccgcgtccaaaaaatatacatatatataaaaaagtttaatatattttattgcccaatattaataaattaaatataataaaaaatgagttttttcatttttacacttcaaaatatttttattttcttgtatttttacataattatacacagaaactcctatagtaactaacagagcaactgaaatccgtatagcagcctacatagaaaacatctgagaaaccaccagagcaacctaaaccataaatttaaaatatatatatatatgaggtaatttccctaaaaaaaaatgacattattaaagttattattagtatgaccactctcattagtttttctattcaatcttttaaaatatattattaaaacttttatttttatatttgactttacattactttatacatcaacttttttaaaatatatcatcaatttttctttttcaaatattaatataatttatttatttcaaatatatagtattaatatatacacacattttcgtataaaactaaatattaaaacttaaaataattaataaaatatttttagaatagtgaatgtatttgtgtttcttgaaattgagtaataaatgtatttaaattgagaatagtaactttttaaaaataaaactaaaaattaaggagtttataatatatgatgtaccttgtttttagtttagctttttaaatattttaaaacttctctattttagagcatctaatgtgagtgctataagagtaaaaagttatactcttagtgctctaatgtgactggtctgatgcaggtctaatgtctttctattgttgaaatga

SEQ ID NO: 235296 - DNA, 565 bp, Cannabis indica
ttccacagagtggaaaaatgacaggtcatttttaagttatatttggctgctgtcgtttgcccagacgacgtgtcgtttttcccctgtggaaaatgacatgtcgtttttcgtcgttgtgggcagcccttcaagttgaaaaaatgacgtgtcgtttttccccttgtggaaaatgatgcgtcgttttctacatgcatatcagcccttcaggattggaaaaaacgacatgtcgtttaggcagtgccatttttcaaaaaaaaaaaaaaaaaaaaggaaaattccgaattttttataaatttttatttatttggaatattaattattttcctattttgtgttaatttagtcaataaattgcatttagttaattttccatttttgtttaatacatatatttagtataaattgaaaatggaaatttgtttaatttagtaatttattacatgatttatttaggcatgtaataattgtgctaatttgtataattgtgcatttaattatatattaccaaatttatgcaatttattgtctaaataaattttgaaaaatctgccattaattacatatt

SEQ ID NO: 235297 - DNA, 868 bp, Cannabis indica
gctttaaatagtgacagtaaagtaaattggaagggaagaaagaactgattgaatgagtgtgtatctgcctcccctagacaggaatgcacatttccacccatcaagtcttttagcacacttctccaaagcaggatcccaaaaaactttcttcctaggtgagcctgccaatggcatttcgagatacttcatcggccagcagcccacctcgcatccaatttgagcggcacattgggaaacaactaattcgtccatacacagacccaacagttggcttttgcttaagttaactttaagtcctgataaggcacaaaagccttcgacaatcctaacaagcttcaaaagggattctctatcattcgcaaaaagtaaagtatcatcggcgaattgtaagtgactaacctgaattttatcttttcccacactgaacccagataaagaaccagaattagctgctttatccaccattcttcccagtatatcagctaccaaagtaaaaaggaatggcgaaagagaatcgccttgtctcaatcctcgagatgctctgaattttcctcttggtctgccattgacaaaaatagagaatgaagtggttgacagacatcctctaatacattttctccaagtacctccaaagccttttttgtgcataaccaaatccaagaagtcccattcgactctatcataagccttttcgaagtcgatcttgaacaccataccactttttcccctgcttctataatcttcgactgtctcattagcaatcagtaccgaatccaatatttgtctcccctccacaaaacagattgagtgtctgagattgtgtctcccaaaatatacttcagtcatatagcaagtgctttagcaatga

SEQ ID NO: 235298 - DNA, 988 bp, Cannabis indica
aattagaatgaaaagtaaagcacgcatagaattgttatacaggtttggcccccttagatagcgggtaatgacctactaccatcttagttgtatttatactgagggttaatgctatccagatcactataggtgggatctgatatagcacccttatggatataaagtagaaatcgaggttggcaaatctaaagtgatgagaaaacttgtatggtgtgtgacagggaatgaggaagagagttatcaaacttagacttagagcttggaggttagtatcaggtttaatgacttaggttttctaggttagtgttaaggcctttatataggaagcctaaaccctaatttataactttaaaccctagatatttatttatctaattagttaattacgaaagaaaaaaatttcctttaacgtagatattattcagctattacatttggcttctagggcccaatttgtagcccaatcacacagtccacgtgtagaattacatagagaatcctacatgccttctcttggctggccaaaaacctgccaggagtagggtagcaagccatggttctgtccagacgttggttggccagagggggccaagggtggccggccagcttctatgaggaagctggtctatcacttgatgcccatttgagtgcgggggtccctatttgctgaggtacttactaagccttcttgttggtgtgttttactaccacgtggcgctaattttttccacataagcactaccatgtcacgtgggcaaaaatcaggataataggcattggtcttaacaaaagaaacaaaatcataagcaccatcaaagtatcaactaatgtatttgtgtggtgtcatggagacatgactggaatcagcccacatgtaatcactcatgtcctaaatgttaacaaggatatgcctctactacaacaaaaaaggtatcctcttgatctactaaagttagaaaccttggagcagaaggtggataaaattcta

SEQ ID NO: 235299 - DNA, 689 bp, Cannabis indica
attgagtatctgaaaattaaaacataaaaatgttttacagccaattatcttaaaataaacatatggttcaaatatttactatatttaaattttgtttttccattagttttatgagaaattaaagcggtttaataatcaatttacaagacttttgagtgattagttatgtaatgttacaagacctaatatgcaaactaaacaaaaaaaaaaaaaattaatatggtagctgacctaatcatgtccttattaagctaattttatagctttcaagctgtaatgcactaagcttttatttatctgtatttttggtttaaaaatataaatgtatacaattattgctattttatttgatgacaagtttgctgacataatttagattctggagactaacaattttatctccttatgtaagcacaaaatcctaactatagtgattccacaaataattaattgattgtatttttttaatataataatataaataataaataattcaccatatatattttcaatatacaggaagattgggtattgtgtagagtattctacaaaaacagaaatgtatcagcaacttcagctaaacccaattataacatgggattagcctactatggagaaaaatcagggtccaattccaagtctctccctccattaatggatgcttatataagttttgagaagcctactca

SEQ ID NO: 235300 - DNA, 1319 bp, Cannabis indica
taatatttacaaaggattcgaggtcaaaactaatctccgatctggacttagacccggacctgaacctgaactcaaacccggacccggacttgggacttggacccaagactcggacctggacgcaaactcgaacctgggacctagacccgaacccagatccgaacttagacccaaacttagacccggaccctagacccgagacccgcgacccaaatctaggactcgggacccgtagtttgtgttggggtcgagtatattaaaaatatattataactttatacaatctattaatacaagtcaataccaaacatagtattgtattaaataatactaatacaatacaatacaatccaacacaatataatacgacgtatacaatattggattagatccatccaatattttagattcagtatgtattggattagactgaatccatccaatcaagaaaaaaagagtaaaattttaatgttaatttttatatatacatgtataacaatataaaatctaattactcatccaaactaaatgtaaatacaaattagttcgattggatgttggatgtattggatttttagacgccccatccaccattcgatccgatccaattatatatataaaaataacatccaattcgatccgatcataattggatatcaatatattatctttacacaatctattaatacaagtcaataccaaacatagcattgtattaaataatactaatataatacagtacaatccaacacaatacattacgacataccaaacgaacttatttgttaaatgaatcaaaagatgaccttttgaaaaaaaaatcaaaaggggcaatattaaagtcttagtttaattatttttgttatagtgttcaatgggattgttatgattgatatttcttggttagcccttattcatgtgttaatttgttgtatatatctagaactttggtgtgtgtagctctatagctagcttaatgtctaagtcaaagtttggcaaatacgaacctaataaattttgtttttaataattattacatagtaatttctcttgactaataaattagttataaattattatgaaactttaattacaataatagtcgtatacatgattacgtgtctgtctacataatgattacatcattttttttatttatatactacaaataataataatattatatataattctataaattaatattagacaaaatattggagggattatcttcgaataagagtcactgtaaacatagatttgcctctcaaacgaaggatcaagctgaagaagcctaatggtgattggttgtggtgcca

SEQ ID NO: 235301 - DNA, 1123 bp, Cannabis indica
aattttctttgataattaattataattattaaataaatagtttttgacatttaaaggattgaaattagaaattatggcattagtaaaagaaaagataaattgttgaataaaatgacaaaattctaactagtagggcacatccaatggtcgaccacttaaggagaattttagccaattttttgtcctttttttaattctatataatttaaatctaatccttggagaaatcctatataatgaataagatggctctcattctcatccaacaaaatattctaagtttcctaattttgtcaaacaactagaaacttgagagcctccttctatataatttcaaatctccttctctttctcttcataaatttcgatccctatagtgaaagagtacatgcccacccatagaaagtcaaatacttaatcatagtgcgaaagactacgaagaatccaacacttgaaggagaaccagacttagatcttcacaatactctgcaatagccaagggttagagatctgagcgaaaggagacatattattccgctgccatcaatgtaaggtttcctaaactttatatgtgtttaattccattatttttagagaattttatatttagtgtgttaatcaacatacatgttagtaaatctagatcatggtaaaataatttccaatactttttgactaagcgcatctgccactatatttgccttaccaggatggtagaggatttcacagtcgtaatccttgactaactctaaccaccgttgttgcctcatattcagatccttttgagtgatagaaaaattttgtgatcggtataaatctcacacttttcaccatataagtagtgatgcaaaactttcaggccaaagaccactgctacgagctctagatcatgagtgggacatcactgttcaaaatctttcaattgcctagaggcataggcaataacccttcctgattgcattactaagcagcctaagccttgccttggcgcatcacaatatatcataaacttttcatcactaattggcaggcttagaactggtgcgataatcaatcttttccttaactcctagaagttgtagtcacatttattagcccacataaaggaggttgaaatcactaa

SEQ ID NO: 235302 - DNA, 1794 bp, Cannabis indica
ttctttgtttcatgttgagagtaaagattgggatgtgaatttaattcgagatatttttaacaacagagatgctaatttgattatggggattccaataagttttacagctacagaggatttttgggcttagagaggtggaagtttgagatgtttctcaattaagagtgcatataagatgcttcaagatcagattgaggaaagggtgggagataataactcaagattttggcaaaaatttgagcaattaaaatttcgccaaaggtgaagaatttaatttggagggaaatcttgggtttgtcttccaacaaggctgaatttgagagctgaaaaggtggaggttcctattgtttgcccactgtgtaatgcccactctaagcccactttacattttttattgacttgttcttttatcgaagaatgttgagctcgaagtggtataggggtggggtgaatggtgcaaaaacttttggtgctcagttctttcagttttttcctttgaagagcaaatgtcaatgctttgttgggctttttggaaaatatgtaatcatctcaattagaataaagaatctctttctgttgatgaggtggttgttttggctaaagtgacttggaacaatggagtaaagctcagtacagaagcattcttccatcatgtgatttatagtacaagggagatggagctgagctttggtctacacatgctactaatcttacaaagtcaatgttaatgcagctatttttgacagcaaaagatgttatggttatggcattgttactcgagatgacataggtgctcttgtgaaagttaatgcattgtttttctgggagttagctgcaaaggtgattgaagccataagtgtgaaaggaactcttagttgggtaaagaaaatacaatggcaaagtgtggatattgaaattgacaacagtccgagcaatttttactgaattgtttatgaactcggttttcggtctagtgatctgtgattgtaaaaaataaaactatctcctttaagaaatatttgtttacattttgttaagcgatctgccaactaaattgctcactatattgctagaagttctcgtgtttgtgtcgattgtcgcatttatgagtatgatgttcctgccaaacttcaagccttattgtactttgatgtttggtaattaatgaattcagcatttttttcaaaaaaaaaaaacttatgagttgagaaaaaggtaacaaaaccaatttgaagaaaaattctatttttcctttagaagatttttgtttctaatatttccaaaaaaaatgtaataaatcctatttgttgttaagctttttttttttagaaattaaaatgatattacataaaaaaatttcaagatgtaattaagctctgacttaatagagaagaagggatttattatttataaattgatttaggaaaatccaggtactttgcctttactttaaaaaaataataatagtgataaaaaattaataaagcaataaattacaactaaacactactatccaccataaactaactaaatctaaaaattaattttccaatttttatttattatttatttatttaagtagcagcaggccaaaggccacataaacacatctaaaaaaagaaaaactttagtggaagagcacttatagaaacaattgactttaatatcttataaataaataaaaaataataataaagctatatttaaataaatcagacacaaataatgagataaataaatgaaattaatgactaccttccctccaacaactaccttctagcacccaaatgaatc

SEQ ID NO: 235303 - DNA, 997 bp, Cannabis indica
atcaagctgatgaaaattgtaacaccgtattccataggaacgccacgtgtgtgattttataaactagattaatacttatatataaattaataattaaaatttttgagaatattaaaacttgactaaaataaaacactaaaaacagacattataacgccagtaaaaaagggttccgggaatccctgttataaaagatttacccaaaagactatagacaatattaattgaaaatacagtagatacaaccagtccaaaataactcctaacaactcaacacacaggccagtggggtaaatatgtacattgcaagagaaggtagtcacctcatggcagctctaactttttcttgcccttacctgcaccacaatgcacccatgagtcacaaggactcagcaagaaaagaaatgataataatcatatagttattatttgaatattatcatttatacacaattagaatcaaaccattactaattttcataagatgaaatccaaattactattggcatctaccatgaataagcatcagtatataaatatttggtaatacaaaaccattataccaataataggaatcatattcatctaataatataaattgtatatatatgttacctcataaagtaatcatcttcattacatcacattgcctaatcaggcaagtccatactttaatttaataattcggtattgcgttccctaatcaggcaagctcgtgccatagcatggcacccatatatcgcataaatgtatcagctaatcagatgagcctgtgccaaaaaaaaactgcacccatatatcatataattacatcacctaattaagtgagtctgtgccacaacgtgccaccaatataacgcattgcctaatcagacgagcccgtacctacacccggtacataattgcatcacctaatcaggtgagcccgctccacaattttgcaccaatatatcgcatcatctaattagatgagcccatacctacgcccagtacttat

SEQ ID NO: 235304 - DNA, 5259 bp, Cannabis indica
tagggcacaaaacctaacaaactgtccttcagtgtgaataaagtgtgtcaattcatgcaaaggcctctcacaacacactgtcaaactgtcaaaagaatcttaagatatattagtgacacaactacctttggtcttcatctcaggaagcccttgtctcatgagttggttgccttctgtgatgctgactgggcattagattcagatgacagaaaatccacttcagggtttgctatcttctttggttcaaacctgattgcttggaaaagcaaaaagcagcaaactgtctcacgctctagaagcagagtacagaagtgttgctaatgtcactgctgaacccacttggttgcactacctattgttttgagcttcaaatcataatgccttaaccaccaactatttggtgtcataattcaggcacaattatgctcacacaaaatctaattttgtatgctagaaccaaacatatagaacttgatctatattttgtcagagagaaagttctcgacaacatggttcagatcaaacatgtttttgcatttgaacaactagctgatggactaaccaaatcaatctcaagccaaagatttttaaattttagaaacaaattcaaaattgaggatcattcaattatgagtttgaaggggatgttagagctattaatttagttagtgacaattaggactattagttgtcactagcaagttagttatagtttggttcagttagttgttgagtttgttaggttctgtttgtttgtaattgtttgtatataaacatttacttcaactatataactgagactttctttccccttcattctctttctctgtctttcttcttctttagctctaagctcaattaatgtcgagacacttcaacacaaacaaacactcaaatatgggggaaaatccatattattagcttaaaatgggaaaagctattgatttgagaaatcttaaaacctccatttctatgaaaggaaaaaaaaaaaaaaaggtcaaaagacaaccatactacacttaatttccactaagtaaagtattttgaagttgatcttattgaaatgaaccattaataataaatatatgatacaaaaaccaatctttctatcatgctatattctatactataccatgtttggctagctaagttttcaaactaaatttcaaggtggaaaaaaaattaattagttaaggccttcagcttgagaatagcctggtgaaaaagtttcctgattttggtttatccaaacaagccacatgaacatatctcccaagcttatcaacttgtcttgcctcaccccttgtatctttcttgcacactttacaagttttgtccacccacccttcttccacatattgtccatccactgattcgttaaaacaaaaaatcactaaactatatatccaaatatcccatgatttacataaaatctagtgggcggtgggccatataggtaagaagaaagcttgaaactgagaattaatatatgttgaataccttcaacgtaggatttgaaaaaatctttgtaggttcctccaattttccttctgagagctccatactgagaaaaaaaaatatattggtaattttaagtgaaaccatatatgatatcattacattaatatgtagtgttatcataacttatagtatacctgttctgtgctcatcttttctcctgatttggtagcttgtctagcatcttctagaagctcagcatcttcttctgacctaacttgagaaaaatcaagtgcctctgttacactactaaacaaagactgcttattcttctttggttcttcttcctttttggctgctaacacactgaatttcgagctcttcttggtcagagctccattgtaggacttagatgagaattgggttacgtttaaatttggaaagaaattgcttcttggtggagttgtcaaagctgggagagatctcagtcccatgactatatgattgctttgaccccaaactgagtgagaatgatatatgattctctctttgcagaggtttggaaatggaagtggaagttgttctccttttattctcgtgtttgagttttatggttttgcgtattttgaccactagattactgccacgtggaagtgaatatgacgtggatacttggaaaacagtggtggttaagaaggaggctacgtggccctttactgaactaacaaaatttaaagggagtgtttggtcacgactgatacattccaaaaaggaaattgtccccaaccaaaccaattgaataaaaaattaatggctagtggaaaatattactatttttatttcctactcattgtcttagttaaatttaataaagtttagaagtcattaattatgacttaactacaatgcatgacaaagtttcaaaaaggttgtatattggtggtaattctaaaatgtcatcacacaggacaccatcttccaatttcttgtcttttttttttgtttttttttctctttggtaagggttaagacattgagatatagatacctgctaaaccgttttcagttccctctatagcaataagaggataaagaaagaagaagaagaagaagaaactaacttaattacatatttttatgtggcctacacaatataaaccattccaacctcaagaagagatactggtgggactttgagggccacatctggaccccggcaattcctcctcaggaaattgtagccaaagttaatggctagcttcttgaacacagatgaaccttgctttgcctgaacatgagaatgtcccaatatgaatgcagttccagattgttgagcttggtacagatcttccagctcctcttgcagctgcatttcgatctcacgacggctattatctgcttctgaactctcatcaatggcaaacctcactcttctctcattttgaccaactgcttccatctctataacttctgtgatactttccacagttgggaaatcaactgagacactagctggcccaacagtctcctcaatttcgtaagtcggtgcaccagagaatgctactgttccgatcacggccaacctacactcacttgactcattagaacggaaggcatcatcgtcactgcacgagttatcctggtgtgcttggcaccaatcgtatctgataaagtctgcaagcttttccacaagctcggtctcaaaagaatcaatgtcctgatgaacatcccggtatccatatcgaacaatgcacctgtaggatcgatgagctgcagggccaacacgacccacaaggtacctctcggccggagtaacaaaggggacaggtactgactttacgcagacaaaaacaaggatgcgatggaaggcagggaggttggtgacaaagcgggagaagtttgcagggataccagaagtgagatcagtgaagactagaccaattccaggtactctggcgattccaaggcttggacccaaggccagaagccattccaaagagaccttgttgtggagatcgtattcgtatttcttgatggtggcgtagtgccaaacaaacatgatggtcatgaggaaaagggcaagaaggattgggaaccaggctccttcagtgaacttggtgagagaagctgagaagtaaagcaattcaatggagccgaaaaagagaaggaacaaaatagctaaaatagggggcttattccaacaaagtattatcaccaaagaagtcagacacgtggtcactagcataactgtcatcactgccagccctgaaaaaagataatgataacaaacttaataaacgaatatacaaattggtgagcagtcaaattaaaaccagagtagtattatttttcttatcatagttggacaatagcatcgaaactcgttaggcaagttgtcagagttgagaaaataagtttcagtgtttctcctaggagcctagtgaagatttacaagttacctgatgcatttcccatgtgtttagtgtctctaaatccaatggttacagcaatgcaaaggatcatgagaatccaattgatctctggaatatatatttgaccgtgaatcttgtcagaagtgtgaatgaccttgactcttggaaagcaaccaatcgactggcgtttggttttattgatagaaaaatgttccactgatgattgcttggctttcccacaactgaagcaagaatagactacaacaagaaccggccaccttacagattctgcatccaaattttttttattaagcatcacatctttcgtaatgagtacatatactagtcactactcacaacagaagtttgtaataaaaaaataatcatgtaacgagaattcaagtttcgtttcctttaatatccactatcgaatgctacgaaacattagtttcaattcatcttatcttgtcaaatataacagtactccataaaaaattgaagaatgagccttaccaggaactgagacataaaaactgatactatgactggagtggtgatgatgtgataagtaagcagcttggcccatgtatgccaaaataagtgctggataaaccagaaaagtgaaagcaatctgcaacaggaattggaattcccttgttagattacacatccactgaaaatgcatttaaaacaagataaaaaaactgtcataatggtgttcaattttacctgaatggccgtatatgagaaatgtccaagatcagcaaacattgcctctgaacctgtaaaagcacacggcttcattagtggcatgtaaataaacacataaaaattatatcttgataaaggtcattcagaagttatcatacatgccaaacaaacaatacaaagagctctgttttctttcctaaggaaaataactccaaatattataagtgctctcctattttacctgttatgcacaatagtattccacctaaagacatccatccacttatccttgtcttcttcaagaacttgaacatgtagtaaggggaaagagcttgataaacttgtgggttccagcgaaatatattatacaagccgagggtgctgatgcatagaagccacgtcaacacaattggtgcaaagaagaatccaactcggtgcgtgccataatgttgaagtgcaaataggcacactaatatgaagcaagttattggaatcacagcatctggaattcagtcagagggcggaagttaagaaagcaaagatggccagctaaaactacattgaatcttctatgctatacacaaaagcataatgaaagataaatatttcctgaaaacacatactgatagctaaatttactgcacaaataatctagaaa

SEQ ID NO: 235305 - DNA, 1043 bp, Cannabis indica
cttaaatttgaaaaaaaaagttaaaaaatagtatatggggtaattctcctaatatttaattggacatattttattaaatatgtgattatatgaaaattagggtaagattataatcttacttaagttaattagtgaaatattaattaatgaatcattaaagcgtaatttattaattacggagattttatcggattatgggggtattgtaaacactatttttgaaataaaatattttcaagttcggcggtagtggaaactcgacggagtggtctgaaaagtcacggcaataaaggttaagttatatttagaattataccggactaatttagaatgtcgaaaagtcgatttagtcgggtagttagaaaatgaccaaatatgcacttaacttatgttttattttgtgttcttgcaaggggtaaaatagtcatttgatggtatttagatttttgtcctaagtaagtttctaggctgaaactaaagattaatattaggtttttatttctttttttatttatttagttaattacttagaaaaataaaaagacaaacttaagaaaagtctacaactttccttcctcctctctccttccttccaagccctagaaaccagttgcaacaaagagcattctttatcaatttcaccatttcctagctgaattaagaaggactagaagttgttcaagctttggggtaagcttcttcctctttgtctctttaaattttgaggttcaggttgagtttggttaagactttgtaattttaaggttgtggtgttgagttaagttcaaagcatgctttggagtttaagttaagttgtttaagcttgaattggatggaaattagggttgttaggtttgagttgggctaaattgagtttaagaactcattttttcacttctttttttttttaaattaaagcatttatatattacaaccatgttttacctgggactcgaatccaagacctccaacacacacaccctcctatggccacttgagctagcctcaagtggttaaaatacaatgtatacaatcaatcaaaa

SEQ ID NO: 235306 - DNA, 1146 bp, Cannabis indica
taatctttctcgaagatcttgtgtattcctatttatctgctcgtgtaggccaggacacctttgatttagatagtctttcagatcaggctggtcacgcatgttttggtgttgatcttgtctattattgtaattatacttactggccgacttgggaaaatactttttgattggtaactttgaaagttactcgtattttcttactcacccaaatattcatattgtggcgttctttcccctcacgatgggttttcccatgtgtgtgacctcaaggattgagtttgcccctgactcctcaacctactttgggttgtattagtctctgattcttgtggtgaatcttaggctggtcttcgcctttcaaataagttagtgaatcttcctctgtttaagtatgtaaacatactgtccctttcttccctcctaggtccccatggtggacgcggagggcgagcgaattggttaggtggttgatcatttatatttttgttatttctttgtccccttggttgcatttgccgtgaggttgtggcaccctgattctggggaccttgaccatcaataggaatgtcccttatctcctctagttgttgttcttgggggcgagtgggattatttggctcatgttcttcaatgttgggtccttgtgcccttctggttcatgaaccacggggttttccttgtggtcgctggacaggttgctctttctttactggcagtgcatcattttgagtcgttttggctgtagccatggcccgttccaactcctcatttcttcggttggactctctgagcctttgacggagttgtcgattttctaactccacaatgggacgtatctcatggggtcgtatgcattagactctcttctctcaggaacttcttcctcagggtcacttctctcgaagttcctctcagtaggacctcttcccttgtttggtctagtttaagtttgtgctccctggggctcttttcccggtcaacgtgttgtctcttcttccacgactggttcatcatgttgagtattttccatgacgaaatggtctggtttaaacaggaggagatgtgcttcaagttcttttccaaaggctctcaatgaaggcaccaaactattaactctgatttttgctaacaataaatgaagccttg

SEQ ID NO: 235307 - DNA, 1202 bp, Cannabis indica
aactgcttaatattcattttgtttgattctttttatgtaaaacgacattcctatggataaaagcagacaaatcttcaaagatatgactaatcccaagtggaacgtcaatgtccgtcttgagctcatagaatgtccgcgggaagagggcatagtataggagatggacaacattcctaataaattctaaaactatcagatgcatacaactggaggataagtgtggcttccaaaatacgccatgcattttttagaatagactagcacgtttgaacgagaaggccagctgcattgtggacagtttgttagagtttatgccttgaaaagcctgtaaagacatttctgattatgaataagatttgaacaatttgatattgcatgaatgttaaattattaatatttaatattgaataatttttgtatgtatcagattattccttattgatacatgaggttgtcacttgtatgtatgaagaattaagatcacttatgtaatattccgataagcctaatggtaaataataggatttatatttatattatgggttaatcaggtaataagtgggattatgatcctactaatttatttcagcataatatttaaattttgctataagtgagtaaataagcgtaatttgttaattacggagatttgtatagcatgtgtgaatgtaatatgagctatacgtggaataaaaatatttttaggttcggggatcctgaagactcgataagtggatatataagcgtaatttgttaattacggagatttatttgaaatacgtggatataatatgagttatttgtgaaataaaaatattttcatgttcggggaccctagagacccgagtggaggtcaaaaatgtcacaacagtttaagttagaaaatattgatgggattattaggataagttgattttaaaaatatcggggtattttagggtactcgaaattgaccaattactctagaaatagagatttcttagtgactaagaaataataagataactattaataataaagtttattattaatattatattattattatatatatattttaaatatatatattaaattttaagttataacagttgaaaagaatgacgacgaacgaaattctcgttctccctttttcgataaaaccttctttctctatgtctattttcttcgattttcaacccgaaacttagcgatctaagctc

SEQ ID NO: 235308 - DNA, 1298 bp, Cannabis indica
gataatcttctttatcttagcaatataagtgttttcgttatcattcctttataaatctctaagcatgttacttccatttaatatggttcaattcacgcttcttggatttaattctccactatataaacatcacttttatagtattaaatagctcaacccacttaattgtcatcttcaaccctcctaaaatgacgaataggtgtaatcatacccatattgttccacctttagtggtcctcaatcacttataaaacaaaaagattccattctcagatttatttagacagttgcctcaaatggttactcatatcctataacccacttgagcatattgaaagaattttaacttatcaacaaaccatcttactgctttaccaacactctaatctatctacctctttaactaatctaccatgtaatgacgtacatcactttgtgatctaggtgacaatggattactatttccttgatcatttcttagctgtcaagttttccatcgaatctcacaaattcccacttggacatcgtactcgatactttaccaatcattgccttacattgatcatacttcccaaataacaacaatgctagtaagcatttccttacttttcaatcagacgtatagatattctacgctttctcaattagtataaactcatgttatactatcaacaagcttagctcatgcttttctaaacatacttctaacaacattgtatattaattagtcataaaacaagtaagaaaaataatacttactatccatgagtcgtgactgtcttcacagcaaatgtacatatccagccagtcttcaggatctttaaaactgtggctgctctgagaggatgttgtaatgccctaacctctaggaacgccacgtgtgtgtgcttctacaattagtttatgattataaactaacaagtaaacttacggttaaagtaaaaaaatgtgatttaataaaaaaattgctaattaaagtcatggcatcatcacttttacaattagggatctcctttaaaatattacaagatgtgccattagaatataattacaaaatacatgttaaagttcagaacatctaaaaatgccaatcttgacaagttggcaccacttgtcggataagatgatatgtacatttgctagataagatccctgactcatggctgtccaaatatttctacctatgacatacaccacatagcacccatgagtcacaaaaactcaataagaaaagcagtaatacaacatcacatctccttacacagatatcaacatttaaactcaataagaagggtcaa

SEQ ID NO: 235309 - DNA, 1485 bp, Cannabis indica
aattttgattgatgaaatgcttacatttaatctatagcttaatatatatagaacgcaagaataattaaatagtcttaacaaataaaaattattttaaatatttattacgaaattactatggaatttgagtttattttatgaagagatttttatttattttatttattttaaatattattgatagataaaacttattttatatatttattacaaaatggtaataattatcatattaaatattacacaatattagtttattgtgtaattgctaactgttttgccaaatatgacaaaagaaattcacatgtaattaaatttgatattgaactgaataagtgcaaaatggtaatattataaatattttctaacctcagattgtcatgagcttatttcattgcattgttcaaatgcttatatcttattcgccagtctaactatgggcatggtactatagtgatgcttagacttgtgtcatattttggataattgcatttttcgtcaaattcttatatatttttccaaccaagatcctgcaatgtcagaaggcggggttgacagttttgccatcaatcctttgatgcttaagtcagtattaagatcttaaattaaaattcaattgattgaaacttttttacctaacagtcatgtacaaaggtcttgtgatgtttgtatttagatcttgaaatgtcagggggtgcggttgacggcaaagacgtcgaccctctgatgcttaagtcagtaaggtgaaaggagtatgatagaaattaacacttaaaattgaaaatatcatgtcctttgatagaaattaacacttaaatttgatagtttagaaatgatactgtcttagatgaacaatgttccaactgttgcttatatcatgtccatctgatattttgactttgtaggctccttgtccaactatccttaaaatcttgtaagttccttcccacatcagacctaattttccactcctacttctctcatattttggaaaagtttccttagaatccaatgtccaatgttgaaccgaagaactcagatgctattgttaaaaggttgtgccagtttatgttgatacgctgcaatccttgtcaatgcttgttctctttgtttgtctaatgtatcaagcatgtgagccatattttgccagttttcatcattcgtcgtgtgttcaaatcttgtggttaggagccctgcctttgcaaaaatgtttgcttctgttccataggttaaggagaaaggtgtttcctcagtggaattctttgtcgtcattctgtatgcccataacacccttgggtgttcatctacccatcttcctttagcatcttctagtcttttctttaaagatgctaccattgtcttgtttgtcaattgtgcttgttcattcaattgtgtgtatttgggtgtcgagaatgtgagttgtataacccattcattacaaaatcttgaaagtctaagcttatgaactgcgagccattgtcaatc

SEQ ID NO: 235310 - DNA, 523 bp, Cannabis indica
ttgtgaagatttgctgaagacctggacatatttgatttcaaggcttcttttattgtaagattcatgtttaaatattagtgtttctttgtattataaacaagtgttctttcttttttctttttgtttttgttatggtaattagtttatatatttggaccctacttatagatcaagaggttttactcttcactcatatcattgattttattgattcccaaataccttgtgattgacctaaactgttcttgatatcttgtggtatatatatatatatttttttttgaacaatttgtttccctttctatatatatatattatgaaatgatctctctgtatatactaattcaattttatttttaataaatgcttccgttttatatattatcactgttataatagatatatgatattatttttttgttcttgtttttccttttagtgtttatacatatggtaattttatttaaattatttaagtattaatagttttggtatatttataactgtgatgaacaaatttgtt

SEQ ID NO: 235311 - DNA, 1095 bp, Cannabis indica
cctaacaagtggcacatttaattgtcacttttaagtaaacacctcatcaagaaagagattattctaagataatctaacctttgtcaaatatgctcatagcatgtttctaatattccattgatcttgtcgggttacccacctttcaagaataaaacaccatactattttcgttttaacctccatggttagtaataaccttctttaattcttaacatcatagccaaagatatcaaccttgtaatttcacaagattagactattccttcgtatgaattctctattctcatttatagtataaattgtctatactaatagcttatcaactcggtatgtctaactgttactattcaatcgaaataataagatcccacaatacatgataattcataattatgtctttctattccttatatgggacatcttaagctgacctactgacttagcttaataacaagttaagtattcatttctaataggtgttcaattagagcatttcttattttcacccactaacatgaactcatgttgattccttgtaaatcattacttgttaacacattctttcctcttagaaatctctggaacgactatgaattctgcatcctaatatgaatctttctagcgtactttgtcctcactcatacgcttttcgggatgactgctcgaaagatttcccatcttgagattacccaagttaagtatgcttaactctggagcaacgtatcagcgaatggtcaatctgatgtccaagggtctccttgcacgtaatatggaagtatacatagatgacatgctggtgaaatccaaaacatgcatgggccatgcagatgacctcacagagtgttttgaagtagtccagaggtatgggatgaaactcaatcccaagaaatctacttttggcgtcaaattacaaagatttctaagattcatagtgactcaatgtcggatagagggaaacccaaaaaaaatacaatccttattgagtatgccctccccaaacagacataatgttgaccaaagcttaaccaagaaggatgtcgccttgagtcgcttcatctcccgctcaactgataagtgcattccaatattcttcaa

SEQ ID NO: 235312 - DNA, 1096 bp, Cannabis indica
gtacgagtactatttttcaaactcaggcaaaccttctttatgttcaaccctacttgacacttaacataagtttttggatggaaagtaaatataacaaatctatttcaaatagtttttatgtaattatatctaatctatatatttatataatatctggagacatatggtggtaacatgttactctaaaattactccaaatgcatctatttgttctcttcctagttttctctcttatataattttttattctcatataatctattctcctattttatatattttttaatctatattaaaaaaaaaggctaaaataattaactctaaccttaaaccttctccaacacatccgtacctttaccacttttgacttaaccaagtcaatagagtccaaaacgactctgttttgtctaaaacaaaactccttggatcaagaaccttctcgatcaattcccttaggttctagcttctccttgaaaccctagtagagagtttcttgctcaaagaaactggatgctcgaacccaattcttaaacacaaaacacacacatacacgagattagatctagattgatcttatctttatcacacaaatatagaaaaacagagttagaaaaggtttaaaaaaattaatttttcttgaggttcacccaaaatggctatgtccccattgagctattccccaaattcggtagctcgatttcactatcaatcaactgttaagagttacaaggatgagattcaaagtcacatgtatgatattgactggtaatctctagatcaaattaaatttattatgtttaatcccactctctctatatatatatatatttactaattcaagtttgtttttgtgcatgtatgagtctctctccttattctccaaagatctcagctcctggatcttgaagaatctcctcaaccttaactcgataaggctatgtagtaggtatatatagctataggtctctctctctttagtttgttagttacagaaattaattaggtgtggattgatggcctgtcataatccattctaactaacttttgttaggaattaagttgtagaaggccgaaggccactgtagtaatgttgtat

SEQ ID NO: 235313 - DNA, 650 bp, Cannabis indica
aattcatggcacctctgagcgaggatttttgtccttgtgtgtaacatatttcatatttcctcaatttatcttgttttgctctgatcggacaagaaaagctgggctaataaaaaattcacactgtttttgccattgttccggagtcatatcaattggatgatgttttagcgcttcctcgtaatcctcaggttttgaataaaaacgtttgaaatgcacgtggcgactagttttctttgttctgtatctattagggcactcgatgtcgaaacagctccgaatttgttcagcattaggattctcgtcaatttgatagtaaaactacaaaaaaaaaaatatttaagtatattaacaaatttaattatagcaagaataaattgtctaaagttatttacccgagctcttgcaagcacttgatcctggtattgttggggcactgccttacaatttttgtaatgtgtaggacaaaaggcagcaatgtaatcgctcaaaacgcgtgggaaggttgcatgctctactcccactatcttctttgaaattggacagtacactaatggcaatgactcttttgcttccttccttcttttctccaagtcttcacgaatagatggaccacaaccctttgttcaagtatcttatgttttgaataagaa

SEQ ID NO: 235314 - DNA, 3628 bp, Cannabis indica
ggcctgccactaatcttgtccatttgtacccccttccccccccccccccatttattttttgtgggtgactaggcgtgcgtctaaagtaacccccttgttatagatttatagtaggtgttgtgtccccaaccttggttagcaagagttgacgcccacattcacttttctcgaacaatacttccaccttttcctctttcccatctctttcgattcaaacggggacgttgtcgacccttggcgacagtatcaccagctaatgtctgagcatttgaaatgtttagaagaaatttgtgagttccaacagtgtttgtctaggcttaaggaggagattgagttttggagggttaggggcatgctaatacggatgcccacctttccctcctcaaacggttatatggtgacatagcagagaaacttgctcacttggagcacatttttttgcttaagctgtctcccccttgcccagctctcatgcctttggctgtgaagccagctgtctgccaaccaggtgaaggtagatgttcctcctactacccctcaccatccaccattgcctagggtcatctaagtgatgaaggctcgatcggacctagattgggtctaaaagctccaactctccgaatgaagagcatgaagtatgtcggttctcgttctaactcaatttatgattttacaaatatgcataaaccacgccgcccgactaagcccagtgcaccacttccaacctgcaaacggttgattcccttcgggatggctgacatggtgagtattgtgactcgatctaaagccaaaaggatggtacaccaatatgcagtttcacaaggttttgaacctttgttcggtgatcgcgctcatttaccacctcaaggcatggcggcctttagcgaatacattctcaaggcgggtgttgcttagctgcttcaccctttttacgtggaggttttgaattactttggcataactcccctacaaatcatgccaaatggctggacacatttttacttgcttcttcattgccttcaagaaagcaactggtagggctcctactgctaaggaggtacactacgtgtaataactttcttcccaatcccacgttccagggtttctattacctatacaagaaagttttgactaacccgacggtcttcggttcagtttctaacacgggaaaagcttagaagcaagacttcttctttctgcccaattaagcgggcgtgatcgaagcctttcgaatgcctggtaagtgactccattgcctttacttacgttacttaattaataaggaactccttctttatgaccattcaactctttttttgtccccgtttacaaaggctcgtgaccctccttccctcatgcaagaggagtatacttccggtatactaaagctattcaaagctaactatgaaagcaaactctgccactatcttctgattttgcctaacttgattgaatatgggttggtcatggagaatgtcaggttaaagcctaagaagttgtatgccatgctgcttcccccaccagaaaaggaggcagccctaggcgattgagactcttgattctctctctctctctgagctatgcaagccgactacagttgtccaaaggagctcaaagatcccataccttctacctatgccggacaaggggatgaccactctatggaggttgatccccattttggtgttcttctggagatgcctcctcctaacatcgctcctggtcagcagtttcctgggcttcgggaaacacaggtgctctgtgatccccaagaactctattccaaccacccaagctctcccttgatacatgagcgacaggggtattacgatcctcttatctttttatcagaccatcacgcatcaccagcctcatatccacccataaacactcataaccaggacttttgctcaaataatacctctgctcatggagaagggggttcaggctctacgccctcatatgcggccagaggacttatcgtgggatcaatcttgcctatctcactatggtggggcattccaacagaccatgtctctatactcgagggaacagtgggagagcatctgaggtgttcccccactcgacttgtgtgagcagttttttcattcttctgttggggtgagtctcctttttattattttgttaacttcctctctttatttacatgtcttcttgcagttggctactgcgtctcaaaaggtgctcgcacagggcagagcctacggttcttcttctaactaccagacgctattaggtgacctgtaatctgttaaggcagagagagttcgttaatctgccctggtggactcccaggtggctttcattcaaacactagagggtgctcatcataacttggagttcagatctaaggaatgcatctttttgggatactcttcaaagcacaaaggatatttgtgtgaaaatgttgtagccactctttgttgccaaaaatgtggtatttaatgagacttactttcctacctcttctaagtccagcactcaacatgtatcctctattcattcaacctcttttccaactcctcatttttttaccataaaggttcatattggtactcatcatgttgtgcctactgctgttgtaactgagtctcaaacctcatcaactccacaagttgttgttccaaacttaacttctgcacaagagtcatcttcctcaaatgcgtccactacctcccttaagtcatctgaattgcctcaatacagtgatagcaggaactctattttactagtcaacgcagctgcaactagttatgtagcctcctccacctctcctactcctgatgttgcaaaggattcataccatgacaacaaggcctcaatatggtatttacaagcctaaagcatatctagcaaccaagcacaaactgacagagtctcttatgcctcgtgaactaaagtccctgaaagcagcacttaatgaacctgcatggaatgctacaatgcacaatgaattcactgttcccaaagctaatagaacttggacgcttgtaccatatgagccgcacatgcatatgatagataaaaaatgagttcatcaaattaaactcaagtcagatggcagcattgataggttcaaatcaagactagtttctaaaggttatcttgaagcacatggcattgattatgttcaaaccttcagccttgtatttaaaccagtaacagtgagaatggttttcactttatttgtgaaacttaattggggaattagaaaaaaatgatgtgtctaacaccttccttaatggcaacctttaagagactttttatatgactcagcgtcaagagtttgaagatccatccaaacctaattatgtgtaacatttacataaagctatctatggccataagcaaggccctagagcctggaatgataagctcagaaccattttggttgtttggggatttacaggttaaagggcagattattctatgttcatctttggtactggtcacaatttagtcatcctacttgtctttgtgaatgatatcctcataactgctcctaacactcagctttttaccaaacttgttgctgatttgaataccttctgttagtgtcattattttgtgacagtgtatgttctgttcaatgtctagtcgtgtctgg

SEQ ID NO: 235315 - DNA, 1258 bp, Cannabis indica
acaaccatatacatatattcttaattaagacatatatagattgtattttcattaaaatttcgtgaaatatcatcatcattgatttgacattcaaaagatcttatacttaaaaaaccagggaaaactatagcagccatagcatgtcaggaaatcttgcaatgataatctactaagatttctctcataaaaataaaaaaattagtacttctgcaaaatctaacccttgtgagtaattcttgttcaaaagctaagcattcaattatcacaaaatttgcctaaaaaaacacttgactaacaaactaattcaaaataaacaaagctttattaaacacacaaataactcatctaaatgcagagtatgaaagaaaagaaaaaacacttaccgaaaaaactatgctgaaagcccacaagtactcaaccaagaacccaagccaatcccactgttcaccttcccagaagtccttttcctcacctggaagtttgggcaagaaatatccatcatcaacgccaacaatcataaaaatatgtgcagaaaccctaagagcccaaatataaagcacatgcaagtatagaatgatcggaagggacgaaggggttcaactacctaggaagctaaccagcacacccaaaaaattacgtggctggattcgaaggctccgtgtggctggattcgaaggggttcaagtggccgatttcgaaggggacaatcggaagggacgagaggctagttttggagaggacgactgaaaggatcgaggttggttttcggagaacactggccggattcgaaggggataatcggaagggacgagggttgttccgccagagcattcgaagagtgggttttggatgtgtttgaacagcagtggtgtgtgtttgtgttttagggaatttattaagttgatgtatgtttatattcctcacaaattttgcgtcggttttaaaccctcgaaaaaaataataattgacagttaataactgacactaaaagaaagcaagttttttttaaaaaaaaattcactttattacgtcagttttacttttagtgtcattttatcaaacgacgctaattagatattattagtggcgttttttaaacagacaagtcttataacttgagtactattcacgtcggtcaacgccatgaatagtagcgttgaccgacgtaaatagtgtaatttgtagtagtgaatcaaaagcttatcctttcaatggaagaggtgataaatcaagattgagagaatacaaggataagaga

SEQ ID NO: 235316 - DNA, 1666 bp, Cannabis indica
ttttcaatcagacaaaggtagtcgaaagtcaacatcttggtcaatatttactcttggtggaggagctgtagtctagagaagcattaagcaaaccagtagtacagattcaaccatggaagccgaatatatagcagcttgcgaagcagctaagggagcagtttggttgaagaaattctacattgatatggaagtagttccagaagtagaaaaactaatggtgctctactgtgacaacagtgaagaagtggccaactccaaggaaccaaggagccacaagagaggcaagcatataaagatgaagtaccatataacttggcagatccattcacaaagctgctaccaacaaaatcttgtatgggtcatataaactaagagagatgcccagtttacttttagggaaagtgagagattgttaaggtttatgccttgaaaagcctataaagatatttataattattaataaagagtgaacattttgatatatgcttgaatgttaaattattaatatttattattgaataatttatattcaatatcaaaaaattctttattcatatatgaggttgtggcttatagatgtacaaagaactaagaccacttaactatgaataaaatagtcagtaacatattaaaattatggaatctttaatcaacagttgctagtacggttcactgatgctcgttctacggtgcaagtaatcttagttcagaatactgatgtagtgaaacattgaagtgaaggtgttgtatataatagagattatatatgacaaggaccgatatgaataaagttgtctttattaacatgttgtttactataaagacctaattcatatcataacaatgatcaatagtagatcggcctaaatcctaagtaatctataaatgttcatgttattagtttttttgattcactcgttaaagtttcttagagaagttgattcttatgacttctgttttgagaatttaataatgtggatggtcacgaccgtctcaaatattttggaggccctgttctaattttaaaaaataggcccctaacacaaaaaaaaaatataatttgtaaataatatttttaaatattatcatattacgaaagtatattttacatatttaagcacttaaaaactcaaacaattttattaaaattattattaattccaatacaacttcaatccaatatcaacattctatttaaaagggccatcattcgaacgttttttaagcaatttcatcaacactattcatatttatcgtctccaaaacttcattttcaatcgctatcaatgctaatccattaacctttcttgtaacatggtaaaccgcaagtaggacttcagcaactttaactttgaaaaacttctttctgcagaagcaactgtcacaggaatagtcaacaaaatcctatatgcaataattgtattaggaaaacaatctacgcctttcaaaaactttaatatgtcgatagctctcattttctctctaggcaatatttgccttaatagcttcaactccacacataattcattcccatcaatatcagattgttcattatgtttcaatgcgttttcaaaatgacaacaacaaaactttaaatttgcattgtctaatgactgtaacttgtcacaagtaaaaaaaaaccaaaaatattttcatattcttgata

SEQ ID NO: 235317 - DNA, 940 bp, Cannabis indica
gatagctaatcagattgtaaagagttttatttagggcataaaacccaacagtttgttgatgatagcaatgtgttttgccaagctaataatggttctgctggtagcgtcatgtcttttcttagacgatttgaacatgcttccagacaacagattaatcttgctaagtcgtcagtctttttcagcccgaatgttaatggtcagctcgccacagtatttgcaccattctacatatgcctgaagcttctgaaaacagcttttacttgggacttcccaatattattggaaggaataaaaatgctattctaggctttctcaaaaataaagtcatgaatagagttaacagctggtctggcaaattactatctggggcaggaaaggaaattcttttgaagactgtgatccaatctcttcccactcatgctatgagtgtttttctaatttctcttggcacttataatgagattgaaaagttgatggctcgattttggtggaaaactacaaatagcaaaggtaatggaattatttggatgaaatgggaccggctttctcatccaaaagatgaaggcggcttaggctttcgtctcctccatgaatttaatctgactatgcttacaaagcaagggtggaggtttctctgtcaccctgattctcttgttttcagaatttataaagtgcagtactttccccatgatgattatctttcaactgatttaggtcgtaatcccagctttgtatggcgaagtatttggagtgcaaaagatctggttcgtcatggagctaggagaactataggtactgggacttcaactcatattttgcatcaaccttggctacctgatcctaatagtccattcataacttcatctcatgtgggtctcattggtcatcatgttagctctcttttctcggttgaagaccgaagtgttgggttttgtgccct

SEQ ID NO: 235318 - DNA, 1765 bp, Cannabis indica
ataacaggtggtgattgttgttccatgatgggattattgtttgtaatgtcattgcaatggggtctatcaaatctagccacataatcttcaatatcatcctcaataggatcagcaacagtagcccgagatgattcaccacaaaaaagctttcggggttgaggcacacctctttgttccaattgaggaatggctacagaaaaacttttcttggccagccgagttaacaagggccacacatttcctttcgaaaaatcagtacgataacgatcgtaactcgaagtgggaagagcagatcctttgatgaaaggttggtacgcaagtgcaggctcctcaccattgtcaagtttttcaagaaaaacaagacatttgttgaaaggatggccaatgatcccacactccatacaatactcaggcaatctttcatagcaaaatttgacccaaaattcatcccgaatatgtgagagagagagatcatccttcctcttttcaaagactttgaaacatcaatcttaactctgattcttaagaaaggtccccaaccttcgtttaatgagtcttcaaaaacctcaatgaattcaccaattatgttacccagagcagtagccaaagacttagtcttactaagaaaaggtaggcgataaatttgcacccaaaaaggtgtaaatttcaggtcagccgaagtaaaatttttaccaatttctggtgtatgcaagaccatatgatgattttagaaatggaatggttcacgatcaaggactctcattttgtctccttcacatccgaaagtcaataagaacatgtccgaagattctgaaactttaacagggaatctaccatcccaatgttctgccatttgattatgcaatgtagataaccagacttttttcttggtgagaactttagcatacaaaaccaggtcaatagaagtagcagtagcagtgacttcttggtcgtgaaattgaaagacagattcttcgtcttcagtaagagtaatttttatttcatcttgttagtcaggggatccattttccaggctgaagaaggataaacgacacaagaaaaccaatccagatcaagatcagattgaacaaagtactgggtagaaggagataactgctatgaattgggtggaaaatgcaaaaagaaaggcatattcaaaaggaaaaaaactgtaaaaccgtaggggactataactgccacagagcactatattgggcagacgctcaaaaaaataaataattgaacgtggaaaataagaaaagaattctgcattattattattattatttattgtcagaataatttcttccatcgatgcacttcattaatgtttattattttatatccacaccaactttactgtaatgagacaaaataaatcatatactagtgatttacttaaagttactcttttctatgagcgacaaacccattaatattaatagttcccactaacaaaaatattgttttttaaaaaattaaaagtaatttttttaatttgataattatagaccaaaatagtacaaaagctccacaaaattaaataatataataagagtgattataatataggtataaatatttttttataataaataaagccctataaaataaaaattcttaggtgatcactgtttctattgcatatgaagtatcttcatttttataaattatcattaacaataatccctaataagataaatagaagaataattaaataaatccatttcccttttactataactagtcggaggcacacgtgctc

SEQ ID NO: 235319 - DNA, 872 bp, Cannabis indica
taatcagccatttcactacattcgagtgttctaactgtgggtttgccataaacctgcttaatacacttagagaatgagctatatcaagcctagtgctaaccatgatatacatgaggcatccaacaaccatatcataaggtaccccttcatgttttctctctcagtttcaatcttaggacaatattcacttgacagtttaaaatgcccagcaagtggcacaacagtggtcttggatgaatccaagttgaatttcttgattactttctcaatgtagcttctccgagtcagcatcatctttccttcttgcctacttctaatgagttctatccccagaattttcttcgtagctcccaagtctttcattttaaattcaaaatttagtttgttttttaatgacttgaattttagtcttgtctttgataatgatcatcatgtcatcaacatagagtaataggtacacaaccttaggtgtccctagttccttgtagtagagacaagagtcaaatttggatcttgaaaatccaatacccatttaagaaagcagttttgacatctaactgctcaacctccaagtcactgtgtgcagcaataactagcatcactattatagttttgtacttcaggtgagaaaatttctgtataatctaccccctcaacatgtgtgaaccccttagctactaatgtagctttgtatctaggtggctcaccctttgtcattccctctttctccttaaacaaccatctgcaggagacaactttcttgtcttatggcccgggaaccaatatccaggttttgttcttcttcaaagattgcatctcttctcccatagcagcaagccacttcttccttgatttactagcaatggcttctt

SEQ ID NO: 235320 - DNA, 1016 bp, Cannabis indica
aatacacgattacttaacaaaatatttttaattaatttagatcaaatgaaatcaaaggccgcaatataaacttaattaaaagataaataaaacctagaaaaggaaaacattatttctccctcttaacacacaccctctggaaattcgattaaacaacatcaataacagattttacatcaatcataatcccctgcctcaaagaacctagccaaaatcatcataatcatggaaattagccatttttgtgcttggaaaaattaagcgaggaagatatgtgtagcgattgaatggatctgccaagagagataacaagagagttgaattcgattaatttttctgttaaaattgaggacgagaaatataagtatatttgattctcaacttcaagcgttttgggaataaaattggtcccaattcaaatatggtcgtgaaatcaaacagggtgatttgatcttgatttgtgtttgacacgattttgagattgaatttgtctcaaaatgaatataatcccaattcttttaatgaacattaaaattgcaataatatgataatgcccaattattaagtgtaattgattagtttttgaggtacaaaattaggataaatgtagtttgatttgaaggagaaaacataactacaaaatgatatgaaaattgtaaaaattcattgtaaaactggccaaaatgtaacactgaaaaaaattaggaaaaccaatacaaattagcttttaggaagaattaaaatcattaaattgtttgtttgagttaaatgcagatgcaaatgaggtgttcgatgtgtttttccttttaaggttttttatctttttaattaagtttatttgtaatccattgattttatttgatctaaccgttaatagatagtgtcaaaaataatgtaagaaaatgtgtgtccacaggtctatatacttcagcccaaaaaaaattaaaattttaaattctattttattttctaagagttttttcatttttacacttcaaaacaggtttttttttttt

SEQ ID NO: 235321 - DNA, 827 bp, Cannabis indica
ttttttaaaatttgcaaaacactgaaatttctggaagcgagatttttttatttttttcaattttcggtaattattttatatttcggtatttatgctgacgtggcaatcggtatttgtgcaaataattttcttaaaggtatttttataaataaaatcaattttaggtataatattaaaaagagcccttatttttaatgatgaggaggaagttacaatgttgaggtttttttcttttttcttaaaacgaagcacattacagctttttcaaccaaagtgaaccaattgaacaataaattagggtgaatatcaatacatcacatctaatggagtattgattcaatacaccaatattcatagtagacttattttcattccatacgtgcaccaattaaattgctttataataaaggtattgatatatttattttgggcattgttattaggcaccagtggtacctagcactttctcgacatgtcgcgttgcgattggctagcgatactccttaaaaactattatattaattatatggaactcgatacttagttagaccgatagcgatattgacacataggaggatgctaggcaccactggtgcccttttaagagtgtctattcaaaaaaatttcctgctatagtttgtattcattataacacgaaccagatctattttaactataattggtttaagttattttatgttatttatttttatttattatgttacaaaactgattatatttcaattataactggtttgagttattagtttttattcatagaacccggttatatttttagttatttttgagacatttacttctagtga

SEQ ID NO: 235322 - DNA, 883 bp, Cannabis indica
aacaaaggtgaagttcgttttgccatgcttttactataattataaaatttatcttcttctttcatatctctttctttttctttcattctctaattgtaatccagttttctcaactctgtttttggttcatcaactaattccaaattcccaacaatgaagtaacaaagttctaagttatttttagaagttaagttttattatattatatttatggtaccattctggttgcacaagttaaaaaattagaaaaaatttacaattattatggttagtgagctgttgtgtgtaatttaacttgtgctttgttttagcttcctagaacttctaaataattgttccaccattcttttggctcttcctttcatttcttcataatttttaattgctctaaatattatatttgaaaaggtcattctcaaacaagttgatcgaccaacatgtttttatttctaaaataataataaaaagaaaatgaaaatcgcattttattttttttccattcgatattatacaattcatgaagaggaagctaattctctgttatctaccactgtaccactctgtctttgtttgagagtgttacacaccttacttatatagatctgcatttagagtaagaaagtagttgcaaatgaataaaatagccttcaaaaatacatgttatattattattaagattttttttggcaactcattgaattaaaaaaattcttcttccatatgtgggaattctggaaagttgatatctgagcaatgtcaaatcccatggtttattgaagagaatatagattttggtttggcttgagccaaagtatcttcttatgcaaatactgtccaaagtaaatgtaaaaactcaatcaagttcacaccttataatttgatt

SEQ ID NO: 235323 - DNA, 718 bp, Cannabis indica
tattttccgacgtgattgtaaattttcactcactaaattagttgagtccatcatcttcaataattatataaaaaaaaaataattatataacaaacaaaacagtattatagattatagaatatataacattatttttataattcaaaattctaattttattagaaaacattatatatatcattaaacctctatcacaaatggaggaaaataattatttttctacaaagtttaaagtcaaatattataaatttcaatatatttatatatatatttattaatgaaaagatttaagccttattagttaaaggatatatgatatagtctctactaatattagatccatattggtttttataattaaaatgaaacaaaatacaaaatacagagtatatataaatatatatatttatatatatatatattgctaatcttgtagagtaagaaaatctttgtgaataagagctataaaaattgacagagaaaaagccaaaatgaaatatggagaagagtttttctgagaaaaataaaatgaaaaccctaatggagttttttgagcaatagatgaaaaaggaaactgaatttgaaaagtttttttttttaaataataataattcatttaattaattgtaatggagaattaatgctggagaaatgaatactaacggtgctactaaagttttgtatttgtaggattgtaaagtctgttaaatacttatgt

SEQ ID NO: 235324 - DNA, 1120 bp, Cannabis indica
cccgtgcatctataaatagggacgaaatctagggtaaaagggatgactaatcttttttttttttgttatctattatttattagataattaattgctatataatcaattctgcaatttatttattataaaaaggctaatattttagttaacaaaaaatatgtgttaacaatttagttctttccttgagagcctttgtaataaaacgtagaaaaataccctcctcaaaatttgtactcatggcagacgatactcggcgtaatgaagagaatcagctagaaaagacaacccaaagtccgggaaaggagccttaggctttgcaaagaactaacactgttgaaactccccatcctagaagaaacattggagattttaatcaaactggtgaatagagtccagaaaggtgaaagaaggatgcttatgatccaactagatacgttccactgatggaattggaaaataggtaactttagcaacgcctagctaaatcaaactggaggaatgccgagttagagtgtgaagtgacgacagcaaaggctacagaaggagtggcccctcaaaatcgacctaatccatctacaagacgactaagggggacgcctcaaggttctaaaaccacgagacaagggaataatcaaggaaatccctcaaacactcaggaagaacaacctagaaatgtgagagatatcccaatggaaggagaaaacccataaaatcctagaaacacaagaaatcaagagactaaacgtgataatctatgaacttcccatggatttgcaaaataagggaatgaaaaacctggtgtaccagagtcttctcgcatgaatacaaataccagatagacacgacctaaaaaccatgaaattttggagcatgatgcgagaaatgctggaaattagcctgggacaagttgaacctaaggcatctacaaaggcctaattgtaataatagagatagtacacacacttgcttgagtaggggtcgtgtgtcgaatctcttccgaaggggaaggctaatgcaagaaaagtcacaagatactggctcgagtacaaatccaagtggatcaaagtcaaggacccgcgggcatagcagatcgacctaaactcatgcccatgacaggcga

SEQ ID NO: 235325 - DNA, 576 bp, Cannabis indica
acaccacgatcacatcataaaaaccgccatttcttatgaaactgtagtaatgagcaaaaactgacataaaaactgccataaataaataataaaaatttttgtccaaaagggcagtagtcaacaagcagttccaggttataagattgtaactggaactggggggagtagtgtttggaggggaaaatatgagcacagaatgaaggcccaataaaacaaaataaaagcatcataaggcccaaacggaatgggtactcaaaagttcgaagttcgggtacattaaaaaggcccaacactatgcagcccaataagaaccctaaaggttaaatacgaacaaaaagcactaacgacaaaaaagagaagtaaaaaccgacgaaaattgaaggaaagaagagatggaggactggaaccaatgtttgccgacggaataagggccaagcacaggatatattaaaagtaagaacccaaaaggagtccctcgaccaacctactgacgaaagacttgtccccagaacgtaataaggaaaaacaccaagatagtgccttagtaaggacaaatatctccgacggaaggagacc

SEQ ID NO: 235326 - DNA, 686 bp, Cannabis indica
atagtatcaagagtctcttaagtttttatcttcttctatcactactattgatgattcaagtaaaccaaatttgtgcctccttttctcatcttccgaataggtcattgattttggtgctacaaaccatatgacaagtagttctagcttcttttctaatctttaacctcacgcttctatttctactgttaccttagtcgatggatcaccatctcgtgctcttagatttggtccaattactcctactcgaattctttctttgttgttggttttacatttacttaatttttcttttaatttgatctctgccagtcaacttactcaggatcttaactgttgtatctctttctttttatcattgcttttttcagaatattatgatgaagtaaattattggtaaagaacatgaattcgaaggcctatacattcttgatacactaatacttaaaatcagttgcttgttccgatgtataatcccttcaaggcacattgtaggttgggtcacacatctcttcctttgcttaaaaagttttgtccacgatatagtaagttgtctttgttggaatttattttacaaggatcttagatggcattaaaataatgaaaatatcaattagaaaaagctatccaagtggccggccaacttggattttgcagttttcacaatttttttatttctattttctcaa

SEQ ID NO: 235327 - DNA, 704 bp, Cannabis indica
tttggtatcagagccaccatgttgtcttccgaagatcgtcatggcatatacaatcatcattagcgatcagttcgtctcacggttcagttaagtttttattactttagtagtttattttaatagtatgaattaaaaaaaaaaaaaagcttgataggaagcatgtttgtagcctgataagcgacaactagtaagttttacttgatcacgatctcaccaaactagctcttggttacgcaagctgttctaatattgtggatgctaggaaaaacactaggagtcagggtaactaggtcggatctagtggtggttagggagttcagattcccccaaatgttcgtggctgaggtagggcacgcggttggggagatcttaacccaccgtaggctgcctaagctgcccaagaatgggaaaataggtttacagaaatgcaggctagaattaatgagcacgatgaagaaataagatgcttgagacaacatggtgctcctgcgatccctgttccagaaatgcaagtagctcctaccccaactgtgcacgcaggactagttgttgtagtgaatcgtatggaaccactgtatgaaaggttctgcaagcaggcaactccaatctttctgggaggtcccgatgttataaaagtcaagccgtggcaaacagttattactagaattctgaattttatgggcatcaccgacaatgacagagtg

SEQ ID NO: 235328 - DNA, 622 bp, Cannabis indica
cccttggcatgatcgccccatcgagtaaggggcattctaaatctaaggagacgttcctcaaattctacaggcctacatcgagaataatcttgagcagagggcacatgatgaacaactaaggaagacttaccggatctggaggtgctggcgtcaagagccccagtgttgggaactgggagcaatagcttaggccgggaaggcacctgctctctgctagctcctacccgaagagccctcctggcagcagcttgagccttaatataagctaactcatgttccctcctaaagaggtacttctagtatcggtcctccgctgaggcaataatgtcctcccgaagcacctttttagcattcggggtgcgaatattggaacaaagaaccttggataagttgaagtcgttcaccgactggctctccgtgataagcttagccctccgtccttgtcatatgtggagaagaccttggcgtgctggaggaagagttaggtaggggcggtgcggtgcatcaaaggaaccctaacccactccgtgagaaattctaggcgttccacagcttggaacccggaagaaaagaaaaacttatgacgatactcctttacattcttttaaaaattataagggac

SEQ ID NO: 235329 - DNA, 1185 bp, Cannabis indica
aatatttacctaattaaatttcaaaatgtgtgctttctactaaacctttgctattttgtcttcttttggttcagaataataggtaaattaatccttaaaaagaaaaaagggtaaccttcttttggggaaaaacataaaaacatactacaaattattttttcttctctttgttaattaaattattattagaaacggaattggctaataacaaccaaattttaagcattttaatatatagtatataccaccgacttatttgattgatcctctacatttaaaagaataataattgaattgtgattatttaaaatacacacatgattaagagtgtaaatggattaggctgaatttgatctgattatgattcgacctgatttaaatcatataaggatttgcttcgccccacccagttagagatgatctgtgatcggatcagattcgacccaatttattcggatcgaatctaatccgacccgacttcttttttttttttagaaattttaattttatatctaaaattataattttatatctattttgattttgcattggtattagttaacacaatattatatttagtattagcttggattaatagattgtgtaaagataataaatttttaataaactcgaccctaacaccaactacaggttaggttcgggttgaggtttcggtccgggtctcgggtccggtctgcgttcttagttcgggtcccgggtcctaggtctaggtcttgagtccgagttcgggtctcgggtccaggtcccaggcccaagctcaggtctcgagactcgggtcctagtcttggtcccaagtctcatgtctaggtctgagtctgggtcccaagtctcgggttcgggtctcgggtctcgggttcgagtctcgagtccttagtctgggtctgggtcccggtctcggtctggatctcgagttcgggtcccgggtcccggtcgggtccgggtcttggtcccatgtctgggtctaggtccaggcacagatgtcggatctcggatctcgggtctgggtctggatccgggtctgggtccaggtatggtcccatgttcgagttcgggttcggaatccgagtcttgaattaagtttttttaatatattgaaaccgtatgtgatcagatctaatctaaaaaaaattaggtgtggcggagcaaatatgatccgagatccaa

SEQ ID NO: 235330 - DNA, 855 bp, Cannabis indica
gactcgagctgggcggtagatggcatctcctgaatctcctttgtcagctcgtcgacccgattattggtggctagaagtttcttgttcacttcacccagctcagcccttacaacctcgatctccttcttagccgtatccacctccttctacagattagtggtggtggtgatattcttcaaggcattagacttagctcgggagtaagtgcaagccaacttcaaattgagctgcacgggaaaaagtcaaaccctgcactggtaaaaagataataaaaactaaaggagaaatacttactcgagttgcctccttcaggagcccacccatcaaaagctccacggacatctcgtccccattgagtagttggccgttcaccttaggaagtagccagtcctggtagtgctgaagcatctccttgcccttctttgttttagggttcagcactataggagcgttagaggacttggtcggaccagacccatccgtgatacctcccttggcacctttgggcttaggggccttcttgggcagtacctccatgtcgaataccgtctcctcgggaacctcgataagcaactcgaccaagcccttcttcttgggcagtatctcgttaccctttgatcgtttgggcaaaggggtttgaccagagttatcacccgacctctttctcagggcttggaacaccttctaagacatagctgcatatgaacaaaacaagaaggttagaaacaagtgtgatttaagccatgtcatatgattaataaatatgagttgaaataccctgcacgtaggcaggagcattcttccaaacgagcacggatagaggctcatcgtctgaagagtcttcttgttcctgct

SEQ ID NO: 235331 - DNA, 1594 bp, Cannabis indica
attcttgtttggactatgttgtcaacgaatccttgtagtgttatggttgcttttttgagacgtttttctgagccgatgttgagaaacctctttgttttccaccaaaatgatgggtacatgcacctatataattatcaaaattatatattaatatctctatatttagtttgtaaacaaattaatttttagtagttatattaacttattatcttcacgttattattatttaacagcttaaggttccaacgcaacaaatgtggtttctaaaaatatatattttttaaattataaaatatgtgaatttaatattaattgtatcaatagggattataagttaaattttactataaaatattgttattaaacacctctaaacatgtcactttgtgaatgattaagaatacttcttaaaaattattacattaaattatatgtgactcaatatttaattgactcaatagcgacacatagaaagatattagacactgatactttttagcatttctttcattataatacatcataaaaatctcattttattatattaacatccaaatttcaataatattatattaaaataaatatatatctaaaagaaattgtcataattttccaattaattttaatttttgtatataaatttaaaatacctgagagtgctaattttggtggcatcttcataagctctcaagaactcataaccaatgacacttccttcaccctcaagacaaccaagttcaaacccgaaagccactttgaacacattatcgaatccaaatctctccaaaacatgttcaaagtcgaaaacttcacccgttttggaaagtgtttccaaaagaggaaccaacttggtttcgagctcgagagctacattgtccatcatgaaatttctataagacttggtgttgagcgcatggttggcaacctttcggttgaccttccagacttctccgtcagaggtaaacagtcctccgccgaagaagtccaagaagtaggtgttgaaaacatcccctttcgggtagttttcaaagttttccttcaatatgtgctccacacaagaagggttggccgtcatgacaccctgaagtcctccaggaaggcggaggacaacagtgttggtgggcgagcttaggattttttcggtggcccattccaaaaatctatggctatttttcattagctccggtaggactccaaaaagggtgtagattttggtgccagttttgttgatatttttggaggttgtgggcttgtagtagaagaagatgaatattatagagagagaaagtaagagtaattggagagagatggaaaactccatagatgtaaaaggagagattagtgaagaggtactcatgatgatgacaagtggttgtggtatgctgctgtgtttataattgcatgattttggtttctatttatagaacggaataagcaagcctaaataatctctattattattattataactattattattacactactattatttagtttaataaggtcataataaaatataggctgatgttatttagcggtgaagttttgtaattgattgataataatttataatagttattcaattaaatta

SEQ ID NO: 235332 - DNA, 508 bp, Cannabis indica
attttttctttaaaaaaaaaactaattcttatatttttttttcaaattgtgttcatagttctaaacaactattttcatctatcaaaacaattgttaaacaactattttttaacaatcaacaataaatgagatttaattcaacagtagttgttcacttgtaaacaaacaaccattataatcctttaaacaacatatatatatgaaacacttctcaataaaatacagttgattatatttgtatatttttagttataatctaatctcatttatttattaaaatcaatcaattttctatatcattaattatttatctgatttttaaaatttaaaaaatatttacaaccatgaagaaaactttttaaaataatttaatcaggaagaaaatcattaaaaaaaatttgtaccttgtatttgttctctgattcatttctgggtaagcgttgaagtttatctgatcttcttgtattcaaattctctgaccaatatgatttgaatttttgattttagg

SEQ ID NO: 235333 - DNA, 592 bp, Cannabis indica
taaaataaattccaacaggaaggactcctcctagagtcacttccactagagtaggagacaacccacattgaccaattggccacatgggaacaagcactcaaggggaaacccttaatgtgtggggtacttataccattcatggtagtcgtgccactactaagtgagaaaaaagcaccgaggattcataaaagggaagcaaactatgatcaagcatccaaaaggactcagactcgagaacaaagaccaatggtccctttgcttgacatgaactggtcactttttagggaaacaatctacgagtgagcgtctgaaaggactaaaactcaagaatgtgggcctacaggtccaccacataccactgataggacgaaccataatcttgctcggagtaatccgaataatacaagaaagcattctcctccgcgagattctccttgaagactattttgagaagaatatttgctatagtgtttctgacgatctcgctcatgtaaatcagcctaaggacgactctctcatcaatatgggagaaatccctgacatttccttgatgaccccatggtcaggttgctatagccagacctaagttgat

SEQ ID NO: 235334 - DNA, 597 bp, Cannabis indica
actcctatcctgtctcttatcaagttatttttaaagggtaggttgaaaaatacttcttttatttttcaatgaactaaatctacctttaattttatatttaattgaaacatacttttttttatatgtattgtactcaaaatatcctgacataaaggagttatatggagagtatattgaggtgacaggggtaggggtaaaattggtaaaatattttaaaaaaagaggtaaaaattgtaagctttaaagaagagggtaaaaataaaagaggacaatatgaaaagggtatagagtccaattttctctatttttatttatgaggatttgatttagcctgttttgagggcaacgtgaaactcaaatttagtgataaattaatattaaaagaattattattttaagcccaagaatatcggcccaactaaaggaacgaaggaagcagctacgtcggccaggaacgaagacagcggctacaggagcgtcgtcatcgtcagtacgtcgtcggtcgacgtcaccgtcggacggctatcgtctgagagcggttcaagagcagtcgtcgtgagtcgtctatgaggggttcaagagcagtcctctgagagt

SEQ ID NO: 235335 - DNA, 1341 bp, Cannabis indica
aaaaaaaattaaagtattaaactttaatataatctaagggatgtgagaattaagagagtgttggtgtgaatttggaattttattatgtattaataatgttagagcaaatgctcttatatacaaagctaagttatactcttaatttggtgtaatggtaatcctaatgaaattgttattataattctactgattcggtttgaaaaattttgtaatgcttttacaatgtttagtattaaagttatcctttatacattttatttcgtactattatttatcgaattaatttaaagtatggaaacaccattcattttattgccattacaaaaataaactaaacattataatatcattcttatgctattcttattacattttattacaattctcattatgagagaatctgggattatatggtggtttaaagtgtatataagttctatctgaaaactaattgactatgagagtctatgaatcttatatacagtacacattagcaatacaagactatttttaacgagtaataatatgaacatacataaatcatacacaaacatgacacacacatatgtgacaaatcatttttgatatgtgaaactcatcttcaataaaggtgattggttgacattacttgtcatataagtgcgtcaagtttgtgtgtaaattatgtgtgcatatatcattacttatttctaatacactctcctcacatttggatttgaaagtgtgggtatatataatgaatgacatttaagagaccatatagttaaacgtgatatttcaaagaattctacacaaagccaaatcaagaaatttgtgtgtacacgaaatttgtgaatttttcgaaacatgtcaaagactccaacactaaaaactgatatacattggtcgaaaggtctcaaataaagattaaaggcagagacaatagaagtttttgtttgactctaataccatattagaatttaggatgaaggtgcatgtagttccatctcaaaactgattgataattataagagaagtagtccataaaccttatatataatattatttttccacacattagtaatatatgactatttctaatacattctattacattgaatcaaactccaacttatctaatagtttactcccacaaagtttgagattcatatccttatatatagaaattattatagttttctaatctctaaatattgtagggttggaacttggagggcatctataattttcttttaataaaataaaataaataaataaataatctaatgggtccataatttgtagagggaaatttgattttctatgcttagaaaatcaaaaaatttgatttttaaaccaaaa

SEQ ID NO: 235336 - DNA, 1952 bp, Cannabis indica
ctttcatactattattattgaattatttaagatgaacacattcattttattgccaatattacaaaattaactaaacagtatatatcattgttatgctattcttattacattttattacaatttctcattatgagagaattttgggattatagtggtttaaggtcatatagaatctatctgaaaactaattgactatgagagtctatagatcttatatacggtacatattagcaatacaaggctatttttaacgagtaataatatatacatacataaatcatacacaaacatgacactcacatatatgacaatatgtgaaactcatcttcaataaaggtgattggttgacattacttgtcatataagtgcgtcaagtttgtgtgtaaattatgtgtgcatatatcattacttatttctaatacattcttctcacatttggatttggaagtgtgggtatatataataaatgatctttaagagactacaggtcaaacgtgacatttcaaagaactctacacaaaaccaaatcaagaaatttgtgtgtacacgaaatttgtgaatttttcgaaacatgtcaaagactccaacactaaaaattgatacacattagtcgaaaagtctcaaatagagattaaaagcagagacaatagaagtttttgtttgactctgataccatattagaatttaggatgaaggtgcatgtagttccatctcaaaaataattgataattataagaggagtagtccataaatcttatatatagtattatttttcagtaacgtatgactatttctaatacattctattacattgaatcaaactccaacttatctaatagtttactcccacaaagtttgagattcatatccttatatatagaaattattatagttttctaatctctaaatattgtagggttggaacttggagggcatctaattaatttttttaaaaaaaaaataaataaataaataatctaatgggtccataatttgtagattaagccgagccctaacagaattggtccccagccatgcatgttacaagttttgaggcctaaaatatgtataatctggcccagcataaaagtgagagcaaagtagcttttgagctgtgttaatgtccatgagataaaagcaccaaaatgcatagaattcagtgaaactttagtccaaaaaaatatttgggctgcatgagttgtcctaataagaaatggacaaagtggcttttgagctgtgttgattgatgatccttcttttactaatcactcataatattgttaaatttttcttataaatcttagagagaacccctataatgatgatcatataggaataaactcacttcatgaattcaatttaaaaggttgaagattttagtagaattgattaattactcgattttgttttcatatgaggtccgagatttgattccctctttactacttaaatagtttagtatatagtttgttttaaagtctgatcagttctgaatattgtaatattaagagaaccttgtttcgaaaacaaaaatactaatatattttattttatattttattttgattcatttgtaaggttatatgaaataatttaataaaaaagatttgccaatcatgaaaaataggagtacctgatattattattagatgcaatgaatagacaagtagcccataatattgtgacataagtttctattaagataatttaaaaaaaaaaattatatctatcttcttcaaagttataataagttaaggaataatgaaagtgatctttgcatagatttttctagtgtttttttagattagtatttttaaattttattcaagggggattttagaaaataatcattgttaaatgaaaagaagttgactggctaagcaatatgataattttataatgaaatgcatgtgattgatttgattatgtacaaccaatggtaatgagcctat

SEQ ID NO: 235337 - DNA, 2726 bp, Cannabis indica
gtcctcttcaagacgggacaaatttccgaaatgcactttttgagacaatgtagatctcctatttgaactaaagttctattttctcaatccatccccaataatagctacaattacatatttataagctttcacgctatttttaaattactaataagtccctatagtattttcatattctaacaacctgtgtttaggtttaccctgtaataggaaatgaatgcataattttattgtgatacatagtctgttgtgtgaagtttgaaactttagtacaactattgattatataatcttgttataatatatatagtgattggtaaatctagtttctttatttatgttgggaatgttaagatacttggatggctttatgattgaattccaactaatcccatgttaggaaatctgttaattgaattgggttttatgaaattacattgaagttttgtgctttcttctgaataatgtagaattatttatggtaatattggttgtagattaaattgtttctcattgtttacacttgtatactttacatatcattgttttacatgttatatcttgaatctgagcttcgactagtaaaactttaattttcttagtttcaaagttgttgatttctcgttatattttagttttcttgctttttggtgagaaaaatgtatttttgtatataaaaacatagaaaaagttttttttttgaaaatacctttttttgctatgtttcttaatggttaaattttgctgaacaaaggcttgtattacaaaatgcattcttttattgtttttctaatatggatttgtatttatgtttctaatctgtaaaggctaagggagagtgagtgagtgagaaaatggtgaagttcttgaagcaaaacaaggcggttatcgtccttcaagggcggtatgctggacgcaagggtgtcatcgttcgtaactttgatgatggtactcgtgatcgcccttatggacattgtttggttgctgggattaacaagtacccaagcaaggttattcgcaaagactcggctaagaagactgccaagaagtcccgagttaaggcctttgtcaagcttgttaactaccaacatttgatgccaactcggtacactcttgatgttgatctcaaggatgttgttaatgttgatgttctccagtctaaggataagaaagtcactgccttgaaggagaccaagaagcgtttcgaggagagattcaagaccgggaagaaccgatggtttttcaccaagcttaggttttgagtcatttttgggtatttttcaaacaaatgttttatgtttcttttaatggacatttttcaatacttgttaggtttatttgctgtgttttttaatgattaaattttatgaacaaggctttgaatttttttccccttttcttttgttttgagtcccaatccttattttgcttatatcattcccaagcaaaagtgagcttgagaatgattggaattgaggcgaaacaacttattttcggtttcagaaagagtgctcgggtttagttgatcgagaatgggaaaaacattgagtagaatgatggaagttttgattgtcgggagatattcccggcggtgaagttttcgactttcaagtgtctcttttggctctttcttagaagagaagaaagaaaggccctaaggtctttgatgacaaaccttaaatcaaaatgacagaaaactaataatgagccaatatgtaaagatgttcatttacaagttttgatgacaaacttggataggtgttatgttatgcacaacgagaatataattacaaattacacaaagttgttatgttatgcaccatgactctaatttgtgatatatagtaatcaattatgtagtattataaaaatagtatgacccatttggcctataatcactacaaatatcaaaattcgcgacagtcttaaaaacgatttttgtcgagaatcgtcgctaaaaaaattaatttttaaaactgtcgagaaaaatttagtattttcgtcgatttaaaatagtagttaacaaaataggcaacatttatataataaaatacaaatttttaaggggcttatacccaacggtttaaaaccgtcgggtataaggcccaatattcggttcccacacctaacccccaatctcgcgcacatcctcattcccacctaaccccactaaagaatccctaatccctctctctcgaactagctgacggcgaccaccaccaccgcctagtccacccacatctcacacgaaattcagcttccaaacccacgagcaacctttggaacccaccaccacccttcaaaacacactgcttgatctctgcctcctctgtctttttctcctcagttaccgtctctcctccgtctccccatcgaccagacaatgtccgccatccaccaccaaactgacggtctgtcttcctcctcaaggtatatgtatttatttatatatttgtttattaattttttttttaaaaaaaaaactgatttatatatttatatatattataaatttatttattattattttcttaaaaactgaatatatatttgtttatttatatatatttttattttttttgttgaatatatatatataaattatgtgtgtaatttaaaattagttgttcatgtaaaaatttgatgtgtgttaaaaaatttaatatgttttaaaattagttattattgtaaaagatttaatgtgtaaaatattttttttaaaaaaa

SEQ ID NO: 235338 - DNA, 1373 bp, Cannabis indica
atttaggatgttaataaacatagttgtgagtagatctatgatcctggtaaaataaatttccaacagatgacactctggccaagtgcaaatccagattagtagccaaaggttatcatcaaacgcctggaatagactattcagaaacatttagtccggttgtcaaaccagccaccatccgtatactactcaccattgttgtttcataccagtggacagtcacccaactcgatgtgtcaaatgcctttctaaatggcacattgacagaaacagtattcatggcccaacctcctggattcgaagataagttgaacccaacccacgtctgcaaactgaacaaagccatatacggcttaaagcaggccccgcgggcctggaatgaaaaattaaagaccacccttctcagcaaaggatttacggcttctcgagcagactcctcaatgtttatctatggatcaggtgctcatctcattatactactagtatacgttgatgatatcctcatcacaggacctaatgtctctcgaatcaagtgcattatccaggaactaaacaacgaattttctctcaaggatctggggcccctccattagtttttaggcattgaagttcttcgaaactccacaggcatgtacctatcccagtcaaaatatatcactgatctcttgaccaagctcaatgtggaaggggcaaagcctgcatcgaacccaaccagctctgctcatgttctcaccttaaacaatggggagccctttgatgatcatactctgtttcgcagtacagttggtgcgttacaatatttaaccttaactaggcctgacatcacattcatcgtgaataaactaagtcagtttattcatgctcccacaaatgtccactgggaagcatgcaaaagattatttcgatatcttaaaggcactatacatgagggaatccatttcaggccatctcttcatctttctctccatgcctattcggatgctgattgggcgagttcaccagatgatcgaaggtccactggtggctatgcagtgttcctaggaggcaacttaatctcatggtcggcaaaaaacaaaatgtagtagccagaagcatcacagagagcgagttttgagctctagccaatactgcagcagaggttaaatggctctgctatgtcttatctgagttgcactttactttaccagctgctcctataatttgggttgacaaccaaggagcagcatctctagctgcaaatcctgtatttcacgccaggtcgaagcacattgaaattgatctgcactttgtgcgagatcaaatcctggccaagcaacttgaagttcggttcgtgccttccattgatcaaacagctgatatacttacaaagccactct

SEQ ID NO: 235339 - DNA, 2303 bp, Cannabis indica
atataataattatttattataaacggtccagtccggtttaaccgttaaaaatttattgcgaaccgcaaccaaaccattacgcggtaaacggtccggattaaccgaaccaccaataacggtttttccggttacggtctacaacagtttagattgtcgcagtccggatttaaaccacgattttctggtttcgacgaactgcccttgtgactaaaaaattatcactaaaagtagtaattttttatagtgtacgtaattgcactattaacaaccccttcagttacaaagaacttgttattcccaaccacttacaataatttgatggtgagacatcgaagagcaaagaagaaccaacaacgaaacaaaactatgtcacacagacaagactacaatactcaaaaccatatcataaagacaagactacaatattcaaaattatgtcacagagacaagactaattgtaggggtgacaatcgaatcacaatagcaaaacacaaccctgaacaagccgcacctatgcctaaaaagatcggcgggcctggccaaagaaaaaagataattacataaaatattatttttgtaaaaaaatactttttacatttaaggattttttttatatttttacaattttcaatagaaacaatacgaaaacaacaagaaaactacataaaaataataggaaaataatatccaaacaacatcgaaacaataacaaaaaataacataaacataacaaaaaatcaacaataaattaattaccaaacttaaatttgataatataattttattaattgaataaatattattctagtgtaatcaaatttatcaaactttgtacatttttttttttgaaaattactttatatattattttttaagggtaaatattattttggagcccgtgctttgtaaaagttaccaattagactatctattttgttaaacaacaaaatggaccttatattttccaaaatagtaaaataaagaccctgggttcaatttttaacaattttattttttaatataaccaactttaagacaatttataatacgaacatatacaaaaaatataactaattttttcataacagttctagattaaattattattcagttttattatttagcaaaaaattagttcaagttcttattattaattttttgttaatagtaatttataatatttttattgttttctactttttttttgtcttctccctttattgattcttttattttagtacaaatatataatatttagtaagtataatattaagtatagagaaagtgatgtaaaaatttgatataaaataaaattactaataaagtagtattccatgatctttcaatcaggcttctttcttgctcacataaattctattgtcaacaatgtaagtttctaattcttaattcatcctaagattcaaaatgaaggtttatgttcatgttgtgaagttattatactcttcatattctttgaccataataatgattaccgctacaaaacttattttcattcgcaacaaaatttgttattaaatgtgaaaaaagaaattgtgattataagtatcatcactcttataaagtcacgtgttttgcaagtgtttcatctatcccagaaaataaaaaattaaccccaccccaaaaacgcattacgaatagcacttgtcattgttagggatagttggttatagctcactgttatgttagttatttcggtttggttgttatgccacctgtcattagtttgttatggctgttagctttgtttcctctcctttataaactcatgtaatctcacacttaatcaataaagagttctctttgttcatctctctctttctttgcctttctttgtctttctctgctttcttcttctctgttcttgtttgttgttcatggccaagaggtttaacacctctaacatggtatcagagccatggccgccattagtggcgaacatggccaccatagatcctgtaaacttaaactctcatccctcacatcaaggagcacctgtcctgctacagaaatcgaagcagggaaggagatgatgccactgtctacttcaatcattcaatttcgatcaaattgaatgatcacaattacttactttggaagcagcaaatccttgctacaattcatggaaattgattgatgaggttcattgaagacactgctccaccgccacaatacctgaatgatgctgatcaaattgccagaaaactcaatcctgaattcgtcgactgggacgttcaagaccaattgcttgtctcttggctcctctcttctatgacagagagtct

SEQ ID NO: 235340 - DNA, 675 bp, Cannabis indica
tgtcattactatatacgtacgtctttcaaaagcaattaaatagtaaattaatctagctaactatatcttgtcattgttttacaacatagaatataatcacctatatatgtatatatatttatatatatacactacaaaaaataattatatttagtaataattttttagttacaatataaattttttgtgactaaaagtaactttgattgtagaagaattatatcgaaggtaaaatttactccatgaaccctcatagtccataacacaagctcgtaacaaatcttctagaatctaaattattctcttggattgttcattgtctaagggtgaaaatttgtactgaacttcaactttgtacccatggctctctgaataattttccaaaagatagatgtgaatttcgaatccctattcaaaataatggattgtctgagctccatgaatgtgaactatctcttttacatacaactctacatgttgatccattgcataagttatctttatcggaaaaaagtatgttgacttcatgaaacaatccaaaacaatctaaactgaatcatacattcctgtggttttaggtagaccaaccacaaagtccattataacaatttcccattttcatttaggaagtttcaaaagttgtaataacccggccagcttctgatgttctacttt

SEQ ID NO: 235341 - DNA, 918 bp, Cannabis indica
aatcttgttaagttcacttcccacgatatatgagcactttgttaatacaatcttgtatggcaaaaaaactctgaccatgacagaagttaaggctgcattgaattctaaagaaatttcaaagaagggagatgagaaagaatagaccaatggggaaggattactcgttgttaaaggaaaattctccatgagggaatacaagggagattaaaattcaaatggctacaaaggtaaccattcgagatccaattctagaaactccacaagagggccaagctctaatggacatgtagaaaaacaatgttattactgtaagaaggaggatcattttagagatgattgtttggctttaaaggctaaagtgaagtgagaaaatcatcacaagaccaaaagccatggagttactaatgttgttgatggctatgagtcatttaatgcacttgtattgtcatctgatgcacctgtgatgtctagatcagattagattcttgttcagagtgttcatttcatatgacaccaaacaaagaaattgtttaggactcttacagagagccatgggggtacagttcttcttgggaacaacaaagcttgtgagatcaaaggtgtgggaacaatcttgttaaagaatcatgaagaccttgccgtaggtcaggtatgttatagatttcaaaagaaatcttctctgattggtatgtttgataaactagggtatgtagtcaaagtttaggaaagtgtagtgaaaatttcacaaggcactgaaattgtgatgagaggaaggttgagtaatggattgtatttcctggatggaaagacaataacagatagtgcagtaccttttattaactcaactaagcatagtcaagcaagactatgacacctcagattggggcatgtaagtcagagagtgttggaaattatttt

SEQ ID NO: 235342 - DNA, 1691 bp, Cannabis indica
aattagtgtgataagaccaccatgatttatttgagggcataaatggcacaggcacactaaaagccgcaagaagatcttttctgctgcgtctttattgtgtttgatgttaatcaataaaaaaaaatattataatggaaaaacaataatatattcaagtgattaagaatttaagattgtgattgagttggcctatttattcttcatggggtttattaaacaccttcttgagcatgtaatatatcataactgcagagccaaccacaaagcaccacaaacggctcaaaatgctgccaacaccactcaattgttggtaatggtcaccaggctgccgcataggtgagctgaaaaagtaccatttaacacaacacaacccttgttttgttagttgaatataatgtaagattgtaagaaagaaaaaagggttagtatttcatgccttggcgccaccggagttgattcgggtccaggagtcacagcaggtgtggttgttgcatgttcaggctctgcaaggcttggctgtaaaggctcttcaactgggatttgaatagtcttaacctataacacaatagtgtagattatgttacatacaaactttcacttgtgcttgcttatgtacaagtacttttaacatgtttatgatcaatccacttactaaattcctgaattgaaggctgtaaagcatgtgaatgtatctttgcttagctagcttctggtctttgctcattttcctccaaaatccataggtggctcccatgttcaacactttgtttgcataaattttccatgtatagctagaaacagaaattaaaaaaaaacattaatgctagtaactacacaatcaaattagcatggaatcaaaatttttgttttgtttaccattcatttatcctctggagaccagctgctgacatcttgttccaataatcagattcagtcttgcacttttcaaaaaattcagcaatcttgttgcttgattcaattccattgttggggtcaatatgaaatcctgagacaccatcaacaataatctcagcagggccaccttgattggttgcgaaagttggcaatccacagttcatggcttcaatgacagttagaccaaatgcttcatagagagcgggctgcacaaaagctcccttactatctgcaatatagcggtacagctccgagtttcggtacctatctgtttgtgcagcaatccatctaatctggcccttgagttgatactgctcaatcaaagaatgcatcttttttatctcagcaatttcttccctgtcttttgattttgatggatcaaagaaccctgccacaaccaccagattcactaaatctctaagcctcttgttcttcccataccactcagtcagtccacttatgttcttgacagtgtcaagtcttgccatggaaaagattattggtttcttcttgtcagccaagtatcctctgtttaaagaaaaaagaaaaggatcacatcaaacacttttggtgtcattttcgaaaaaagttaagacatgaattataaagaatgaataaaagtaagcaatagacttacaaatgctcattgttgtcctccttgttgaaaagtaaatcttcaatggcaggtttgaaggtagtaaaacgccttgtttctctgtgtggggaaagtagacagtttgatcagctccaggagcagcaatgttgaatttgggctc

SEQ ID NO: 235343 - DNA, 2029 bp, Cannabis indica
ggctcgttggatagcacttagggaaatatgatgccttgtgtccattcaaaattgacctaccctcttgtctgggcttgtcgaaaagcctccttcaaacttatgaagccatcagctcactcaaggaactccttcatgtttctcgttgcgatccttctgatatatttttagaattcactcaacagcaagatgcctccaagtatggccgtacatcggccttcttagttctagcctttgaccttggtggccttatccatgaacctttgaatgtagtctttcaaaggttcatcatatctttgctttattttaacaagatcctccaagtcatgaatatatttttcttgaagcagagaattaaatatagaactgtcgagagaattcttcctaagaattgaatcttcctggggcttacttgaaagactactttagggctatttcagttagggttgccagaaagattcaacatcgcacttcttcagatacttgtttaagagctatttggatctcaaagtactttaggtgtactacgagatcttctttcctcgagtacatcttccaagttggaatcttgaacttgggaaagggcatggaaatcatgtatgctaagaaaagtgaaccccttgacctatccagttaaggtctaatggtttcgagcatgccaagcccttgatcatgtctcttatttgattcaattgtgcttgcacaaaaggatctaatgttgtaggagccaggttgattggcccttcttgattgggctgcagccctacattggccagcgcctggcctaccataccctgggagagggtatgttcaaggtcgaccagtcctaggcctggcagctagctttagcttgccaacccttggtaggggaactggtcatggccagtcagacctactctaggaagttgttcttggccagtcaaccctatgctggggagggcctggccgcccattcttcaatgactatctggtgtaaactatgtgttgctagggggtagatcacaccaattggttgagttaggtggatctaagtttctgaagtaattgtagtcacttctcaggttattgtcatctgggatgtttctacccattcttgggcctgacctgttaaagatttgtctttgggttactcactcctaaatgtttcaagatgggagttcaccttcttcgccgaccgaaggtgcaccattagggggctggctggctggccaaaggttggtcaatcgagggtgttgttgtgctagagatccctgactggcccccaaaatcgctggttgtcgggatctggttgttctcaccaccaagtgtttgtggcaaggattttcccctttcgggtaggggaaggtctgtcctggatccagaagaacctggttggataatttgtctgtagaccttccccgatctatcaaccagtctcccttaaagaggatcactaatgagatcttatcctcttccgacaattttttcattgaaaaaccttattaggtcgctagcttctctgttacggctatctagctctgcttggtaagattgaatgatgtactccttgtcattcatccatcttagaaattcgtgtatctcttatgcaaatgcatcacaacaaataatgtgtggttcttcagtctgactgacttgacagacaacctctctaagtctggctaactcgagattttctcccaagtctatataaggctcgagtgatgaagtttgttgtgcttgtcaggttggcatgattggccacatctgtcgggttcgtggtgattccaattttggctggaacaatatcaggatcagacctcatagggtcttgaggaacacccgatgagggataagttgtagtcagagttctccttgcattaaccacaacgtttgattagataaatttccaactcactctcaatgaaagcaccaagttgttaaatttgattcggccaatcgacaatgaagtcgtatttattactgatgcttgcaacgtgttacacaataagaactgaaagtaaatgagacacaagatttatagaggtttcgaccc

SEQ ID NO: 235344 - DNA, 1550 bp, Cannabis indica
agagctagatcctagatgcagatacccgactgagtggccaattggacgtattgttcgtccaaacctctccttctattcaaatcattcctgagatcatgggttgtagccaatttgttgaatactgaaacactaggttgccttaatgattgattggtttggccggtttattggccaattctgtcagtttggatagttattaggtataactccacctaaagaattgtcggatagggtctggtcgcctaccacttggcccacacggtggaacctgtgaccacggggattggacggcttaaccgattagtgagtttaggcggtatgcccagtaagaatttcgtctgtgaccgcccagtgggatacttggacgtagcagttggttgctaattagcaacttgataggctttctgtatcagtatggtggcctgtcttgtcggtcatcgatggctgcctgttgagccttcaatgtttccatctccctatccctccactcaatgaactgacgcctctgctcttcgaaggcaaggttcattgcagtacggagctcttcctgatcatgatgcaaggtattagtatgaccatgcatgagtccaagggcattgcaaaggttctaaatctcagtatcatctcctattgtcgtctaagcattggttgtggatgagattccagtgctgggagtgctctgatcagctatcaaactggtattcccagtctcatgcacacctggtgtgatcccagccagaggggatgtcacaccttggcccatagtaggtggctgcgtgtttggctgctcaagattggttcctagtgggacccttgcatttccaggagtttgtaaggcaggatctgtcagtagtgggtccatctggtcaaccacgcctctaggagtttgcaccaccattctgtgtgtctgctaaaacttaaggcaaagagcaaacttggatttttgctctcaatgaaagcaccaaaatgttgaccttgctttcagccaacgacacttaatcaattaataagcgataagaaacataattaagacagagcaaaaataggtaagcaataaagaacacaagattttaaaaaaacacaagattttaaaaaagttcggcccctttagttcggtaatagcatactccccttagattgtattgacttgagaacaaagaatacagtgtttcctttctcaaagctctcacaatgaaatctttgagtattttctcttagatctctctaaagcaattcttccttttacagtgaggatagatcactatttataggactgcatgcatgagggaaggtttttcttttgcttacaatatctataattaggaagaacatacattacatatttagaatacatcaaatgggagattgggacagcctgccatattcctttaatatgatcccatgattgtacggattgcttatgtgcttgagcttcacgatatcaaacctgaagtagttaagtcttaatgcacgactcgtatcactctttgctcggttcatctgtccctgccttgctcgatcaagcagactttgggcatgtttggcatggc

SEQ ID NO: 235345 - DNA, 2631 bp, Cannabis indica
aacacgcccctcaaacttagaattggagggatcaccaattgtaagtttgtgtctgaaagaggagaataattggctagagattggtttggtgaggccatcagcaatttgatcaatagctggaacatgcttaacttgaacgaaatgctgcaaaatcttttctcgaacaaaatatagatccagttcaatatgcttcgtgcgagcatgaagaacgggattagcagtgagcaacaccgtgctgagattatcgcaccagatggtaggtggccgaggtaggtggatgtgcaactctgtaaaaagtgagtgcagccagctgatttctgtgacagtttgtgcgaggctacgaaactcagcttcagtactgctccgggatacagtgtgttgctttttacactgccaagcaacaatattgcagccaaaaaatatggcaaaaccagatgttgagcgacgatcatcaggatcggtagcccaatcggcatcacagaaagcagtgagttcaagagttggggattttctgagatgcaaaccatagttgatagtgccactaagatatcttagaatgcgtttaacggcattccagtgagtttccaaggggttggccatgaattggcaaaccttgttgacactaaatgaaatttcagggcgagtaatgaccaagtactgcaaagcaccaacaatggaccggtatagatgcggattagccacaggtggactgccataggcagaaagcttgagtccactaatcattggagtgttggacggcttagcagcatccatttcagcccgatgtaagagatccctgatatatttagactgagataagtgaagaccagctggtgtagaagttacctctatgccaagaaagaaattcaagtcccccaagtcttttagagcaaacttggcattgagagcttctgtataatgagttatgagcttaggatcacttcccgtgatgatgatatcatcaacatagacaagaataacagtcatggataagggagtatgtctgataaagagactatgatcggatttcgaagacacaaatcccagggataagaggcagtgttgtaatttgtcaaaccatgctcgaggagcttgtttgagaccatacaatgctttgtgaagcttgcaaactagatcaggtgattcgggatcctcaaacccaggaggctgcaccatgtacacttcttcttagagatcaccattgagaaaagcattgttgacatcaagttgcttgatggtccattcctttgtgagagcaagagtgagaacaactcggattgtgaccggtttgacaactggactgaaagtttctgtgtagtcaaaaccaggttgttggtgaaagcccttggcaactaatcttgccttcaatttatgaacactgccatctggattttccttctttctatacacccatttacacccaatagcagtccttccaggtggtaaccgaactagagtgtatgttttattcctttttagtgctagaacctcatctgccatagctttgttccaatgaatctgttgaagagcctgctgtaatgtagttggaatttcagtgacaatataagctttgggcttcttaattccactcttagcacgggtttgcatcttatgagagttgactgggagagagacagatggcaaaacaggtgctggaagagacacagcagctgctggtgtagcatttggtggaggcacagcagttgcagcttcaggttctgcaatgtgaggagggtctcgagactcaggatcaagaactggagtatcttgagagctgattgcaggattggcaccagttggaccacgtgcaacaacacttgcaggagctatggagcgtggaagagatgcttcattttcatcaggatttgcaccacttgcagcaacaggcaaacaaggaaaaccagtaacattagagtgcacagcagtattatcaatattagtaggaaacaatgatgcaatagagtaagaaataggtgcaataggaatggtactagttgtagttgccaaagggtcagaagatgaagaaggtgatgaatgaaaaatgtgagagggaaaggattgttcatcgaatataacatcacgagagatgtaaacacggccagattggtccaagcatttatagcctttgtgattgaggctatacccaataaagacacaaggagaggagcgaaattcaagcttatgcttattgtaaggtctaatattggggaaacaactacaaccaaacacttttagctttgaataatctggggtgagaccaaaaagaacttctattggtgatttaaaggataacacagctgttggaagtcgattatgcagataaacagccgtgggaaaagcttcatcccagtatttaagaggtaatttggcttgagctagaagtgttaaaccattttctacaatatgcctatgttttctttccgctataccattttgctcatgagtggtaggacatggttttctatgcactataccagctgcctgtaaagtattggtaaaggatcgatattcccctccccaatcggactgaaacattttgattttggtgccaagttgcagctccacttcggctttaaaaatgtgaaatgttttgatggcatctgatttgttttttaagcaaatagagccaag

SEQ ID NO: 235346 - DNA, 771 bp, Cannabis indica
atattaaatccacaatttttgcaattctacacaatatcatcaacgtattaagtataacatcatcatattttaacttataagaataattaaattatggaatgtttgctgcgaaactcccttaacatttttaattgttagacacataactctattaaaaaaagtagcgacaaaaatagtcctcgtggttacaattttgttgcaaccaacctctcttttaactaagtactaactctttgtatttaatgcaatatattatgagttttttttttcatttataaccatctattacaataatattacacacatacaatcacatgcgtatataaacatttatatagcctaaactttttttattactaaaataccacttcctcctcaagtcggggtcgcacagaaaaaacaatgccaccaccaaaaaactccattaatgtttcctttgtatgccacacataaattttaattttttatttgactttgaggaatcactgctataaaaatggatttaagtgactcactacaagtgacactcttcactacgcgttactaatgtgggtgattaaaaaaatagtatatagtgacccttcagcacgggactacaaatattttagaatctctctatgtgtatcactgtatatttttaaagcaacccatattaagcatcattgtatctatttttttagttattttcctgataaagtatttttaataatttttgtataataaatttttaaattattttcgtaattagtacactcaaaaaatttgaaaata

SEQ ID NO: 235347 - DNA, 553 bp, Cannabis indica
gacgctgaacgatgtaatcctcgccggaggtctcggtcccaagacaacgacattgaatctgcctcctcatcctcgcatggtcgcacgcccagcaggtacactcgatcaggttcggtggaaacaccgcaaggaggatgatatcacgttcataggagtgatttacgcgatcaccttaacgttgtcttcaaggtgcgctcccaaatgcctcatgatgtcaaagagccccgtgatccccgaatgggtgatcagggtataaataatcgcatcaatctgcctaccgcaccagctgcgactactggggttaatatcccaacaaacatcgctgcagtagtaaccacgcctatagaaacgcaagtcaatactcccctagccgggaacattgatcagggtatgcttctgcaggcctcaaaaatgctcaagcagcagagaaagcccatatacaagctgtatgggacctctcctttcactgcagaagtgcgacaagctcgactccccaaggggttccgggttatccgaatccctaaaactaacaaaggtaaccgtcctaataccc

SEQ ID NO: 235348 - DNA, 1663 bp, Cannabis indica
atgttccaggtcatggttggggtgataaaagcggcaaccgtagggggagctgtatcaaaaggggtaatctgtctgaatcccaaaatccagtgagttctggtagtgggagtacactgcccgttttcgatcttagagataagtcctttctgcagcaactcttttgcccaacaaatactacgcctgacaaaagaaggcgagtgtcctaatgcactattaaggaatgaggagtttgggtaatatctggccgccaggattttagagactaaggagtttggttgtttgaagatgcaccaagcttgcttagcaaggagagcctggttgaagtgaaccagagagcggaaacccagtccgccatcctttcaaacgaagatcgaatatggatttgcaagaagtctgagattaacgtttgatcccgaagctcaacattcggggaaaaataaagggaggatttttgaaaatttaccttttgccccgaggccctttcatacatctcgagaatttctttaatgatattgcaagactggatggaagcattacagaagaggaaactatcatccgcgaaaagcaggtgggaaatagcgggagcgcgtctagcaactttgtagcccataagagagcgatttctctctttctgctggataagggaggacaagccttcagcgcacagcaggaagagataaggggagagggggtctccttgcctgatgcccctggtcggaacaacattgccatccactttcccgttaaagttgaattgaaaagtggctgtggagagacaagccaagatcaaattaatgaaccgacggggaaaagaaaatttactaagaattgcggcgatgaaagcccatttcactctgtcgaatgcttttgccatatcgagcttaacggccatccaacctttcctcccacgagtcctaagctttatggagtgagcaacttcctgggctataataatattgtctgagataaggcgaccagggaggaaagcgctttgattgggagaaatcaagttgttgagaaccaatttaagtctattagcaatggcctttgaaatgatcttgtagacaatgttgcaaaggctgatgggtctgtattccgtgaggacagtgggattttttaccttagggatgagggtgataagagtggtgttcaggggtgctatgtccccatctccattaagaaagctgagggcagcattaaggacatcatttctgagaaaagcccaattatccttatagaaatgggagttgaaaccatcgataccaggggctttatcgagggggagctggtgaaaagctttctcaatttcggtgtgggtaaaaggaacttctagaaggtgtatgtcgtcaaccgagaaggaacggtcgatcccttctagaacagcttgcatgtcagctgcggaagggtccgagaaagtgaaaagcgattggaagtgcgactccatttcgcgaataatagcttcctcattggagacagtggtcccatttgacaagatgagattttggattttattaatttttttccgatgcgacgcaaatcgatggaagaacttcgtatttttatcgccctgggccaaccactgagttcgagcacgttgcttccaataggtttcttctttgtacagaagggtgtctaaccgggattggacatctttgatttttgc

SEQ ID NO: 235349 - DNA, 599 bp, Cannabis indica
atatatatatatacatatgtatgcagagtagactctctacagaatagatttcattgattgacctccttttttattatttactctacaggagatacagtagaaactttgttgtagatcttttgagaaaatggatgaacaagtctgagtatgtacctttagggggtatcgcttattatatttctgccccttcaaggtaactaaagatcttttctcttgttttaaataattgatttcagatacattacataatgaagatttcgttcatttactgtctgtgcagctcggaagatatggcagccaatcctttccattcattgttttttgttgtatttatgttatctgcttatgcactttctcaaagtatgtggctgcactgcctccttcaacatcttctctgggagaagatgttgccaagtagccagcttaaggtataacatacccactcaatatatacagatgaccttaaggttatagagccaataatgagattggtttctttggattataatactagcgaatttaggagatacatatactaattcttgtcaatcagattcttttattatgatgtcgtagtttacagttgtgttattaacttt

SEQ ID NO: 235350 - DNA, 1471 bp, Cannabis indica
ccgacgtaagcctacaaggtaaataaaaaaggggggaaaaggaggagaccccatacacagagaaactttccctctgctgaaacgtcctccgcattgcaagccaccctggacggttggaaaaaggagggcgtataatctcagacaccatccgaggtgactcttgaggaaaggaagaagcagatatacagaaaactgagggcgaagccttcgtaggaacagggacctcttcgaagttctctgattgggcagtagactcgaactcagggtaataagccgccgtcgtctgagtcgagcttccctctgacacttcaagctcctccttaaccgcttcaactggtgtcaacatgggaggaaaaatagcaaaagggcacatagccagaggtggcgcaacctcgacacgagaagcagcataagttccaaggcccaatgcagcttcctcaaaacagggacagctgcagacctctgaaaaatgcaatggaggaagtgtagtgggctcgaaatcacgaaagctagaaaaagggttcaaagaaagaaaagaaagatccaatggctacaagcctgagaaaatattagaggaggaaggctcttttgagtgaggaatctggcttttgagtaaggaagacataatgcacgaaggataaacgaaaaactcaactgaactaacccagaaaaagaaaagagagttgagaaaattcttagataaaaaaggagctcaacgagaagcctatttatacaaaaattgcatgcagattaatgaagatgccataaatacggaaacaaagagtcacctttatggcattaaaacacgtgccaggcaaaacacgtgcgcccaaatttcaagaagcatccttaagagtatatatgtctttccactttccaaagcaccccattttttaaaaaaaaacaaaaacaacactctcggaatgagtacgtataaatatatgtataaatgataggcaataaatacacttaatagagtcgcagctcccccaaccttatatgaagcaaacaaaaaatataggaagggacaacaagggtaataaatgcaaatccattcagagattacaagcacaggttacataaatatgactagaaacgtgaaaaaaaaagagaaagaaagacataataaacaacaatcgaatacagacaaagactatacacgagaaaagtagcgaacagctaacaaaatttaaagcttaggagtcagaagcactcgcggtcgggatggtgccagcaaagtatgcatagggaacctgggattataatagaccctcgaacaaccctcctcaggcaccgacggcagcccgtggggaagccaggagggtaaaagggagctccctcccttaagcattcttccattcgcctttcgttagctaaacaccccctctccaagtcctcgtcccaggcctgccggttccgggcttgcatccgatgattgtcttggcgtggctcagcgcgcaggcgaagggcg

SEQ ID NO: 235351 - DNA, 912 bp, Cannabis indica
ttttatttaaagcataaaatctcaacaaaaggcttatttaataattttaagctacttaaaatccagtttattggcattaaatatacaattagtagctctaagaatgcaaatacatactcttataatttattattagactgctaattatatatgtattttttgtctaaactcttatattaggctagattaacgttatgttgatgttatgtctgtaaattatttaaacaaattgctagaatgcaattacaggggacatttgcaataatttttatagtttaaggagaatttttgcaacaaagaaaagtttaagggtcaaaactctactagagtcatagttcaggtggataaatcctataagagcatctccaatggtgcataatttcaccgaaatgatacttcacgctatttcactccaatggcacaccaatttatgcactaaattctacaccattaatggtgttggactttgattctacaccaatttggtataaaactttttctttacattctaacctattaagctttgttgtaaggtgtagtatttgttgagttagttacaatttttgttagagctagagttagttggttaggttgttaggttgttcttatctctttgaaccagtgtatataaatacactttgtattgctctattttgggttaatgaagtttgtaacagcttcttttcctctctctctttctcacttctttaaaactaaaatggtatcagagccaaccgattggtgagctctttcttccacttattttcttctttgttctctctgcttccccatagctcgaggaggaggaactcaaactcgaagcaacagtaacaatggagttgctaaatgttctaatcaatttgcagctttggatgaaagtaacaagtttcctactattgatccacgaagtcc

SEQ ID NO: 235352 - DNA, 1620 bp, Cannabis indica
tttttgttttaaaaattttgattttcaattataaaagtaaaaagtaaaaacagttttatagaacatatttttgaaaaatattttcactttttcacttttaaaaacaaaaaactgattaaaaaaatgttaccaaacgccaccttagtttttcgggttttttattttctccctttacttttttcgccatattgttgatcggtcaatcagaatctcgagaatggatacgatgatttgcgtaccattatggatagctcccgcgtggatgtgtggacccttatcgacacagcaattgttgtagcttccaaagattacggcagcgatctgaagaaacaccaagacagtatcgttgagcgtctctacacggcaactgcgacttcttcagctcctactgtagcttatttgggtctgagttggttggtttgtcttgtacagtcggaagatagcttggttggactgcttcaaggtctcgcggacatggatataactttccaagctctcaaggtaattcttttgtggtggccattgctgttttgtttgtttctcttacttttctcatgtaatgttctttaattgctgtaatataggaaactgatattgggagacatgttaatcgtttgaggaagcattcatcaagtgaagtgaggagattggtgaagcaacttgtcaggttttgatgacaactaccaatggaaatgaataattttattattattattattttcttaaaaaaaatggtgttgggttcttatttgattttaaggctgtttgtttatcaatgggtaaaattaaataaccctggagaacatgcctctgcaatcatgggtacattagtacaaatccttttcccattttagttttatccttttggtttgaaatttgatcttttcccaaacccatattgcttgatatgtattcgaattgaatgcgtacattaattgcgattatgctatacttaattattcctaaatccaaattcatatttcgattgacctttattcaaattatgcaaaaaaaataataataattaaagtggcttctgattaccttcaattgatgtagataagccttacgctgagtttttgggcaccgacgagtcgttgtttctgtttgcaatgggggaagacagtaatgtgtatctatagttttagtttatgtgtcgccgcatctggtttgcaacggtgaacaaagcactaattcctctcttagtcctctgcttcagtagctcgttaaacttaagcttgagacaaggtatttgcttgactattaaactatgaattttgtatttaaaatttggttgtcatcattctgatgataacacaattcttttaaattaatttttttatttaattaaatggttagatttggaaaaatcacataccaaagtcctatacagaatggataaactattataagaatttgtttcaacataatacagaatgaaaaactgcacaacaaatcaaaaaagttacaatgaatcatctctttatactataataaattggcaatacaccatattagaaaaaatgttcctaagtatatggtgccttctttattctacccagttttctcttaacataatacacatttctaaacatagaatgatactagcattaccaataa

SEQ ID NO: 235353 - DNA, 915 bp, Cannabis indica
attctgttaaaccaagaatgttaaaccaagaaatgccgttagataggcacttttaatatataaagatataaattatgtgctaaatttaagtgaaggatatgagtatattagggaaccttcatacaaaaatagatacattttaatgaaatataatataaaaatattttttactaatgaataaaaaaaagaagtatttctcaacttattttcttaataaatatctaaagaaaatatgggcctggagaaacccatatgaagagcccaaccaattaggcccaaaaatgatatctatctcgaaaccttactagggtttcatctctatactcctaaagccaccggttatcttactcacttcatcagagtttattttctttcacacacttacaaactagggtttctctcccttcccctaaatctccaatccccaacaatggcagaaagaggaggtgagcgaggtggcttcggacgcggtttcggtggagaccgtggccgcggtggacgaggtggagaccgcggccgtggtcgccgacgtgctggtcgacgtgaggaagaggagaaatgggtaccagtcaccaagctaggtcgtctcgtcaaggaaggtaagatcgcttccctagaacagatctacctccattctcttccaatcaaggaacatcaaatcatcgacacacttgtcggaccaagtctcaaggatgaggtcatgaaaatcatgcctgttcagaaacagactcgtgctggtcagcgaactaggttcaaggccttcgttgtcgtcggtgacagcaatggtcacgtcggtcttggtgtgaagtgtagtaaggaagttgctactgccattcgtggtgctattattttggctaagctctctgttatccctgttagaaggggttattggggtaacaagatcggaaagcctca

SEQ ID NO: 235354 - DNA, 855 bp, Cannabis indica
ttgataagatgaaccaaaacatacacaaatgaatgaaaaatacttctgtttctttattgaagttgaataaaatggattacattgaattgaagttttatttagggcataaaacccaacaggcattagtaaacactcaaaattggttgaaaggaaatcacgagggaatcaaatgagggagtatttggatgaagtttaagcttatgattttcttgaacaaggtaattttcttaataaaattgaatatggtctttgttttgttatatttgtatatttataataatttgactgattttattttttattattgtagaaaatgaacttgacctcaaggcttcatcaccaaaaccaaagattattaacattattgattgagatcgacataacttattttattttgttcaaatttgttatggataattttaacgttttaagactttagatgattgtaattttaatgttttaagactttggatgattgtaatatctttaacttttggatgtttatgtttatgtttgaacttgtatgtatatctaatttttttatatgatataagggttataacccaacccattttaaaattcaagatgtcaatgggttaagaatttataggttgatgttgttattggattgagtcattaatataacctcaacccgaccaatccaatccaacccaacccatgctcaaccctaatcaaaacatatggcacaacaatgtcaaaagtcaaacttaatgattggtaccgaatataaaaaataatgttttgatccttttactatttttttttatgaaaaaaaaaatgacactaaaatgtaagaaagtaaaaactttgatgtgcaaattttcctcttttttt

SEQ ID NO: 235355 - DNA, 1284 bp, Cannabis indica
aaacaaaagattccaaggtaaccaaggtttctgtcgtggtgggaatgaaaactagcaaacttttcctgaatgtccaaggtgcaagaggcgccaccagggcgagtgtcaagctagagcctgttttcactgtgggatagtgggtcacatgaagaggaattgcccacagctactgcgaccggaataaaagaaggatgatacacctgctcctgctcaggtgtttgccttaactcagtctaaggcttatgccgacccttccacaatgacaggtcaactctctattgctggtaccatattgactgttctgattgattctggtgcaacgcattcttatatttcaagtagaataattgagaagttgataggcttagtgatgtattttttagaggcttcaaaactttactgcctactagagagctggttatctccagcaggtgggttcgatcccttctagtatttgtggaaggaagagagttatcggtcaatctgatagaactgaatttggaagactttgatgttattttgggtatggattggcttgcaaaatataacaccactattgattgcaaaagagaaatggtaacttttcagcctgagggcaaggatccctttgtgtttgtgggcaagatgcaaggatcccggattcccctaatttcagtacttaaggtgagagatttggtgtgtgaggggtgcatcaatttcttagcaagtgtagtggatactactaaagaactaccagctggatcggagcatgtctcagtggtttgagaatttttagatgtttttccagaggagttactgggcttaccaccgaagcgtgaaattgatttaatacctggggcagagcctgtatcaagagctccctacaggatggcacatgcggagctgaaagacttgaaagttcaattacaggggatgttggatttaaaatttacaagaccaagaagctcaccttggggtgcaccagtattgttcgtgaaaagaaggatggaactttacgaatgtgcattgattatcaagagttaaataagttgacagtaaagaacaagtatcctttgctaaggatagatgacctatttgatcagttgtagggaaagatcgatcttcgatctggttatcaccagttaaggattcggaaagaggatatccccaagatagcttttcgaatccggtatggacactatgaatttctggtaatgtcctttagattaacaaatgcctcagttgcatttatggacttgatgaccgagtgttcaaagacttcctggatgattttgttatcatctt

SEQ ID NO: 235356 - DNA, 778 bp, Cannabis indica
tttttttcctttcttttctttttctctcttgtaggtacaagcataaagtcaaatagaatttgacgcatttatgaaggttgacacaaataagtttgcacatcattgacgaggagagttcttaactcttctttatttatttttaaacttggttacacatatttaaaaattttgtacatgtattaggaaattaaatatttgatagttcacatcaatattattattatcataattatatctttttattattattattattattattattattattatgtataaattgaattataattggctttgaaaagtcaaattatcattactttgttgcttggtttactccatgttgtacaagcatgggctgccttggggtaagagaggagaaggtggcaggcctatgtatgggtagaggaaggaaagaaaggctgcaggaaaaggagggagaggcggaccaatctcatagcgccatgtggcaagcgactggagggggagaatggcgccatgtaggcgctgacggagcagtgttggacgaatagaaaggcaccgcttggagctgatggggcaggcggactgggccttttggatgggcttttactttatttttcttcttttcatttctcttttttttttgcactttttcttctatattttcagctttgtcacttttttcttctttcatcaaaaacacactttgattcctacaaaataacaataatttaaatttaaataaaatattttcaatataaaaatgtatttcattaatttcatgaaaatattaaat

SEQ ID NO: 235357 - DNA, 973 bp, Cannabis indica
attgcaagtcgacacatttgaaagtgctatgcaccactggtgcccaataacaatgctcttattcatcacattccaaagaatgaaagaagtgatgaagtggaagattattaatggtgatcacatggacatatatggtattggtcagcctggcttattattttagactttttagtgttagctccaacaaatacttgatgtggatgcaaagaaaaagggcggactagcgtgccgctaagtaaatgcaagagcgtgaccattgctgtcgtttgaaattttctaggtgtgtccatgtaggctaaacaaatccagactcaaaggtttggaaaatataagaagaaacaaaattttattaatatggtaaaacaccattttacaattagttagcagcgatattttataaaagttatattaaattagaggagtgttaattgcaacctcttagtcaacttttacgtttgaaatcaaatatcgaaatatttttttcaattttttgttcatagcggtattcattatagttacaatatcatccctgtaaatttttgaaaaaattaatatagtttacaataccaaaaatggaagtcatgatattccagtttaccaagtgtgctcaaaaaatttcaaaagtattttcgacactgtaaactattcaaaaattttcaaaaatttacagagatgatgttgtaagcaaaacgaacaccaccgtgaaaaaaattgaagataatgggagtattttaaattagtaaatttatatggtatactgatttttgtcattttcttacaaaaatactgttaggtagtagcttaatttttcaattttacttattttttttaaggttttatactactttttattaattttttttgtcaaaaatgacaaaagatttgatgttgatataagagcctttgtttttaaaagctttttaaataaaagttttgatgttgatataaaattgatttgattgatgttgtcacc

SEQ ID NO: 235358 - DNA, 1028 bp, Cannabis indica
tatttttgaagatgcatgtccgcaaaagcaaaaaaaaatatatgtatatgtaatagtataatacttttaacctaaattttgatactcgggatcccgatccatatggttattaatatataaattattaaagttattttccgagtttattattattaaaatacgggcgttacatataccatcatcggtatccaatataactctatgtatactgatatcgctaatcaatatgttatctaacaggcattcataaatatgcacactaacatattatcacatatgcatatcattatactaattttaccttgatttcgaattcaggtgcgtcggtcaacttaagtgaaattgttgctcgacggtgtactggcccttaagtcataacatacgtagaattgataagtgatatgctaaatcacttttcggggacttagacttgaaactaaaaatttccctatcgataaatagtgtgactacaacctaaatattaatgtgttagtttatgtaatatgtatatataattatataagtattttttgtaagaaattaaaaaaaaaaatagattgtgtgtaatgtatttgtgtaaaatagaaattgataataatatatcgtattattgtatgtaattgtagattatatttgtatataatatattgtataattgtattattttgtagtgtttttgttaaaaaaaaaagtgatattatatatatataaaagcctagttcaacccgaaacttgactccaactcacctgaactcgacccatccagattcaaaacctgaaaaattcggtcgccattggggcattttcagtcctaaaattttaaaactcgaatccaaaattccaaaaaatccacccaatgtacaccctatacggatgtgttagaaagggtaaaaaaatctatatatatatatatataaaggagaagtatgaggcggtgatgtagtactctaaaatcgctttaaagctatttttctctactctccttaattctctcatttttaaattttttattaagtttataattatta

SEQ ID NO: 235359 - DNA, 3834 bp, Cannabis indica
ttattgatggtagcttcaattattattattaattttttttgatagaaaaataatttgtatttattattgttgattttgattagatataaatgagtgcgatggtgataatccgtgtgtgggaagctgcattaacttggctgggagttttagttgctcatgtcctaagggatataaaggagatggcaccaaaaatggaacaggctgctctcctgttcctactactaaccattctgtcctaaccatttccattgccttgggtaagtatatgtattaattacatataattaaaattaaatatatattactgatcttgcgtttagaaagccacaatgtaattaaatttgtgtgtaattagaggtaattacacaatttagcatatttgtctgaacatgtaattatactataactgtataattagaaataattaaggggttccaattatactcttcaattctcatggcccccataagaattaaatgtaattacactacgtaattactaaaaaaaatttatataaacattagctactaaaaaatattattttctcatgtaattactaactattttttcaaacaagatattaagaattcataggtaattatcacttcatatctaaacacaccttgcattttaaaatatagtataattactaaactgtgtacttaccattttaataattatcttacttaattatacagttacttccaaacgcaccttaaattaatatatttgttttggggatgatgagcttcaccgcatgccattattgattgtgctttccgcccattttcaaagaatttctatgatatctttatttaaattatatttttattaaactttgtaataagataataatatatacatagtgcttgcattttattttgaccacttgtgtttgtattaattatataaaattctaaaaatcccttaattataatatatcatctgatctgaatatttgggtacgtagtagctagctagctagcctagccatgtattcttttaacatatctttggtttggagtagtggaacatgacctacgttataacaaattaaatatttcatttttggaaggtaaagttacttagcttaagataattggttctgattttaaaagctgcttttatgcttctcaagtaatcagtaatttttcagctattaaaattataaaaaaattttaacagaatttaattttagtatttttctcgctaaagaactttctaagaaattaaaagtaaaaacagaaatttagccaaacacaacaaccttagctagaattgaaaaataactataaataacccatcacagccaaagaacttttatgacaataattcacttaaatcttcaaatgaaaatagtatagcggctaaaataattggtatttttaaaatattgtacttttaaattatattgtgtttttttagggtgaatatagttataatatttccaataagttacattatgtacttaatttttgaatctgcatgcatagagaatatatactattattaatttggctatatataattttgaaagattaaatttattaattattaaacgttctaaattttattgtgttggtttatatatttataggtgtctctataggattattgctactgcttctgggttgttcttgggcatattgggtactaaagaaaagaaagcttatcaaactcaaagaacagtttttccaacaaaatggaggaatattattacaacaacaacttgttcatcaaacaagttcttcttcagacacttcaacagccaaaattttcacagctgaacaactcaaaaaagccactaataactatgatcaaagcagagttcttggccaaggtggttatgggacagtttacaaaggaatattacttgataacaaagttgttgccattaagaaatccaaaattggtaaccaaagtcaaattgagcaattcataaatgaggtgattgttctttctcaaattaaccatagaaatgtggtcaaattattaggttgttgtttggaaactgaagttcctttgttagtttacgagttcattacaaatgggacactttctgatcacatccatgagaaagaaaaataccctttattatcgtgggaaatgcgtttaaaaatcgcaacagaaacggctggagctatttcgtacctacattcttcgacttcaatgccaattattcatagagatatcaagactgcaaatattctattagatgaaaattacactactaaagttgcggattttggagcttcgagattagttccacttgatcaaactcaactaaccactttggtacaaggaacattaggttacttggatccagaatattttcaaactagccaattgactgaaaagagcgatgtttatagttttggaatagtgttggcagagttactgacgggtgaaatggctgtttgttttgatagaaaagaaagtgtgagaaatctagcaatgtacttcatttcgtcgatgaaagaaggtgaattgctagaaattcttgataaaagagtggttaatgaagggaatattgagcaactaaaggcagttgctaatgtagccaagagttgtttaagagtgaatggtgaagagaggcctagtatgaaagaagttgcaagtgagcttgagggagtgatgagatccaaggttggaacacatccatggggccatgatgatcatgatcaaaaccctaattccctaattgtactagaagaggctgaattcttgttgagacctaattcaagtaatgttggtgtgactgaagggtttgatagtatgaatatccaaatgtttgagccatatgatgatggtcgatgataataattaagttttaatttagagacatgtatttatatcttgatgatacataaattgtactcttttttagtttgagttttgtttgaactagttaatcattgtcttttccagattattaatttctaaattcaaacttatatattagaaaaaatttctataatattttatatattttatattatagtgacaaagcctttatatatacacagatagacttaatttttatgtatatatatagtgatagatatcctactaaaaaactgtacgtcgcgcagtcaaaattatgacaaaattgatcataatatttatgaaaacaaagaacttaaatataaagggcaacagagattctagaggccggttcggttcaatatatgtaataatctattctcatttttgttgtatttcagtacttcagatatcaaatggaactttagccattgatttttccaagtattctatttcaataatatttctacagagtactttttctcgaaaaactaaatttaaatcttttttcataggtaaaattatatcattacttttcattattgccaatatatacattctgaataattcctctcaaatcctgagtctttagtacttagggaggaaataaagacctactcttattctttgcggcatagcccagcagttaattaatttcctttacagctttatcacactcctccatacagaggcagcgctcttcttcacctggttgatcacctctctatttattttggaccatcatatgtaatgtaatggttctttcacgagacaggataaatctttgaattgtattcttggagacactgtgaatttcttaattgaatagaaattctattttctcaaactcatatccaataatagttacacaattatatatttcacactatttaaaaattactaataatccctattacaatattttcatagtgttacacttttctggtaaaattaaaaaaaaaacttcaaaatccaacaaaaataaaaaggaatatcatcacacctcctcta

SEQ ID NO: 235360 - DNA, 823 bp, Cannabis indica
attactaaaatataattcatattacaaaatattttaataatgtgcaaaaattgatccaaatttatttgaacacttctaataaagtgatataaagatagtttataagtattttatataacaacaaatattactatattacataacaataaatattactattttatttacttttttgcctttcattaatataattaataactttttacatgtatttatatattcaatatgagttttgtacctttttatcaaaaataaaattaattttacccctaatgcataagagcacactccattatcacttaatgatattgtcttcggtctctataatcgatgcatattcgatcgtaaaattttactaagccatctctaatagttacactatcttgatgtataacacaaaacatgacacttaataaaattttatttaaaagatgtcgtattttttattatttactttactatatgctatatagccaataataataattaagttatgatacaattgtcatattatcaatgtcaacgattaatttatgattatttctaaaataaattaaaagaattgttataatgaaaagaaaaggttatgcatcaatttagtgtagattcaaaatctaacatcatcaaatttacggttttggttgctctggtggtttttatgtaggtcactgtgtggattttaattataatttaagttgctccgttagttgctatatgagtttgtatgtgcatttctataaaaatacaaaaaacaactaatttaaagtgtaaaaataaaaaacttcattattatttttatttatgttgttctttttagttttat

SEQ ID NO: 235361 - DNA, 789 bp, Cannabis indica
aaaaaaaaaaaaaaccttccaaataagacatgcgacaaactcagcatacatagtagatgatgtaattaaagcttatttaacatcttttcaagaaatagttgcaccagctaaagtaaaaatatagtcagaagttgactttaaattatctacacaactaccaaaatctgaatatgaataaccaacaactcaatgattgttgacatgcttacacacaagtataaaactcttcgttctttgcaaatatctcatgactttcttggctgcaaccaatgatcatggccaagattagattaatatctcccaagaacattgactacgtacaaaaacaatatcaaatctagtgcaaacctaagcatacattaaactccctactacacttgcatatggaatgttctttactactcctctttctaaatctttcttaggatattgttgcttagtaaacttgtcctctttcagaataggaacagaaatagccttacacaaattcattttgaactttttaagcacacaattaatgtaagcttcttgagataagccaataattttttgattcttgtcacgatgaatctcaaactccaaagaattagatgcctctccaagatccttcatatcaaagttgatagacagaaaaaaatttagttttatttagtaatgacaaattactactggcaagtaaaatgtcgtccacataaaggacaagaaaaatataatgactctcactgatcttgtaaagaccgcttagtttaatttaaaaattagcagttaatcatgtttaattatgaaaat

SEQ ID NO: 235362 - DNA, 727 bp, Cannabis indica
attatgaataactatatgttcaagatttatcagaaattgtatattaaagcttaatcatgaaaataatatgtagacttcaaatcacttctaatcttctattgatggtgtaaagccccaacacacggggacgccacatgtgtgcttttacaaacttacttagactaatctattagtttggaaaagtttggtttgattaaagacttttaattaaaccggaatacaactattattcaaaataccatcataatacgagaatcccctgtttataacattttacactaagttacaaaactgctattacaaaagaaaagttacattttcaaacatagataaaggttgttcctgcttcctggaagccaagacaccacgaatgatatgtacattgctggaaaatttcagattcatggccgaacacagagcttattctccttacctgcaccacgaagcacctgtgagtcacaaagactcagcaagaaaagctacaaaaccggaagcaatgtaaaatacaaattaccacaatgcattaaaataaatatactcatgattcgacatgcatatataattttacatctatacaaacatatatcatatgcattataagaatatcataggcaaccatttcattattacaataagcaaatatttactcaatacatagtcacacaatcttagtgcttcataaagcactttcaattatacatcatcataaacacataatcttagtcgc

SEQ ID NO: 235363 - DNA, 1295 bp, Cannabis indica
aaattctatttttttacacaggcatcgggcccaccatcggacccatcgggccatatcaaattctattttttttaacagaggcatcgcgcccaccattgggcccaccatcacacccatcaggccatatacaattttatttttttacacaggcattgggcccatcgggccaaccatcggacccatcgggcctttgtcttccttaatttttctgtgacaccatgggaccggtgtcaggctgcatcgggctccatcgggactgcaatcgggccccaccgcgccataccccattctgggtcacccatcggccctacaatcgtgtcctatcgggcctaacccaattatccggcctccatcagggccaccatcggggctaatcgggccatcttctccaaccttaaaaactaaagaaccatcgggcctcatcgggctagacgaaaaagtgtgtagtcgaagccataaatatcattaatctatataagaactcgaggaacatcaagaaatcctacaacagacattgttttcatccccttcgtctgctctctctttctctctagtgatctaagaactcgagcgtcttctctctctctctctagtgatctaagaactcaaagatataaagccattcacttccatcccccctcgtctcctctctctctcgacaaccaacgaacccatggatatggctacactcatcattgtcttaggtgtcttaggtaacatcgtatctttcatggcgttccttgctctagtgtaagaaaatcgcttaactatatttattattttataaatgtacgagattattattagtattaatgtatttaaatttagattatatttactatagaccaacatttcacaagatttacaaaagtaaatcagcagaagggtttcaatcactaccatatctcatagcactactaaacccaacgttatcgatgtactatgcattgcttcaggaaggtcttatgctgctcattactattaaatcatttggttgtgtcatcgagaccatctacattggcttgtttatcttttacggtcccaaaaaatttaaggtattcatccactattaatattttattttaacaatattgaatcggaaatttgtattttttatgcgtacatgtacttcatattttttttttcctaaactcataatatttgatatttttggaatatgacacattttataattttgaaatgcatcagtttagggaaataatttcccccaatagtatgcatatataatcaaatttccctagtgaatataacatatatatatatttaacttatat

SEQ ID NO: 235364 - DNA, 774 bp, Cannabis indica
tacaattaacaacaaaaaaaaaaaaaatatgtttcaatataaattcatacatattcaaaaatcatcacacatttagcaaataacaaagacatgtgaaaatacaaagtaccgattgaagataatctttcagatatgaaaactaaggttgtgtggagtagtaaatttgagcattgtctgaagctgattgggataggagtcatttgagcctggaaggaggtagggaacaacaacatctaacaacgatttgtcaagcaacttcaacttgcaaccaaggtggagattgttggttatggttatgagtttcgtcttccgaaaagctagttgttaatccaaaaagaagttataggaagcttggcgaccttccggatagcttgttcataaatctatgaccagtctgaatggtccttccagatagcttatcatccgtaaggatcgtctttccaaataggttgtcatcaatctgggacatacttctagatagcttgtagtaagtcgctcacccgaaaagtctgatctcatccggatcatcagattcgaatcaactcgtctggatagttcatacagaaagcatgttattagagctgacataaaatgtgttgctggagctgacttggagactttaaagcagcattaattagcaacgatatcagcgaagctaattttagcaacaattcaaacctatatatagatatcacctttgtaatctatgcgtatcagatcatttgacagcttgagagaaatcgtcattgtgtaagattagagagagagagagag

SEQ ID NO: 235365 - DNA, 918 bp, Cannabis indica
tatcgatataatatcgatgatacgcaaaaaaaaggtcagggatgatcattatcgagaggatgccgattacttgttgacagtatatcgacattatgtctataatatttgaaaatatttctgcgaacaaattgacaattatttgtcgatgttttgtcgataatttgatgatatatcgatataattttagtttctaatcatatttgttgttcgtcgacatattgtcaataggatgtcgaaagaatatcgacaagaatattaaaaatggctgaaacaagtggaaatttttaaacataagtaaagacgaaacaataagcataacaatcatgaactttaaaactaaccctaaacgttatgtacaaccacctaggcgtgatcggttcgcctttaaccacatatattttgcaatgatggcgcccttcagggaatcctagtggataaaagagaacaccatccctttgaatgcgttcgaacctcctctcgtttgctttcacgttcagaccgttccatacattctctttgctctctttgctgaaagagacgatattcttgactacgttttgctctcaattggattacttgacattcaacatcaacaagaacacgaaggggaatgttttgtccttcgttagcatataagttgtgcattcagtcttcgtcgaatagcgtatcgttcctaggcctagccagataacgatccactaatttatgaacctgctcatcatggctttgagaactagaatgactagacatatacaacttagaagagaagatactctagggttaaagaagaataaagatatataacttaggaagtattagttggtccctattagttttctaattgtacacgtgtttgtcatgcaaaatacatttatcgatgatttttcgatacgacttgtcgataataattcgtaaatt

SEQ ID NO: 235366 - DNA, 994 bp, Cannabis indica
gttgatgcaagtttcatgtaatttgagtgaaggtgatcgtgctgtgaatgaatactgcaaattaggttgcacatcctccgtgtgcggtgccataaccactctccaaaactctggtaaagcgcaaactcgatcccattcccaagtccctaagctcactattaattttacttttttattattatagattaacaagagattcccattctaattatgcaacttgttttgtgactagatgcaagtgaagttgtgaatagagctgttgaaaaatgtaccaaggcatgttctgttttctgctctaagggttctattagtgcagttgaaactgagatataacatgtcaacatgaaagggtagagtcctctaaggagtgttgttttctttgctttcaataattgtcgagtatgtgacaaaaatatatatggtaggctagtgtagtgctagctacttgtgtttgagggtgttttcagtttgtgttgtagaaggttgtcgatcatagattgtatatccttctacttcttggtattaattaataaagagtaattaattataatattgtatcttttttaatattcttcttcactattcttgttttcatttatattccacacatcctacaaatttttcatgctatcttaactttatatgtttacttaaaagaatggaaatgaatagtatggtattgattttcatataattgtttattaaattttggaaagggaaaaagcagtgagacctacacaaattaagagaaaataaaaagaaagattcttctccatttttatagggaaacttaatttattttaattttattaattaaaaatgaaaaaaaaaacaaaaataaatataccctttaaaaatctataaataaaaaataattacatgttataataatgacaattttatcaaattaaagcatttcaattatctttcctagttatataaataaaataatatgattttgatttttttttcagacagtttagtaaacagcata

SEQ ID NO: 235367 - DNA, 516 bp, Cannabis indica
tcttttttaagttgcactgaagggatcttaattttcaaggaatttttatattacagtatcttcatattccagtatattaccttaatagtgtggtatattgtttttatgtggtttggtgcatgaagaacgaaagataaagatattcgagtatattactttaatagtgtagtatattattttatatagggtggtatatgaataacgaaagataaaatatattatagtatattcatattcgagtatattactttaagagtgtggtacattgtttttatgtggagtggtagaacgaaagacaaagtatattacagtatattcatattcgagtatattacattaataatgtggtatattattcttatgttggttggtatatgaagaacaaaagaaggaaaaaatatggaatagtagtttacgtttgaggtatggttatattcattggagtatattctttttattttttttatggtatatgaaaaaatgaaaggaaaaaaattgtggaatattaaactaaat

SEQ ID NO: 235368 - DNA, 1389 bp, Cannabis indica
taaacaactgctaatttccaaattaactaagcgggctttacaaaacccaacaagtcctcctacagttcctccaccgcaagctcaagccgctttagttcctgctgtgttagcagaacaacctgttgttggcaatcgtatggagccactgtacaagaggtttcgcaagcaggcacctccagtgtttctgggaggtctggatgtaatgaagtatgagcagtggctcatggtgatagaaagaacttcgaattttatggtggtcgttggaaatgatcgggttacttgtgctacttttcatttccaggaagacgcgctcatgtggttggaattggtgtccctcacccgagacatcactattatgacctgtgaagagtttcgagagctattcaacgctaagtattataacgaagaagtctgcagtgctaagcgaaaagaatttatcgagctggtgtagagtgagggtatgtgagttacgttacagaatatacgacaaaattttatcgtctggccaagttagcttcgggtattgtacctacagacttcaacaagaaggagaaatattaggcaggtctaaatgtgaaaattagacacgaccttgtgattactactaatgaagcgacgttagatgcaaagatggttaaaaaggctctacgagcagaaggtgcggtaaaattcctttaggaaccccgagtgactccgagtgttggtgggacccccactcttcctactcctgtttatggtatggatggtggtgattccaccactgatcaaaaaaagaaaggctaacccgacatctggtggttcgagacagagcaagcagttccatgggaaccaaggcagaggttgacaccagggttattcttaccttgagtgcccacattgtaagaaacatcatctgggagagtgcaaccggaagacatgcttcaagtgtggcatggtggggcatttcaggaaagattgccctaagtcaaagaaggaagagcagaagccaaaggcaaaacccgtacctgctcgggtgtttgtcatcactcaagctgatgctgcatctagtccttctgtcgtgataggtcagcttcttgttaacaactcatattttactatgttatttgactcgggagctacacactcatatgtggcaacacaggtaattaatctattgggtaattgtgattttatcgaaagagggtttggaaccctattgcctagcgtggagttggttatgtccagtaggcgaatgaggtctatgccagttaagattgaagataaggagttgagtgctgacccagtagagctaaattagtagaatttgatatcatacttggaatggatttcctgtccaaagtattaggccagcattgattgtaagcgaaaaatggtaacctttcagccgga

SEQ ID NO: 235369 - DNA, 1252 bp, Cannabis indica
aatggaagcttaggccgggaggttgcttgttccttaccggcttcaatccaaagaaccctcccggcggcggcttgggctttgatgtaagccaattcttgttccctcctgaagaggtacttcttataacggtccacagcggaagcaatgatgtctgcccgaagtgccttcttggagtcaggactgcgaacattgggacaaaggaccttggacaaattgaaatcgtccactgattggctctctgtgatcaacttggccctcctacagtgggcgactgtgaccaagtccccgacgttcaacccgtccttgtcatgcgtggaaaagacctcagcgtgctaaaggaaaagctgtgtgggggcggtgcggtgcatcggcggtatcctgacccactgtgtaagcagttctcggcgctcgatggcttgaaaactggaggagaagaaaaaccgatgatggtatttgttaaccgtctttaagtttgtctcccttcttggggacggatacaagttcataaaagtacaaaattttagtcgggctaggagaagcccagcctctggcaacataaaaaattaataagcctgaaagcaagcggtatgcttgggggataagttggtaaggcgcaaggccaacaaaaactaaaaaatcgatgaagtaatcctggagcggaagcatcgccccggacatgaggtgagtttagctccaagctccgaagccaccgtaattatgattcggcgtctcctcgtcactaggaagacggtgaaagagggtcccttcatcacctcttccaaggtggccagggtaatagatcctttgcttgaggatttcactctggtcgtgggaacagacatgtcttgagaatagtgagactctgaaaaaagagaaatccagcagttagcccccaaaccaaaccctaatatgaaaggagggaatgggggtcccctaacgctggatagaggccccctccggatgtctgccagaaatgaaaaatccagggattctcctaggcaaacatccggtgcagatatcccaaaggtagcagcaaatctttagcaaaaatctcaggttaacaagaactccattaaagtgcacaaaactcttccaaattttatgcaatcaatccttggaccttttcaaacatattcctatgccaagcaagctcaagaataccatttcaagcatagttctcaattgttacacaaggatataacatattcctatgttatttcaaatctaacctaaaaaagattaagaacttgtg

SEQ ID NO: 235370 - DNA, 1293 bp, Cannabis indica
ttccgcccgctaccaatgttcaaacaactattggagatgacaatgaaatccagaacctccgtgctgctcttagaatcatgtgatcaggaggaactccttgctacggtgaatctcgcatttgaagagtagaggcgcatgttcgcttaatggagagataaggagatgaaaacgttaagggctcagcaagcagtcattgacgaccatagtcggcaggcaactgcaccggacaacagcctgtaaccgtcatccccttgggcaaaatatatgaagatccagcgataaatacctctcagactataaatggtcagccgccaaatccccggtcataggttccatctgtgggccaagtggtaggtgggcagatcttgtctggtaattcatcatgagaagtcatacccaataatttcaacaaagttaatggcctcgatcagcaaattggccaaaccaatcagtcactgagatagccaggcatttccttatttgatagattggggaacactcatgatctcagagacgatctgaacaggaggaggggagtggacgatcagcttgacacgccaatcgtgcaacccgaaacccgcgctcaaaatcctgctcaaagggatgctgatgtgactcaggccggccaagaggccgaacaagttagtccagccgtgcaagcaaagttgaacgaactaaaaaatatgttccaagccctagctggtcagaggaacaacgatctcgagttagaccgagcacgtggaacccctttctccctcgagattaatatcctggaattgccccacaagtttaagatgctaacctagaagatgtatactgggaaggaagatcccttatcccaccttaagtatttcgagatacaaatggaccggcaaggagtacgaggagatgtatgttgcaaaaattttcctgccaccctctcagaagccgcccaacaatggtatttcaagttggcgcccgaaaagttcaactcatggaaggctttctcctcaaagttccatgcccaattctcctcctctcgccattttccgttgcacctaggagatctggttgaagtaaagcaaagaccaggagagccactccgagcctacatcaaaagattcatgataaaggcggttgcactggtaaccgaagatggaaagttgtccgcgatactgggggcattgaggtccttggaaagttcactggcaagaccgaacaagctccccgagagaatactgccaagtgtaccgcatttaccgtcctgacagaagatatagaaagtgtttatatggctacttagtcattagcccc

SEQ ID NO: 235371 - DNA, 1483 bp, Cannabis indica
tgattggtatgctgacacaggtgtcactaaccacattgctcaaggcatggaacaattggactctgaaactccctattctggttcagatgcagtggctgttggtaatggcaaaagaattgctataagtcacattggtaactcatctctcccttcatctcattcttctttacaattaaaaaatgtccttaaagttcctaccattaccaaaaaccttattagtgtttcaaaattaacagctgacaataatgtttttttagaatttcactctaagtgttgttttggtaaggacaaaatctcagggagagttcttctcaaggggaggcttaaaaacggtctctatatgttgtctcacagctcctttccatccaaagttcaactctaatgtcagcttgttaccaagaaaaccaagtctgaatcaaccggttctgactccaatcaagaatctgtacacttccctacttctagttcttcttgtaataagagtactgttaacatagtgacgccaccttgtactgattctaatatcaataaaaataattctttgccttctactaatgactctttatcttttcttgttcaaaagaatgatgtcaacatttggcattcaaagcttggtcatcccacaccagaaattcttgcaaaaattttatctactttgcatattcccaccagctttaaaagcctaaggttctgtgaatcttgtaaaaaaggcaaaagtcacaagcaatttcatcctctatccgagtctagggcctcaaaaccattacaattaatccacactaatttgtggggaccatctcatatagagtccaaagaagggcatagatattatatccattttattgatgacttcagtcgctatacatggatttttcctctatccacaaaatcccaagcctacactacattcttacagttcaagattttcgttgaaaagcaattcgatctcttcatcaaaactgttcagtctgattggggaggtgaatataggtccttagcatctttcctaaatcaccatggagtccactttcaacatccatgccctcatgaccatgctcaaaacggcagagctgaacgaaaacatcgccacattactaaaactggccttacattgctagctcatgccggtctacccttatcttacaggtggcttgcctttaagcatgttgtttatctcatttatcgaatgccaactaaagttcttggtgacttatctccctttgagtgtctctttcataaaatccctgactatactatgcttaagtcattcaggtgtgcatgttacccatacctacggccttacaacagtcacaaattagctctaagatctgaaagtgcatacttgttgggtactctctgaatcataaaggctacttatgtgagaacaaaaatggcaaaatttatatcgcaagaaatgtagactttgatgaagaagattttctagcttttcatttcactactacaccacaggtacattcttctt

SEQ ID NO: 235372 - DNA, 771 bp, Cannabis indica
agcggttaacattggggatgaggtagatggattgccagaaatttgacttgctcccaagtgttaattcatttttttagtgttttatttgtgtaaagctatgtctgcactgtgacattaaatcaaaattgttaaatgatactaagatccaattttagatgatcgtgtgagacagattcaaggaggtatttagtttaccaatctatagtaaacgtggtttagtttaagttcacgtgctgggcctttatgataatctacttttttaacacttccattactaaaactataccgtcatagttgtgttgtctcttcaattcacttgatatttgttgcaagtatctctaaacacttctctgtactttgcagaatgcctttatacattgggatggtgggggtggttttgaattttatcatcttttgttatacaactatactagcatggagtgctaagagatttgatgaaaagtgggaaataacgagtacatcggctctgccatttgtcactcttcttggaatgatctcgtatttcttgtaagaaagattcttgctgttcttctttaacttcattagctgcactgtgtgtttggtattttttccttatgatgatgacatataatggcaggttcacctttgctttgtggccaatatggggtttcttaacacttcctcttttggtaagttctttgtttcccttttttttttgttggaagtacattgaatattggtaaagcctaataaactcttcatattgctgcagttcacgttgtttatggc

SEQ ID NO: 235373 - DNA, 857 bp, Cannabis indica
atttcagaagtcgtgatggtatagagaagagtgaaaaccttatgcttctccctatttatacatacatgctactccctaagtacctacttaaaaatatttcatatggcaaacacaataaagaacatgaaaattataaagtaggggcttaaagtaaacccttgatctcacaaataaagataaaaagcagatatttctgtaaattatattccttgatggaatcactatgcaaattctgttaggcttcaagcatagtagagttcttaatgtaggattttaagtaccactttctttctcaatgttaactatgctccgctatcttatctgcaaaatgttagtgaaactatttgttgccctaatctgggaactcacgacactaaaccaacgcagtgtcaagtaagacctgtccggtcatgacttcaaccctttagccaaggcaaagatctcgcactctggtcaggataaacaaattgtgtccagttgtgtcttctatcactgattaatatgctccagagacagctcttgtatgaagggtttaggggaccaattgtgactgttctgacaaccaaggcggctactcaaagtgtcttgtcgagttgcacattcaatacagatttcccacgaaaaagggaattattctttgagatgcgcttcgctaacattccatgcagcctcatgacggttactaacatcagccttacattgttcatacgcctaatgatgagcatgggaaattattattcggctttttactctactgtaacagacctcataggcccaatctatgtattgtgtgacacatcatgtgataaaataatctaaggaacagtccaccaagggtttagcctagaagccccttt

SEQ ID NO: 235374 - DNA, 992 bp, Cannabis indica
ctgcataatgcgaattatggttatgcgatccgacttaggtcgtactcgcaggttttatcctgggcgaggtctaaacttcgagaagtctctcatggacatttcagctttcattggaaatctgaatacacgtgtcctttaaataggagtctggtctcgagtttctaggtgagagaaatctcactataacatgtatgttttctaatctcaaaccaatttgttcctaagtgaatagaaaaactttctcttttttccattcttaatatttccatttaaaaaaatatatatatatatatatttatttttaggttaaaaaaattcttattcctctaaatctataaattttataatgggataatttttagtttaatcaaagagcatataatctcaattaataattatatatatttggtcaatctatcaatacaaacggtttgtgaataatcttcactactataaatttactattgtaagttaaagattttcacttatgaaaacaaattaaaattatgttcatataatttattttaaatttaaatttgggatcttttattttaaaataatgaaaaataataaatagttaaacctactgaatattaaatgtttttttttttttttaaattactattatatatttttttcaaattttgtataactaagtgtacgtgcattgcacgtaacttcaaccctagtatatacaaatatctattctatataaaatgtggctatgtaatacaattcttagtttaacattttgttattttttattctgttaactttaacggagtggtttaaccttttgttattttttattccgttaactttaacggagaccatccgtcttttaattaatgcgattcaaaccaaaatacatatgaactttcattctttcaaaaaaaaaaaaaaacaaaatacatattgctattgttttatctgcgattcttcatcccccattcttctttcttctctcaaatccacatatatatatatatata

SEQ ID NO: 235375 - DNA, 799 bp, Cannabis indica
aaatattcataaaatcatatgtattcaacattaaataattaaatccttaaaaaaatattaaataaaaataataaataatctaaaaagtcttaaaccattcaatactagttatcgaacaacaaaatattcaagaaagtattcttaagctttcaacagttctaaaagttcttccaactaccacaaaatgccttcaaaattaaatgcccattcgcatttcacttgtagcatctgaaaagtaaaacaaaagaaaaactaattaggctttaaagtatgaaatcattcatacatagctaatactattattaatcaatctcatatgagattttatatcaatttaaatacatatgtaatgaaggcaaagaaagaagcattatttgaattttcaataatggataataaaaaggtgataaagaaaggaaagaaaaatatttgtacagtgttctgatcactcataatatagaatttaacccactaaaaaacacaaaatgtgaaaatgtattaatatgtaattaacaagcattgatgcagcaaaatcaagtctaatattctaaaaaaaataacactctgagtaaatcaaagcaccaactatagttctatatttattgaaaatttaaatcttagaaagatgacacatgtattccatgataaaaatatatactatgattatatgataaataaaattgagattttactatatgacaacatatttaaacaaacaatatcatcatgatagttgaaatattatcaaaatactatcataaaatatattataacaagtattaaactaattattaatctt

SEQ ID NO: 235376 - DNA, 1385 bp, Cannabis indica
acgttaacatgcctatgctagttagggtgttacaatacggatattcctgtgttccacgacatgtcccaggaacttgatactttcttgagaaaatgagcacttctctcgcttcacatacaactgttatttcctcaacttccaaaacaccgtagccaagtgttcccgatactcttctaaaggggcgttgtagaccacgatatcatctaggtacaccaccacgaacttatccaagtcttcatggaagacttcattcatgagtgtacagaatgtggctagcacatttttcaacccaaacgacatgactgaaaactcaaatgccccatatcgagtaacacaagtattctttgtttcatcccctactgcgatccgaacatgatagtagcctgatctcaagtcaaaccatgtaaagtattttgccccacttagctggtcaaacaaatcagcgatcaagggaatggggtatcggttgcgcacaatcactttgttgagggcacgctagtctatgcacagtctcaaggtcccgtccttcttcttctagaacaacaagggggcagctaatggtgcctttgatggcttgatgaatcctgcctccaacatcgctgttagctggctcttcaactccttaagttctgggcaagacaatcggtatattgctttagctggggcctttgcacccggcaccagctctatttggtgatcaactcccctcctgggaggcaatctcttcgggagttcatccagcatcacgtctttgaatttatctaacacctgctcaattttagttggagtggactcctccacttttgcatcatacacggcggtagcaatgacaaatgttggccttttcttcttcaaacccctcttcagttgcaaggccgatagaagcttgacttctgggggctgtctcactttagcgggaaccatttaaggattctcatccatgatgagtagattccctattgctggaatcagaatggccccctcctctgctagaaactccattcccaataccacatcgaagtcatccatgtgaacagctacaaggtcaagttgcccctcctaatcatcgatcttgacattcactttcttggccactccaatcgtggccatggccttcgaattgactgctttcatgcggcccgcatctttctctagttttaggcccaccctcttggcttcgattttggaaatgaagttgtgtgttgcgccaatgtcaatcaacacactcttggcctgcttttcattaaaagtggcctcctcaaacatcaatcccttcccgagggctttttttctgcactcaacaatcgaacgacactcatgtgcgcacagtcttcgtcttcatcatcttccccacatccttgctcctcttgagcaatggatgcctt

SEQ ID NO: 235377 - DNA, 2001 bp, Cannabis indica
gacatggaccaattaatgagtgacacgtagatgccgacctgtcagttaacgacgaggtacctacagaagttccacactagtgatggaaggtatttttaccgccaaaaatacgactttggtatttatctgctactcgggataaaacttaggtatttatgccgcaaattactcttatttaattgctcagtctttctacaaaaactttaaaaaagtcaatgaccaccatgtggagattaagggtatggggccatttagggtctatttggttagaggttagttgacataggttgtgtgcgtgcgtcggcagtagcttcaccttgtgagtatgtcatgtgactcttttttccatttcctcatagttgatacttgttatagttaacattattattaatattattttatcaactatgaggacattccgtttaggacaaattatccattattgcaacttttcttaattatgattttcttaaagaatcatgggcttttcgttggtgggatatactctttatcaggttagtgcatcccatgtgttcaacacttaaatcctcaaccggagttcgttaaaatttatcatttcactaagtggattctgatccctctataaatttgaaccagacaaatttctgttgccctttaccttttatcttttagttcaagtagttaatcttttggcaaggtgaatattcaattatatggtctatgttcaacattggagttcatttatcaaggcaggtcatacaaggaagataagatgttagttccctattaatattcccagtggagcagactttttttggtgatctaagttgagtgttcagttatttgaacatcagtatcttaaaatgtattatcttcaatctttcaagctaatgaacaaaaccttttttcaacaactagcatcttttgacatcattatgtctagcatttgattctttttgtctatgtattttatattattgttgtagccaacatacattattccttcgaaaaccaccatttagtttttcccttcatattgagtaattttctacatggaactttactttgtttggaggtgttccaaatagtcatttcaccttagaaacatttgagatggtttatttatgttcaaatcaatgctttgagcaaaaacaagaaaagacatatattattgctctcctcggctggagcttagccatggcgaggaggccacgactgagaaaatcgactagaactactaagtcaacgaaggctccagtgaccaaatcgaaggcgttggggatgaagacgaccaaggcaacgaagatcaagaagaaatgaggcccaacatcatcagatcttgtgaaaaagaccaagtcgattgatgagttattgtgtgtttgtaacgaccgacttttaaaacttgctaattcgaaaataattcaattataatataattatataacctcgtaaattgggatctcgagtttaaaaccacttgttgaaaaatacatatattgtatataaagctacacaattttttttatacacagtacaaaatcacaggacaaccatgattttacagggcaactacaaaatacaactcaaaatgttaaaagacggaaatccttcaggttgcactgccgcgatatgtacaatgcttgccaagctccaactcactgctcctccaccttagctttatccttacctgcacaaagtagcaaactaatgagtcgacagactcaataagatatgcataacatatatataagcaatgctataccggctttatgcttaatccttcgtgagcctaattgttaagctcaccaaatggttaagaacgttctcaacagaagtttgaccactgaaccatatgcactagagtaccaactccgtacttgtgttggtagggccattattgtacttccaggagttattgagtgttgtaccacatgcatgacgtaccccctggtactcgtgttggtaacactataactaccctaaaaccctacactgcactaacacccttaaaactacttt

SEQ ID NO: 235378 - DNA, 1346 bp, Cannabis indica
ctggtttcttcgaaaatttaattgctggtgtgcagaatagtcctactgcttcatcaagtaatcttgacagcagtactgctactgataaaccagaaaactcctcgcaagaaccagtgcctttagctccctcacatcctatgattactcgagctaaagcagggatattcaagcctaaagtttatgtaggccaatctcagtggaactgtgacaatgaagaacctactagtgtcgaagaagctcttagacacaagggctggaatggggccatgtcgacagaaatgattgctctcaaaagaaatggaacatggattctcattccaaggactgaaggcatgaatattataggcaacaagtgggtctacaaagtgaaactaaatgcagatagcacttttcagagatacaaagcgaggttggtagcaaaaggcttcaatcaaagaccgggaattgactttggtgaaacatacagtcctgttgtgaaggcttcaactgttcgaatcgtcttaactattgctgttgctaaatcttgggatattaggcaacttgatataaataatgcctttcttaatggggagctacaagaagatgtgtatatggagcaacctcaaggttttgtggatgtatctaaaccaaatcatgtctgtaagcttgtcaagtccctttatggactaaaacaagccccaagggcatggtatgacagactaaaggctactcttgtcacttggaaattcagaaactccaaggcagattcgtccttatttttctacaaaatcccaggtctagttatcatggttctaatctatgtggacgacataattgtgactgggaacaactctactaaactcaatcagtttattgacaaactccatgccgagtttgctttgaaagatctggggcctttgcattacttcctcgggattgaagttcacagagatgagacaggtctctatctcaatcaaggtaaatatgttaaagaacttctaaccagaactgaaatgctgcatttgaaaccgagttctacaccaatgacagtaggcaaaccactgtcaaagtcagatgggaaagcactctcaaatccaactgagtacaggagccttattggaggccttcatatctcacacacacaaggcctgacctctctttccctgtcaacaagttaagtcagtttctacaggccccacttcagcacattggacagctgccaagagagttttaaggtatcttaagggtactatgtaccatagactacacatcaaagttttagatagacttgctattactggatattcggatgccgattgggcatgttgtcctgatgatcgaagaagtgttgttggctattgtgtgta

SEQ ID NO: 235379 - DNA, 1187 bp, Cannabis indica
atagaaacagaggaaactctgtctatttttttaggactcattatttgaaatttttttctttttttaaacatatgcatttggaaaattttaaatcaaagacaaaaaaggctatacaagttttatgatattgagcttcttagttataataataagtaggacaatgtgatagccatcaatcacttgtcaacatggttaaacactatgactcaaataggacaatattattttataccatggaccatagggtaagaaccacgcattttttttcactttcactataatattttacttttataataaatatcattgttactttttcatcaaacattggatgttgattatagcaatgacatcgcgaagaattgtatacttaaactcgcttaaatctagagtctcgtcaatcattattgggatgataagaaggtaagtttagaactttataagttattcattctaatataatgatcaattgaaaaatttcaatagtttcacttatagttttttttaatgtctttaacagtgcatacacaaatattagttcaaatactatcgtatatttggcacaatgggactatgaatatatacttttgtttgttcaaaacaaccatacaattatgaatgtgattattatgtaccaacttacattcgtgatatgcttcaacattcaaatcctatcaagtaaaaaataaataaaaattaagtatatactcattttactataaatacaaacatataaaaatacttttcttttaattagttttaatttcttaatttgatagtttgctagcctatcacaatattgtgggcaagaacatctcttaccgcttcgataatagtagttaagttaattgctttccttgatatataaatattgatcagtagcatttttattgtacttttttttaagacactatatgcagtgttttagagatacaatatgtaaagttttatttattaaatgaagttactaattattattgttatttttaagattgtattaatcattcattttttagttaatttattttatacaaattttatataattataaaaataaaaattagatttattatttattgttaaaaaaatgaatgaaatgtaataaatttaaaatacttttttttgaaaacctacatatttatttacaaaatatgggatcaaaatgtcacattttatcctatttttta

SEQ ID NO: 235380 - DNA, 1369 bp, Cannabis indica
cacttaaccctgtccattttgcttttcttgttaggaaacaacaattcttaacagggtttggttaaaggttgaatttctctttgcgtttgattcttataagtaaaaaacatgcttaactctctcctaagttactgctacttactaaagattccatctattcatttcgtttctaattgagttgcttgatcatgaaatcactaaagttgtttaaagtgtatttttctggaaccatttgtatgttatttgtacaataacactattcctggcttatagaaaatgtgtcaccctttttgttttctctcttttgaaatgctggcgtccacccagctgtttctcttctttctgtgttttgaaatggcaatgcattgggacatttagttgagacaattatctatcattggcattaatgctaaaaatgtgttgacttttgctggcaggttttccatttcctctatacttattctcttgtcgttgatgtttgcccattcacccttgatgagtttgctcaagcatttcatgacaaggtttcattccatctttaatgcaactttgctttccatccgcctgtaacattttgttttctctttttgatcttacctccttcgatttgagttctttcggtttatataatatgttttctgaaacgcctttcaggattccttgttacttgggaaaattcatatggccctattgaagcatcttttatcagacattgaactggagctcaacaatgaatctttgcgtcatcagagtaaatcttgcaactatcttgcattgcttcacatggtaatggtaaagttaaaaaaaaaaaagaaaaaaacatcctcacatggggtttataaactgtagaagtgagctttaggctgtgacattgcaagcttagtgctatttaaaatccaaatatatttatatttgttcaagttctctccagtggcagaatagctctacactctgaaagatgtggtctgttgcaaaagtcctcatatgaaatattcatgcatgattattattttgattggggattcgaatatgggacctcatttttgtgaaaaatatagtagcaatgattaggctatgcctacaactacatgcaagtttattgtttattgataataccaaatggaagtattcaatgttttggcttcttgattaataatattgcaggtggaaaatcaagatttttccttggagttttgggggagatcattaaatcctctaacctggacagagatactgcgacaaatattggttgcatctggttttggtgctaaacaaagttccattcgaagggaaacctttgataaggtattcaaacatttaatgatagtggcactgataaagcttcacattggatctagtagactaaatg

SEQ ID NO: 235381 - DNA, 1846 bp, Cannabis indica
gtattcttctcgttcctcttaaaaaagaaggagctctttcgaaatttcagtcgagttattgtaagtaaaaattcattctttagattctaaaatgttgcccattggctcatgaaatgcaggggtatttataggaaatctcttcattcacgtgctttttgggctggtcttactagaagagatctgactgttgatctggtaggtggccgctccatcatacactttgtagagatgacgacctgtaccgtctggacactccatacgtgtcactcaaagacctttcctttttggactgctcctgcgaatgactgctggacaatgggccagtatgatggtgtgcatgccttgtactatggcctgacgttagggacaaaacttggcttcgtaccaaataaaagcatggtcgtcacttttgtagtatgacagatacagatggagctctcccgcgacatcatacggggatacaacttagtctaaatccttctgcatccctcatagccgtacacggaagcccttggccttcgtagggcacttcctttctactcccaggaataggagatgccatgcgcgctaatgctccacatgtccccgccttacgacaaaggtatcctttgcggaagcccctcacgggagctagggcttaaggcattattcaattgatgattatcttggtttcttctgttagatttcacatgtcatgctaacaaaaatctggacaatagttagtaataagaagttcaaaaataaagagaataatttatatggatgttccttaaaattaattgtatgacttggactttgtaagcatttgaattgctcatacataaaaaaaaaatcataatgcaaaaattagtatttttgtagtatataatgtggtccggtttgaaccgtgactattaaattcaaaactataaactgcaccgtaccacacggtattgtgaaaacataaactgtaaccgcaccacaaaggattttaaaccatatttttttgtacggtgtggtgtggtgcgggcggttatgcagtgtcagtggtttgatgaacacccttacaccaaagaacataaaagcttgtcagggctagattataatagtttcgagaatcgctctatatgttcctttgtgaatgtagactgtccatgattgatgcttggctgtgaagaagaatcaggcacagattgtaaggctctctcgggtctagttggctttccatcaagggattttccatgtattttttttagcatgtctcacgtgtatgccaatattttttgcagaaatcacacaatggcttctcattcttgtcattgttggagttagtttgataaacaaagcagaggtgtcattacctgaaatgaggctggttcactgttggacatcttttttaagcaactttcttctacttggattttagaaaaaacatcacgaatcgaaggtaatggtcgatgtccaagaattctgctcttggcctcatccatattcttgttagtcccagcaaggagcatgaaaaccctgtcattcgtctcatgtttcttgtgttggagcagatccgcttgactttcccacacatcatcattatatttgtttaattcttgccaccatgccaccattttattatagtagcttgtgacatctcgctgcccttgtttggatgtactcataaacatatgaagttcagtgattgaggcatccatggagtttaacagccatgccgtgacaaggggattctcttatcgccactgtccatatgctgcatcttctgcttttggcatctttttgtctctagttagaaatcccaactttccacgaccatcaattgtaagtttcaccgactgagaccattccaaatagttat

SEQ ID NO: 235382 - DNA, 791 bp, Cannabis indica
aaattcaagcattgcttgaacttcatcaatctcagaagttagtacactaagattcctagaacaccaaccatgatgactgcatttttatttatcatcataattcttttaatttgaagtaactaggtggaatttgtggtatagttcctccaaataaaaaggtctcaaaaagttgtttttggaaagttaggtgtctcccgaatgttgttccgaatagctaacttgtccatcccaatagaagtcttgtgaaatgatagttaagtccggaagggagttcccgaatgactatcatgtccactccgggttcagtctttaggatagctagcccccttctagaaaggagtttcagatagatagttattcttcctggaaggttattctccctggaaggcagttcggatagtcgactttagctagttttgccctgtttggaagcttctttaacaagtacctttggtctgtgatctaggaagctcgtgtatgttcccagatacactaagacttatgctgacgtggagatctcactcataggagagtttgttaaattagttattgtctaactaacttaataacttcgtttattgcagccaccaactttaagatcttgatcctatggctataaataccacccacttaagcatttgagaaaaagaaaaacacatgattcagattgagattgagatttagagagagatagagattgagaggcagagaaagaggtattgagaaaagagagagattgtgtttgggttttgtatgaagaatctttgtagatgaagaagattcttggataa

SEQ ID NO: 235383 - DNA, 683 bp, Cannabis indica
atctcttgagatgtaaagtcttcgattagaatcaaggcacttgtatcctttatggttgagactatatctgaggaatgtgcaaggtgtagatctgaaatcaattttgtgtttgttatatggcctgatattaggaaaacacttgcatccaaaggttttaaaggttgtgtagtctggctgtttgttgaagagaatttctaagggcgatttgtggttgagaactgaggtaggtaatctgttgtgtatgtacacaacagatctgaaggcttcatcccagaacttgaggggtagggaagcttgagccaacaaagccagaccattttcaacaatgtgtctgtgtttcgttcggccaagccattttgttgatgtgtagtggggcaagggtgtctgtggtggatgccattttcaatgaggtaagtggaaaaagacctgaactccccccaatcagtttgtagagttttaatagatttacctagttgcaatttagcttcctttttaaagttgagaaagactttaaaggtatatgatttgttctttagtaggtataaccaagtaaatctagagaaaacatcaacaaagtgtatatagtatttatagccattgtgagaaaccttgtgagaggggccccaaagatctgaaactacaagttgtaatggttctgagataacagtggtggaagcttttgg

SEQ ID NO: 235384 - DNA, 983 bp, Cannabis indica
tagaacgagctctagagaatattaaacctccagtgaacttcatggtctctgatgggctcctctggtggacccttgattcggcctccaagctgggattcccacggttggttacttacggtatgtcacattactccatggctgtgttccattctctctttttcggtaaaaaatctgttcttcacacgcatgaggtaaaggttaataataatatggagacaaagaggacacaagtgttgaaaatggtgaagatgagtctcttgctcttgaattcataacaaaaactactgaggcgacacacaaaagctttggtattattttcaacagcttctatgagctggagccagtgttcgtccactactggagccgagaagctgggctcaagtaatggcctgttgggcctctctgtttacatgccatgtcatcgtcgaagcccacgaaagcagagggcagagccgttgttattcatcaatggctcgacgaaaagatcgagaaggaatcgagttcagttctttacgtggcatttgggtctcaagcaacagtttcatcggaacaacttagagaaatcgcaaaagggttggaagattcaaacgtaaatttcttaagggtgctacggaaatcacaagctgaaatggcagagcccagtgaggagtacaagttctttgaagggttcgaaaacagagtaaaaaacagaggaatggtggtagaggttgggttgaccaaatgcagatattgaaccacaaaagcgttaaagggtttttgagtcattgtggttggaactatgtgatagagagtataagtgccggaatgcctattctagcttggccgttggcggcagggcagcccttaaattatgatatgatctaatccaataagacctcaaagtccaatccactctaatccaattactaattgaattggatcgtgtttttaattagatatccaattacatacctaacttttaaaaaaatcaaagtttaaaatat

SEQ ID NO: 235385 - DNA, 1292 bp, Cannabis indica
catgaaattgatattcaaagagtccttacgggaagtccttggacatatgatcggaaacaattgattcttgaaaggctaaagaagggagataatccaagaacaattgcgctaaacaaacttgacttatgggtgcaaattcatgatctccaaaccggattcaagaaggaatgggcggtccgacaagcggggaattatatcggtacgtttcttgaaatcgatccaaacaactttcaaggcgtttggagggaatatttacgtgctagagtccgacttaatgttgaagttcctctcaagaggcaaatgaaatttcgtaaaatcggtggcgatgctttttatgcaaattttaaatatgaaaaactgcccacattttgtttcatttgtggaatcatgggccattcggaacgcttttgtgctaagctttatgatacaccgattgaagatattgtgaaaccgtatggattagagatgaaagcaccatcaagaaggcaaagctttccgactgcctccccatggctacgaacccgacaacccaacgccacttcaccaggcatcaccacacccggcgcaggtgctgcttctccaataccaccatcagcaacaaaaccagcagccaattccgccttcactgccgctgctccagtcacggtatcttcagccaatggtgcggccacagccacggctccattctccaattgggttgttgcagtcacggctgaaataaagggatcttacacgcataaaaatcagcaacattcaaggttgtttgtccattcgaataaattccttgattctagaaaagctgttacacacatggtaccttctattgttaaccccacattaattttgcatgataatgatgccacctttatttctgatatgcaaatagatttggttgactaaaaaagaaaaagaattgaaaataattctttttcagccaataataattctatttttaaggaagtggatattgaaaatgagcctaatgatttttctaatcaagatgttgttggtctcccaaaaaacggcagttcgatgggccctggttcccaggcccaccaatcgatatgagtactattggttggaattgccatgggcttgggaacccatgggccattcaattcctacaagacatttgtgttgaaaagaagcccaattttttatttctttgtgaaactttgtgtagaaaggatgtggtggaccgggtgaagtgtaagttgggctttgaaagttctttaactgttgaagcccaaggaagaaaaggtggtcttactttcttttggaaattttctgat

SEQ ID NO: 235386 - DNA, 1000 bp, Cannabis indica
aattactaactattttgccaaacaaaatattatgaattcatatgtacttaccaccttatatccaaacacaccttacattttaaaatatagtgtaattactacactgtgtaattaccaccctagtaattatcctacctagtaattacacagttacttccaaacatacccttatacttgtaaagttttagcatcaataaaagtttacttaccaaacaaaaagagttacaaatttgttactctttctataaatatattacatttgatcatattaaactacacattataatttaatggtcacattttaatttaaaataaatattattttaagtcttattctattaattagattttatattttgttaaatgataaatcattcactttttgaaaatagtacaaacagtattttaagttcattaattttcgtcaattttttttaacataattaatttgaatctaatacaaacatatgcaaaatatgtgactaacttggccacaatcaatcacggtacatgttattttacataatttgaaaaatatactgtttaaattattatttaacaaaacaaagaaaataattaaaaattttcgaaaagaaaacaaaaacagaagtagtaatggcgatttctagaactctcaagaggtatgtttctcttcctccgtctggtacccacgttgggtttctggtccaccctccacggtggtgtgatggcaatcaggttcggattcctctttctttccttcatcatttctctgctcagagcattaattgtgaaattaatgtctctgatgtttattatctctcaaagatcccttctgctgaaactgtccaatgcattaaatgcaaacttctcttcccccaagaccttaagcctcttttgtcaaccccttatttatcactaatcctcatttatttacaccatcaaatcaattatctacctgaagatatgttttctctaatagaagaggcggcgaggaggagaaatggtgatgatgaagcct

SEQ ID NO: 235387 - DNA, 2047 bp, Cannabis indica
ccccctactaggcactataggactgagagtataaccactactcacaatattgtattgcacggttgaaaggcatccataaatgagtcgaatccctttttcattaaaacccattcggccaagcattgcacatagaaaatgccaatctaccctatcataagctttgctcaaatcaagcgtcaaggccatgtaaccatctttgccactttgctttctcttaaggtaatgcaggatctcaaaggacaccataatattatccgtaatcaagcggcccggaatgaacgcactttggttaacagatataattttagccattaaacctttcatcctattagcaagtaccttggttatgactttggcaatgacattacacaaagaaataggtctcaactcactcatttggtctggcttcttcttcttgggaatcaggacaatgtttgtgttttgcataccctcaggcatcgtctccgtatggaaaaaatcttttaccgaacgaatcacatcctctcccacaatcccccagtacttttgaaagaactttgggttcataccatccggtcccggagacttatcgggatgcatttggaacaccgcaacttcaacctcttcatcctcaattggtcgagtaagcattatgttatgctcatttttaactacaggtaccacacaatcaataacttccctccagtttccttgttcagcgtggaatatatctttgaaataatccaccattatttcacccaaaccagtattccaatctcgaagaacacccgaactatctcttaatcttacaatctgattattacgcttacgagagttagctttcgaatggaaaaacttactgttttgatcaccttcttttaaccacaactgctttgaccgttgacgccaaaaaatttccctctggtttagcacatcaaacagccgcctctttgcctcataaaactgttgttttccttcagcatctcgacgtttcttcagcagcttcagctcacagttacattgccttattctcccaccaaagttaccagttatacctttaccccactcttgaaggacctgaccacaatgattgattttctgagcaatagaaaccccattcattgagcaccagctttcacggataatcttctcacagtcttggtgcgaagtccaacaattttcaaacttgaaagttcgaataggagcagcagctatatgataattagaatccaaaagtaatgggcaatgatctgaggaagaaacttctaagttaaaaagctttgcagaaggaaaaaagataaccaaccgttattcaccattgctctatcaagccgagcctcaatccaatttggtgtatccctactttctcccaagtaaaggatgtcccaacatatccaaatcgcaaagcccacactgttgaacaactttgatgaagcacatgattgaagtcccccatgatacaccacggagccactgatcgtgcaaaaagagtcctaagtagaacccaagtttgcttcgttgactacggttaggctccccataaatcccagtgaagcgaaaagatcgatgcccttccaccgttatcatactgtcaatatggtttttcgaaaaagagtctatagccacctgatcttggttcctccatagtaaagcaataccaccactgtgtccctgggcttcaattgcaaacgaactctcaaacttcaactgcctacacaaagcatccaccttttttttgttactcagggtttcacataagaaaacaacgttgggcctattttgagcaactagctcttttaggaactgaacattccgtgtttgcccaagcccacagcagttccagctcaatattttcataattgtgggcgagccccatttccaaggcccgccaaacttaagttttttggaattccactaacttcttggcccatctccacgtgccccttgctcccttcttcactcactttcctttttttactgtcataaacagtcaaacaatcagataaatctctaataatttctttcccactatttatgcgctgaaaactatccccatttatcataggat

SEQ ID NO: 235388 - DNA, 669 bp, Cannabis indica
gtatcagaatacttaaaatggatgttgtagagtggaatatgactcttcatgttctatgaataaagtcttgttcctttttattgtaaagtattgtgaatcattgaacctgagaatctttatagaactcaaaacaaagtactaatttcatcacaatcttcttcagtatgagttataacagaactgtgtgagaaagtaatacaaacacagttgttcaaaaatatagagtgagaaagagagagaatatggacagtggctttagagagaggggagagttttcaaaaattatgagactgaaagcttatgtgtagaaagctctactataatctttctttttatagctaaaggaaaagttatttttctcccactaattaaacaaaaaaataaaaagaaaatacaaatatgaaagtaattttcttgccttccaagtaagtggatgttgggcttggattttctcttttattcacttaaagcccaatggacttaaaaatataatatcttttctattttaatatatttaattaaactttaatattaaaatactaattttaattgaataattatatttaaataattattaaataaaaacaatttaaatattattgttaattacagaaagaaaaatgcctgattactaattaaatctttgttttctctttcttataagtttca

SEQ ID NO: 235389 - DNA, 1290 bp, Cannabis indica
cttctcctctttcccaatcagaatacccatcacaaacagaaccatatccaacttgtaaacatcatccttctcagtgcaactctcaaagtcgctgcgtagtcgaccaatgctgatggatggattcccattaaagtattctactatgaaacggtctaacgttgccttctcttcaacctcagcctcagtaggtccacgtaacatattaagcccagtcaccagggcaaacttagcttgggtgaatcagcatctcttccttgctatgtaagaatgcacttcgtcatccttatgtgatttgatcttatgcatgaacaactgattgataagtgcaccaaaaaatgctaatggctctctctcaaaaaatttcttgaaataggattcctccttcaccctttcaagtaactccatttccacaatttagcttttactttggggtaataccaactaccaccccaccaagtcacacgaccagtgtaatgtttagacactggaagtaaaaggcgtggaacattggaagactgcaaaaaaacaccaaaaaatggcagtaaaaaaaatcaagcaaaagcatcggaccactatcgggcactacatcagatatatcggccctaacaaaaaatataatgaatagtgcaatcgggccctacatcgggcctatcgggtccctatcggactcaatactaaaattatgaaaaagtaacaaacatttaaaattcaaacaggcatcgaacaatacatcagaccctacattggacatatcgtgccccaacaaaaaaataaaatgaatattgcaatcgaatcccacatcaggcccattgggccactattatacttaatcctaaaattatgacaaagaaacaaaaattttaaaaaaaattcaaataggcatcgggtaccattgggccctatatcgggcccatcgggcgaagtctaacttttgggagttggtcagactatcggaccgcccataggacccaatatcgggcctttatcttcaacccaaagacaacatagtatcccgaagcatcagacctgcatcgggcatgtatcggggcagccttgaaaattcattttcttgccaataaaatcacagtccctagatctaatcaattacaatatatctaaccctagatctaatctagaatgcacatatgaccctaaatatatcaataaacaacattttaaccctaatcaagaaaaatcaaaattaaaggaaaagtctaccttggctgtcattgtgcttggttaatggtactcagtgggtggtgggttcgggtccaacttctctcagtagtg

SEQ ID NO: 235390 - DNA, 800 bp, Cannabis indica
ataagactattactgctacatgtgagtttctcagttatacaacctagtttcagctgcaattagctactttaagttcgagcttgttttttttgtttctttgcaggttgtaagctagtgcacatggcaggaaaagattcacagaggagtgtaaagaatcggaagagttatgaaactgaattgattgtgtttctgattatgttggcaaaaagtcacagttaaggagttggcaccaactcagtcacaggaaagataaagattcaatcctagtggataggctagctagtcataggggttctgaattctagttctggtttcttatcactttcagccttctaggtggaatgttatgtcatctagtagtgtaggaacttgtgtcattgtcttatttaacaataataaataaactcaccactgttattccaccactaagtgcagcacgggcagcttccaatgccagttctgcactacaagaaaagaagtaactagacattgtctacaagtttacttgagaatttaacatattaatttatacaaaatgcgatgcaccaacagtaatttggccatcaccaattgactagtcaccaacagtaatatgaccatgaccaattgacagtagttgggagtcaagtgattggatggattagtggtccggtttcatgtactaacgtagataagtcaagaaacatgttcctaattgaaacaatatccagtaacaaagtatcgataggtcatatgtattggcgcgaaggcaagcaatgatagcagaggtctgaattcgcgtctgttgggttttatgccct

SEQ ID NO: 235391 - DNA, 1219 bp, Cannabis indica
aagtaagcaactttggttgagagaaggtgatcaaaattcgaagtatttccatgctatagcttcctctcgtcaaagaaacaactctattcaaaagctttaaaatgttaatgggttatgggaaacatgggaaggtggtcttccaaatttgattactagttatttgagcagttgtttacacctggtttagtggagtttcacgaggttgttgataatgtttcagttgttgtttcgcgagactagaatttgatgttacttgagccgatttctgatgaagaaataaagaaagcgttgttccaaatgcacccgaaaaatccttaggacccgattgtatgaccctgagttttttcaaaaaattatggccgattgttggtgatgatgttcggctgttggtgcgatctttttttgcctcaggtttgtttcctccttctttaaatgagactaatattgttcttattcctaagaagaagaatgcagagcttatgactgatcttcgccctatatcactttgtaatattctttataaagtaatttctaaagtgttggccaatagattgaaacttgtgttgcgtgatgttatctcagaatctcaaagtacttttttgccaggatggttgatatcggataatatcatggtctcatttgaaattatacattacttaaagaggaaaagaatggggaaggatggttatatggctcttaaacttgacatgagcaaggcgtatgataaagttgaatggccttttattgaagctgtgttgttgcaaatgggctttgatagaagggtgatttctctaatcatgttttgtgttagcacagtaaggtacaagattactcatggtgggcattctatggggcctattaatcctgaaagagagttgcgacaaggggatcctttgtctccttatctcttccttatttgtgcagaagggttctcctctctattaaaggcttttgaacggcatcatcgtatttttggtattcgagttgcaaaaggtgctcatgttgtctcgcatatgcttttcactgacgatagttatgtgtattgcaaggctaaagaggtggaggctgctagtattcttcatattctccaattgtatgaaatggcttcgggtcaacaagtgaatttctctaattcataaattttctttagtaagaatactctcgccgatactcggtcccgtttgtgtaacatgctgcaaatgtctgaagcttctaataa

SEQ ID NO: 235392 - DNA, 2129 bp, Cannabis indica
ataaaaaatgtgagattttcactatttcgattagaatgattgttagtgcatgaaaactactttttctctatacatgtgcaatagaaaagtaatgcacaacggtcttggcttcgttcccgtgaaatttcacgatttttggttatgtaaagggtaagattttaactggatactaacaagtgtaagagtaaggataaaacttgtaaaaatttaccgtgaaaagaagaatatttgcagttattgaattagggggccatttcaaccaattttaacgagaaaccaatatttatattcatgtcttagtagtacgaattcattgtgagtaatggcaaaaaaatattccgagatgggtccggaccacatttcacataggggtaccactatgagaaatatgagattttcactaattcgactaaaatgattgttagtgcatgaaaattactttttctcaacgttccaatagaaaagtgatacacaacagtcttggcttcgttcttgtgaaatttcacaatttttgcagatgtgtagggtgagattttaacagaacactaacgagtgcaagagtaagaaaaaacttgttaaaatttaccttgaaaagaagtatattttcaattattgaattaatttagcgatatttaatgatttcacgatgtttcgtgacatttagtgatgttttgcgacatcgtcaaaaactataataaaaaatgcagattacaagcgagttgagaacttcaacgatgggtggggattttgggggtttagggtggttgtgctcataaattttggagttttgggtttcacgatttctctttgtggttttgcgatatcctcctcgattttgtcgtacgtttcatcttcggtgtgggtttcgccggaggtggtgcggtggtcgtgggtttggtctgggtctggttctgtgttcgtggatatcagttaggtttggtgagagttagagagagagggagaaagggcctagagaaagagggaaggtatggggagattattttaggatttaattaattttagagtattaaatttctatgtattttaacgtggcatactaaaagactatggacaattttcaagtataaattgtcaaatttctcttttaatattcttaaattttatatttattttccttaaatttttataacattaaatattatttttaaaaaataaaaaattaatacgtgatttcttttaatttataaaattcaatgcatgtgtaacctaacaataatcttgtagtttttaaatatattaattctttttttttttttttttgtttattttggtaagagaaatgtattcactctgttaaataaggagatataaatttaattttaattgaggagagaaatttaattggattgtgatagggagacaaaatttggctctctcatgaacaatttgcatagccattaagatagttatttattaagtttttttttataacaagttgctctatcctatatataatataagtatatatttataaatatagattgtttattaggttaaatttgtttttttttataatatatataagtatatatttataaatatatattgtttattaggttaaattaaagaggtatagcatcaccccatatggcatattattttattgaccatgacttgttgaggtttctaaatggaaaaaggtcattttacttaattttacacaaattaaaaatgctagctgtacttaattaatgtccattatgctactaataattccactaatttaatccataaattccaaaaccaattttttttttgtttgcttgcattggccacgtcagcaaaatagatacgggatctccatataatatttattattattattaatggttttatttatttatcatataaaaaggaaatttataataattgtcttttgcatttattctcagcaaaaccaagagaaagagcatcgccacgtggcaaagagtaaaaaacaattagagataatgttatccttttaagaaaagtcatacaccactgatttatttatttatttataaacaaatcaatttcaaggctattatttacatattagttagttacagcactcaaaataaattttattatttgtgtttatatctgtcacatctttatatattaaaagt

SEQ ID NO: 235393 - DNA, 1405 bp, Cannabis indica
actaacaaatccgtatatcatttttttaatgaataaaaaattataagagaataaatatctataaaaatctccttgtttctaggccaaaatcccacattggaaaaattgttacttttggttgaggatgcgccaacttgaaatgaagtgacaagggatgccacctctcggtttggaattcatgatattggtgacaagtgctaaaaacatgtgttttgggttattagtgttcgcatatgatgccacatgggttgtggcaatatcctccaacacccctcgcttaactacactactcaattcccgagtaaagtgtaccagtctatcttatgagccaattttggacacgataacctcagaattgggctatgactgacacacttagatctgtcttcaaattatctttccaatgcaagttaaactggatcatttagataaaaattgagagagttatgcctattttattgaaggtaattatgctatcttgtgctaattgcgagcactgacatggccaaatggcagtgctcagccatgcatgttgttggacccctcagggtgtgttttgacttatttttttatggtgagtcatattttgggggtcttgggagcccaaaacctcttttcaatgtttgaaaccctaacatgagaccactaccaccggttggggctggagagtggcaatagtcggccatggcttataggaagccatggattttgtttcttgcttatttcattcatatggatattagaaaattactttggtcacattggttcttgaccaattttttaggagagcactgccacccttttgccaaaacaagtagcagtggttgcataagaggctcatgaagccttccgtaacttttctcacttgtgtttaatacattgatgttaaaaatacaacttggctaatgaaactcctccccttatgtagtggcggactactgccaccaattgtgccaaaattgtggcagtggtcggccaagtagtttccacaccactcggtggcttccttctctttgttttgacatattaattgtaaaaatgtaattttgacaaaaaatctcaatccccctcttcatggtcgaccactaccactcattgtgccacaaaaatggcagtggtccgctaggcatggttcttggtgagaaatggtttctttcacttgtgttgcactccttgtttcttggtgttgagagaacacatttggacgattttcccttgatgttttgtaagtagcgaccactgtcgttcccttgtggcactgctctccaaaaattggagagtattgccatttccatatggaagtgggcgcataggtcttattccataagagctttattcaaatttgactttatgcacaaatctaagtcatttcatgcctaaatgagtcaagttcttgttggtttcc

SEQ ID NO: 235394 - DNA, 788 bp, Cannabis indica
agttgtcatatatttcagttttggagctgtaaattatatattttaaaaaccactaaaaaggtaaataaactagcaaatatgcacaagtctaaaatatgtagattgatgtcaaataaaattatatatttgaaacaattctcccttaaaaaaataaaaataactaatactttcacaataaatttaatgcataccataataataaaaaaaaaatcaaaataactcaaaattactcagtaagtcataacatattatttacatacatgataaaattgatcaaatataagcttttaagacaaaaattctccatatgcagtagaaaatcttcctaggatatatcaattttttttttcaagaaaagtgtggtatcattaacaaactaaatcaatttttatagcaacgtaattaaaaattttggacaagcatatatccaaacatgaactcctacaaaactagtaatagactttactaaatatgaactataccatttgcatcacgcaaaatggctcgacacgaatcaccaccaacaccaactaaaaaactaaaagagaaataagcacatcaataatagacctaaaaacaatattacagctaggggacttaacccaattacaaacacatagcgaatcgtttcagccttaaacaatcgaaattccaaatttgatgcccatagcagccttattcgaaaagcaaggagctctgccaccaccaccggaaatcacccacgccgcccacaccaccagtgacgaaccagaatttttatttgtgggggcttatttatcattaaaaaa

SEQ ID NO: 235395 - DNA, 8608 bp, Cannabis indica
gttcatctacaaaagacaacatgagagatgagtgtttggtcgggatatcaaacagtaaacaggcaaatatgccgatcaggagtactcaacagacttgaagcgaaaacctcttttttgctctgagtttgcttaataaagaagttggtaaaagtgaacttgtgaatgatgtttagccctatttataggtaaaagaatgaaaaagggtaatcatttcaaatgccttagacgcatcggttcccccaaagcaaatattgggaatcaaatataatcaagtataaccgtcaaacgtggtgagagaaaaccaggtttcgaagcattaattgcgagagcattaattagctgaaaactgaagagacgcctggtcagactcacatcgaatcacgaacagatgcgcttgacacgtgtcacccatccaaatgcaaggacagctcagatgaagtctacacgcaacttcgaaagtcccgtacagacttgagggacaaatgttatcccaatttttgcactctgacgtggcatcacacgatggtgacatgtggaatcaactctatgtacctgctcgcaagaaatatgccgaacagggcaccacatatattcgctcggacgaagccttcttaaccgggcagtgaaaaatccgcgcaacatgccaacacttagcaaattcaactttagcatcatgagtcatcgaagaaatccctataactttgggatcagatcacagagatatggcaagctgtctgaatcccttgattggtgtattctgtatttaatatgcaatctttccacttatatcaattgtaatcagaagggaaattcttccctcccaagcttaaggccctataaacagtgattcatactcactgggcaaaaggtttaaaaaacttatctaaaaattcatattcatagatactattgtaaaagctctaagaaaatggaccattttccttattcttaagtcaatacaaactaagaggattaggctattaccgaactgcttgaggctgaacctctataaaaattcctatgtctttatttaatttattatattatatactcattatactacttgtcgcttacaaattagactcactgtcgttggctaaaagcgaggtcaacacttagcaaggagcttgagatgaaggatttagatgctactaaaaaaattcttgggatagaaatccaaagagatggacagaagagaaaactatttttatctcaggaagagtacctcaagaaggtattaaataggtttggaatgtcaaatgttaaacatattgtcactcccttatctcaatagttcaaattgagtaaaaaccaagcacctaaaagtcataatgaatagaagtacatggagagtataccatatgcaaatgcaattttttccttaatgtatgcaatggcatgtactcgacctgatatagcatatgcaatcagattggtgagtagatttatggcagatcctggaaaggctcattggcaaaccctaaagtggattctaaggtacattagagggtcacttgaaaggtgtctagtttatggtggagctgaaggaagagatagacatggtgaaattgaaggatttgtggattcagactatgaagactgcctagatacttgaaaattactcaaggctatgtgttcactgcttttgaaactagtatcagttggaaagctaacttttagaaggttgtagccttgtcaaaaattgaagcagagtacattgcactgacagaagctgcaaaagaagctttataattagaagagatagcttgaaagtttaaggtgcaagaggatgtcaccactatcaattgtgatagccagagtacaatccatctttctaaaaaccatgtctattatgaaaggacaaaatatgtaagacatcaagctgcactttgcttgagaaataatttcaaatggatcaacgatcgttaagaaggtttcaactgatcataatccttttgatatatcaccgaagtagtgccaaacagtaagtttttccactgcttgaacttgatccatctgcatggagattaagattgatctcactgctcaaaaagtattgccacactagactcgatactgaagtaatgtggacatttgttagttagttggtccaatcatcaagtcctattcctattggtccacgttggtccaagttggctaggttgttatcgatgtttctaattttgttttggtagttattaattttaaaccccgagctgattaagctttttcatgtaattttctctgtaaaactagtgattaaattctcttatttctttgtagaactgtaaaaagaaaaagagtgagaattgtattactctaagataaatttcatgaaatgagtttcatctgtgctctttgtctataatattcaattagttgttttctgatctcatcattggtttaagatcaccttgtgattaagtgatttgtggtgaatttttcaatcgattccacaccaaggttgtcaaattttcattttgttaagaaattaacttgtacaacaaataattaggagaaaaaaaaacatttggtattcccaatctaatttcccacgcccgcgcacgttaatacggaattaaaaaaaacaacaccaccaaactataaggaattaaaaaattaaaccaaaaagaatagctgaaaaatacggctgtccgtggcacttaaaacagcttcgtcttctttcgatctctgctcctaacgtaatctagagagagtgagtaagaagaagaagaagaagacgacgacgatggctcgagtgagctcaggccttcaatacccagaacgattctatgcggcagcctcatacgttggatttgacggatctcctcgctcttccgctaaggctgtccgctccaagttcaaaccagatactgctcttattctctacgctctgcatcaacaggttatatatatatatattgaatcaattaatgctttctctttgttttggttttaacaaaaaaataaaatgaaaaattaatcccaaaatccaattcatcatggctcttcaatctcaatgcctctacgtcaagaatgtcaatgccgcggttggattgatggatttccttaatttctttcattgttttgtggaatgttgcgatcgaattatgcatttccatttgtgatgagatttttcgttctggtaggcttgaagtgcttgatttgcattgatttggtgaatttctgtgtgtgattttggtttctttggtgtaattgagttagatctgggatcatgcaaacaagattggcatattctagatattgatctgtgattctctttggttgatgaggcaattagtgggagaaaggaatagttttgggtagtgttatatacaatgcgcataagtaggatgtatgtatttgcatataaatattatatttatgtatatcttcatggttgtgtcatgtgttactaaagaccttctcttccgagtatttaaaagtgcacaatttagcatgttggcgatcttaagagttaatggagttattgatttgatacaagagcttgtgtacaaatgtaatgttgatagcgggttttaacaatttgcaggccaccgtaggaccctgcaatgttccagaacctagtgcttggaacgctattgagaaaagcaaatggagcaggttcgtgctctttaccattttctttctctcgctcattattaaatcccaagatccctatacggattaaacatgctaatattttgctcttaatatctggatatgtatcctttaaagtcgcattttctgtctagtttttaggtgagtgtgtgggctttacttttaaatggccatgcaaaggagatgtataaaatttgtaaaagcttgatgggcatgtaggaaagttaagattatgtgaggaaacacttaatttactcggtagaaatgaagcatgggagcttgaattgatatataagaattatgtattaaatgctttgatggggaaataatttgtaacggcagcttgtgcccataattggtttgtagtttcttgaaatttgaagaatttgtgtattataggaataaaggaaaagacatatatggtatttacattgttgcttaggttgttgaccaacattgattaaaaataggtatatggagatatggtattggttttctagaacttgaatctggattaatgttgcattgtctgacagtgagctaagtttatatcttacatgtaatcaaatggtgatcattaggtactgctttattgtgttctttggtaaagacagttttatttgcattgtgcagctggaaacagcttggagaaatggtacctgctgaagccatgcgtctttttgtgaaattattggaggtctatacaaatatcatttcttagctgcacgtttttatgttacatgtattgatacattgctaacatctttcacttctattttttggtaggaagaagatcctagttggtattcaagagcatcaaattttgttgcagaacctgtagttgatgtacaaatgaatgtaagtgtttcatcattatacattgctgtttaaataattcaccatttccttttttctggggacaaatatgatataagcttcacaaaatgatgtctgttttctaacatttgaggatttttgtttagtgttattttttgaggttagcttgtttattcaaacaaaagtatactcactgatgttttggcaactgtcttttatttttataagaggcctttggacatctgcctacaattcagttttgaggtttgtttggtgtttaaatatttattttttagtatgatgtggtttgtagcataatttaaaagctgagccagtggttgagaatgggacttcttatcctgagacgaagacaattgccactgaaaatgggaattcagctgaaactcaggacaaggatgttgtttcagaaggtcttggttcagttgctgtctatgatcagtggatctcacctcctatttctggtcaaagaccaaaagcccgttatgaggtattggcatttactgtctttacatttaaccattttaatccttgtgtactttttgtatgaatggttttatttttcagcacggagcagcagttgtacaagacaagatgtacatatatggtggaaaccacaatggtcgttatcttaatgatctacatgtaagtaagatacagttcctgcatgcattaacacgttctaatttttattatggtcttaaatattggtgagttttgtgtgtatattgtaggctaagtgtgtagctgacaaggtctctgtttatttttggagcaacttctgaaacactctctgtcttattctatacttgttgctcacctttcttgaactagggtagaaagctaagatcttggggtgctcagatgctgggtgtttgtactaattaaagtaaattgtttctcttttccttagagaaaagaagctacttcagtgggtctttagatatatagttgcatgtataattattattttaatttttgagagaggatcttgtactcttttagtcactgatttttttaattcatgaaagctgacaatttaggtgcattttttaacttttgttttcactttgctatgtatatcttttatatgttttacttgaaaatatgacaggttctggattttaggagttggggctggtcaaggattgaggtcaaggctgggaatgatttgccatctccagcaacagtagccccatgtgcgggccattccttggttagtataaatcatcttattagcatttcttacacttctgtgagcatggctctgtagttgtctagctgatatgatttctatccatctttttctccttttgttactaaaatcctgaaactaagccaactttcaattctgcttttacttatgccaccattccaaatattctaattcatacttttgaattgtttcttggttttatagataccttgggagaataagctcctgtcagttgctggacatacaaaggatccatctgaaactattcagggttggaactactttcattcttaagtactttgctattacttaacagtctctgtgctttggtgatttcttgtcctatggatatgatggatacattagtttttagaatcaatttatcaatcatagtgtacaagaattaatgtagtcattaggcaaacttttgcgttcacaatgaagttctaacttcataatataactcctagacctagtctatctttttatgcaatttttcttaggattgtaacttttgctcttctcagtaacgactttgatgtaatgtttctcacttttctttgctttcatactagtgactcgctctttcctccctctatttccttttctatttacttttatctaatgcattattatttctttgcccttgcttttttatgacagtgatagcatttgatctacagacaagcagttggtcacctttgaaaacttatgggaaacccccggtatgaatttattttcttgagaacttatatctttgtggagaagtgcacataagacatatatactcttgggtcaacttgagttggactctaatactgcctcttagaacttattcgtctgttagcttaataactaaatgtggagatattttactggctgtaagctggcatgataattttgaaaacaacctaaaaaagtatgttttggactctctaaatcatgaaattatcccgttaatgctttgcaggtatcacgaggaggtcagtcagtcaccatggtgggaacgagcttggtcatttttggaggacaagatgcaaaaagaactctactaaatgatctgcatattctcgacttagaatcaatgacctgggatgaaattgatgccgtgtaagataatttttcactttttttttggtgggggattcgattttggggtctcctctttgtgaggagaggtgtagtagcactaggttatgcctatgaccacaatgatgtatacagtatttatatatttttttggtgtgtgtgtagtagagtggctactggctattgcaatgttgtgtttgttctttccttgtgaattggtatataacaacaggacaatccatccattaaagcagtcatgcttattccttcaacaatattttgtaattgaattctatctccgacatcttttagtatatgtagttatattttttatttgacctattctttgatgagatactgagctgaacttaccacagccaatatattaagaaaagaagacataagataataatgagcccttcaaagaaaattcaatcaaatatgaagcctgccactccttttccttatagtacactgtatacaattgcttcaagttattcccttcttccacattcagtagttcatcagtttttgggattaatatatgtcaactaatttgcaggggtgttcctccttctccaaggtctgaccatgctgctgcagttcatgctgaacgctatctccttatctttggtggaggttcccatgcaacttgcttcaatgatctgcatgtcctcgatttgcaatcagtaagatgatcgatctaatatacttttctgtttatttacataaatatatattttgttaatttcttctctggtgaaactattaatgttgtcttttatacatttggaatgtacagatggaatggtcaaggcccacacaacaaggtgacataccaactccaagggctggacatgcaggtataacagttggggagaactggttcggaggtggtgacaataaaagtggtatgttatagaaaacttttgctctagacgtataatgaaatagttattcttctatgtggatcatttgatttaaacttcctagttcttggttattaccttctgggagagaagtcaacacttgccaggatgtctctaatagtcaaaatggaacatgccatgactgctcactttagaacaaaatttgttatgctagaactgcaatattggggaagaagatttgtcaatgcctataaacttctgttagatttaatgagcgtagctttgtaagaagttaaacatatattctgatatttctattttggaggctagttattcaattcttatctttaagggtgcgtttgaaaaggtactataaaattataattgagtgtaattcagattaattacgaggtttgatgtatttgtttaggcagataattacatagtaatcatggaattggatgtaattgaggaaaatcaactctccccatgcctcccatgagaattgggggtgtaattacacactatttaattacaaaatattaccattcttagataatttatattatttttctatgtaattgcaaacacatttgccgaagattaaaattagaattcatatgtaattactacatgacattcaaatacatcttgtgttttaaaatatagtataattactaattaccattctagtaattacacagttacttccaaacacactctaaaacgggttgttttcagaaaaaccatcatgatttttaaccaagaaatgtgtaattttctagaacctgtcaacttcttatagatattaagtaattcactgcagatgcaaatttcaagcatactatatgtatttgcaattgttctcagtaatctgtgtagaaatatatatttcgggggaggggtcggtcttagacaatggcctctttctcttttt

SEQ ID NO: 235396 - DNA, 1196 bp, Cannabis indica
attttaaatataactaattttatgagtttgtataagaaattaaagtattaggctacaagttatttattatttatttttcttttactttctaaattaatcataagaaactgccccaactagtaagctagatttccaaaacgctgaatcattttctgggaatttgtgtagagaaacggttcaccatttttgtgtagaataagcataaaacatcaacccaagctcaactctaacccaaatcaaaccaaaactttcagaacacctaattaagacaaatagaacatattccaaccagataatataacatcaaaccttagaactaaaagatgtcattgttgagcaagctttgagttccaaaattccaacttgctaaactaactacattaccagcaaatccttatcaaaatagccatctaaataattctaatttaacccagaaaacaatcccaaaacccctcaagttcatatagaacctagtttaaaaatttgcatgcacaaccaactattttctactaaaatcacacaaagagaagaagctaggtttacctttgatttttccttgaaaaaaccttaaaaaaactttactgaaataggctttgaatccaatgaaagaggtctgaaatagtgattattcttttgagttcaaaaccaaaagagagacataaaaaatgagggttgtatttatttattttatttttggtataatcctaatgttagcctaatctcctttttcgttttatctaaccttatcttcagcccataaaagattaatggataactaaaaatttcactaatttaacttagaaattaacataggaaaaggaccaaaatgtcatttttctcccctcttaagaaacataaagtaaaatggccaaaaactattaccccgtacaaacctgacattctaaatgcccaactattttctcccgctaaatctaagacactccatcctatatctatataactcaaaatggccaaatcgttgcattccactattaccaggcataaagcataaaattgacatatagcatatataatactcctgaaattcaaatatatctctataatagagaaaatattttcctaaggcctacttctaataataagtcctaatttatactaaaaaccttattaccataaaatattaattaaatcctctaagtatctgcaaatttcaatgatttaactatgcagtcatt

SEQ ID NO: 235397 - DNA, 833 bp, Cannabis indica
tgtatatccctgtctcgcttaatactatacagtcagcgagttacaaatatactctataaattccatattcaatgacttattctatttttaatttaatgacataattatcattatatttgttggttcatattttacgagattaacacgcgtcactttctgaagtatagttgaatttggggtataacaattgccccttaaaaagtccttttcactggaaaatgctttttaaatgattactgagggtatatccatcctaatccattttgaaaaaatgcatgctttttaatttgggagtttatattttcaaagcacatcattaacattaatgagccatcttttccacttctccttcgatttctatctgttggatcttttgtcttttaatataacggagatcaaacccaaggtattaaactgaaaaaaggaacaacctttcctctattttttccatttcaaaatttcttgagctttttctgcgaaacaatcccttgtgattttcaagagctttgcaagccctcactgtcactgacatacttcttgcacgtatacttagatatgctgttcgacctcagaaatttaaaaagtttttcacgccattcactctgccttcgattttagagcttttcatcgtacaacaacttgacttcaaacggtaagtgacccacccccattcttctgttctttttcattttttttgggttacgatcacttattttattatctgcattttcgccactccatttggttttagtaattttggtttaaattttttgggtaatttttagggtttaggtagagtacaaattttaggtttatcatatttttaagcctct

SEQ ID NO: 235398 - DNA, 694 bp, Cannabis indica
tttttaaaagataatatttttttagtagaagctaataaaatgagaaaattagacttataccctttttatattgttatttttatttttaccctctcttttatagtctttcatttctacttcttctttcaaaaaatctaccaggtttgcccttgtcatgattctcctctcctttagaatttgctgaaacatatctccactgctcaaaaaatactactcccatagaactcttcaaagtttagtttctaaataatatactgataatattattaaaagagttgagttgaccattgaaccagattaaagcaacaacaaattaaatatatatataaatatttatatatatatatttatataagtttagctaaccttattagctattggttctaccacaccagttacagaagagtaataattgtaattactttcatcagctgcaaattcctaagttatctcgtctcgtctcgaagcttccaacaaatatattttctctaatttacacaagataagagaagttcatcaacaaggtacccacttcaagcaaaggtctcaaccattatttacactttttgtgctatgtaggaaaacaataataggcctaagaatgaaacgagtacagagaaactctatgaatgaagattgatgaaaagataaaagtcaaaaacctgaagaagaagaagaattagtacagtgagtc

SEQ ID NO: 235399 - DNA, 644 bp, Cannabis indica
tagggtgttaatcaacatacttttgagtagatctaagatctatgtggtccctaattttttcatcatctatctttaatttggactcgggttttgatattctgtgcttaaacgggatggcaagttcactggggcactctgtttctaaaatttatggacgataaacttctgaacctgattgggatattgttacaaaaagaaagcaaccccgattcctatatgaaatttatcaaaccagaaggttgtaaatttgagaaacccaaaagtctacgctctgcctaaaccctaacatttacctagaaaaaaatcaacccaaaattgctaaaaccaaataagatgacaaaggtgcaaatagtaaaagtagcgatcaaacccagaaatgtaaaataatagagcaaataagaaaatagagaaaaatgaataacttactgtttgaagtcgagttttggcacgatgaacaattctgtaattgacaatgcagcgaacgacgtgatgatctctctgggtgcttgaggtcgaaaagcaaattcgatgaaactcacaacaagtatgtcaaagacaaagatggcatgcaaaacttcaaaaaatctgggtggagtttttttgtagagaagctcaagaaaatttttgaaatggcaaagataatg

SEQ ID NO: 235400 - DNA, 2642 bp, Cannabis indica
caatcacaacaccgtgaattctaggcttgaagtttcggcttgtcacaatttctctatttaatatcatgatatttttatcttttcccatcttttctctgatattttctaatcttcttctatttaaatctgcaaaataaaagataacaagcgtaaaatgctccaacacgattaaactcaattaaaatatactaaattaatctaaaattaatactaaaaataacttaacaatgaataaatctggtcaactcactcgtatgtatagacaagataaaagttagaagtaactaagtaaaatagagagaacacacaataatttatagtacgttgttcactacctgtgtcgcgatagtaatagagctacgtctacttcgactttttaatctcacgagaatgattacaagaaaaatagctaagtctaaaaggtctaattctagagagagataatctgaccttatgggtacttctatgaatgttaaaaacaaactagaagagcgctccttttatagggaaggaggttcgattgaaataataataaaatatgaaaaatacatttaagctatttttgactgttgatgatgatgtaacggtgaaattgactctggaggtcagtcttcaacttttggagcttgacttgcgttcgcaagaccttttttgggtaagttgtaccttaaattcataactcttttgaggatgaaatttggacttgataacttaagaactgtgattggagttgcaaacataactttgtagagcattgaaatagcttaaagtatcaagttgaatcgcatcaattgaatcaatattgagtgatttacggtcgttttatggaaggttgctctgctaccagtgcccaagttaacatctggtgctcaggttgacatatgatgtcaacctggatgctgagccaagggaaaacgtgttgatgatgtatttttatggcctaagtcatattttgacatcacttggctagtttttgtattatcgtgaagtcgttcaccaattctcaaagatatttctattttgtagaatcgacagactctaaattgcccgattcgcgatttagtcattgtcaaaaaagtaaaaatataaaattttgaatttgacttgtctgagttcatagctctcatttaacatgaagaactacagaaacgtttgagatggaattaaaattggataagcagaaccgaccgcaccaggtcatatgtcaactggggcgttgaatgtctttctggagcttttgggatgtcattttgatacttctaaggttcttaaaatcaaggatgaggtctcctacctcgtttttgactatgctggaaagaatgcttggagaaggatttacatttgagtgatggaaaccagcgcaccagattgatcttcaacctgtatgctgggtccagcaccaggacaacctgggtgctagacttagcttttaggccctcgagattctctttttctccccaagtttacttgtatctttgttatttttgacaaaggaaaaaaatgcctaaaaccctttttaggaaagtgattggaaacaacccaggttgacaaaatatcaacctaggtgctcgtcccaacaccaagtttaaacctaggcactcggaccagtttttggccaccagacgactccatttgattctcaaaaacacttgtatcttaatctttgatgaaaaagaagaattttctcaaaaaaattccaaaaaaaaaatctttggaaatggccaaggttgacaaaatgtcaacctgcgcgctgggtcccccttctcacctccaaattgatctattttttctctaaaagcacttgtttccttatttttgatgaagacgaagaaaattctttggataattcttcggtttggtgcttggaagtgccccaagttgaaaaaatgtcaaccttgggtgttgggtgcttggggcacccggtgctttggttgctaaaaaaaagtactctgaatttaattgtaatgcctcaaatatgttcatgacatgtctaattcagtctctgtacaaagtttgacccatttgcactaagatgttcttgaaaacccaaaccctagtttggttgtcaacctaggcgttagatgaaaccttaggctcccaggttgacttctgcaatgttgttttgtgtattttcaactcctaatccttggacttggacgcttcatgtcttttatgtgttggaattttatgcgctaaataaaactcatctcatggtaatcttattgactattaaagaatgatatagaagtcaaactttatattatttggttcacatgcttatttcgtgattataggtttaatgtataatctttatttaaatctagaacatatggataatcatgattattgcgttgtctacacattggataataatcatgatcataagcttcaaacttttagtctcacaatttactagtgcacatgatttacactgacgtgataatcatcaatattgtttactcacttttggataagtggaattcttttccaaggtattagtggagtaagctaagatggaatgtattggctatacatcacactagaccgatatttacagcggaagaaatatcataaacttactctaatatcttatctaggtaaatctctaataattgatcatagatcaatgttcttaatcttga

SEQ ID NO: 235401 - DNA, 864 bp, Cannabis indica
tgtttaaaaatttggtaactaatacgatattttataaaagtaaacttgttaaaaatgtcataattgtgtatataaacttacgatacacattgttattaataataaagagtaagtttatctcaatttattcatactcatatagtaattatccttaacgtgatgaaataatttataataaaccataacaacatatgacttttaacatttactcttggcgaagagaattattagttaaagtttcaatatagttaaaatttcaacctataaattttcaatgaatacaaaccctgaggtacgacttctcaagaggcaataatattgagtgataattatggacaacaatagagccaagcttaagtttcaactgctccatgatataaacgtttcgcattaactttgcatcagttttgttaagcttcatgacaaagaaaataaaacttataactgcatgttctcaactaatgaaagcacatcaaaaatgaaaaacaacgacctctacttgtatttcttctttgtgtcttcgggttgaaacttctatacaactctccactcggagcaaatagtcttcaccagattccaaatcacataactgagatgtcaaaccagaatatgtttcctcgtagccaaattcattgacattcagagcttctacttcttttataatgtttaatatagcatctaattcaaatcgaaagggagatatccaacttaagaacattaacagcacactctacatcctcaaggatcgaatttgtacctctgcattgttcattcaattctataatagaagtagttggtctcttccttacagtatgtaaagcccgcttagttattttggaaattagcagttgtttatgattaatt

SEQ ID NO: 235402 - DNA, 807 bp, Cannabis indica
tatatgatttgacgtggcacccttctaccgcttccatgcagaatccattcaggaatagggataatctttaccccaagctctcgagacttatatcaagagcttgcagtcttcccccaaaggttcatcccgagtttctcgtgcttggtgatatcacgaaggactcgctgaagcacaatgcttgattagtggagtcgtgggacccacgctctacattttaggcgcatttcttgagaaaacgaatgatggctggttttaaaaagacgcctgtcctcaggtgccttggggaagctaccacaaaatgatgaataataaatattttattctcattttttatatgtattaaatgccaaccttttgtatccccaaccattggatgatctttccttcagtctatttaatttggaccatatattttaaaatcattccaatcgttggaatcgatataaatgtggtttttgacaactggagtcatttcttttacttcatcaataatcttctaactagagagaaatcctcttttcatacaaacttattgctcaaaaaatctcaaccttctcatatctcttcattctaatcttgacctctttctccccaactttgtcattgcgttcccttgacatataatatcatctcaagctgtcctgtaatcgaagctaggagagccattgtcgtcgtgcaagcagcgtgattatagcacatcaccaccatccccattcttacctcacaatacaaataagtactcctcaacttttagactgttttttcaatgctcagtcaaaatgtgattctcatttttgaaggaatttg

SEQ ID NO: 235403 - DNA, 1545 bp, Cannabis indica
caatattactactctagttcactcatttttgtcacataaaataagtgaaactaaaatagcaacaagagaaaaataactaagcaacaaagtgtattttctctactctaaaatctgatgcccctttattctatgtggttcctatttatagagccaaaattatccccataagtggtattttcgtgtaccatttagtggagtaaatgacacaaaaagctgatgaaaatgtgagacatggaccactttctttttgcattaatttgattgagaggggctgatgagaggtcaggtggtacaaaggtgggacacgtggtggcttctgggcatttctcggctgccgaaagaaatgcattaggagaaatggataatggcccacgttcctattttgaatcaattctttgggcttggataatgttctttgagaccttatcaatgtatgaatgaaggctatgccttttgttttgaatgagcccataaccgtaagtccctgtagaagtccacaaagtgattaatcaatgtatataaaaactatgtatattatgcagatatagactccatttttatttatatcaatttactctatgacaagtaacataaaaattagaataaataaaattttccatcaattaccattaaaattataaaatatttaatttatattaatttaatatgcgtaattaataactaaaaatatacaaatttgagccttaatcacatacactgattccttagttgtgtatcctaacagaatacttaaccctgtagctttttcccgtgacacattcttcacaaaacttcagttttccatccagtttctctttcaagggaccttgtttatttaattcaatcatacctctctcactaacattacctaagttcatgtgccaaagcttggtgttgttaacacctactctcactgctgtagtgcgcacacttcatttagtagcaacaactgccttgctaatatttgtcttccctatagtacatagataccattcttgagttcacccaatataaccaccatagatcctttaagatccttgagtgaactttctattttgatagggcaacctttagaggtcaattacccaactgagaacatatttctcttaagtacatggagatatctcacatcaattacagttcttggaataccattatacattttgataacaacttaccctatgccttcaaccctacaagctttgttatcaccaagtagaacaaaaccatcagttaaagctttaaattcacaaaagaattccctgtgattcatttggaaggaacaaccagggtcaatgtaatgcactaatctatagggacgtcacgtgtgtgtaattattataaactagtttaatactaatagattaattaattattgaaaaccgtgataatattaaaaatttgactaaaataaaacactaaaaacgaacattataacagcataaaaagcgtatttcggggatccctgttatagaaagttttacaaaagaactatatacgatgatgcctcaaaaagataaaaccaaaatacacagtagatacagc

SEQ ID NO: 235404 - DNA, 960 bp, Cannabis indica
gggcataaaacccaacagggggctgcttggagttcggactgggcttccttatactcgatctttgctttatcataggagcctccaatataaccaatagaagttttgttgaaagccttcaacttgtgcttgagtctcatagttttaaagaacactcctcacaaaccaagacttctaataggcctactccaactatccataatcacttgtttgtaatctttatgatcaatccaaaaattatagaatttaaaaggcttaaatcatataatttctgtgtcgatcaaacggatgacacacaaacaatgatcagaacatgtttcctaagtaaaatttgcaatagtattaggaaaatcatccacccaagcctcattatgaaacacatggtctattcgagaaaaaatccgagactccggtttatttgaccaagtgaaattagaacctgttctcttgagaggactaacttcagcctgcatcaaccagttattagaatccacaagctcagcagaagaaatcggattacctcccattctatcttcatgatggaaaactgcattaaaatcacctagaatgatcctttctttagaaacactaatcccagagagatatctccacaattccaatcttccatctatagaattggctccataaatgaaagtagcataaaaatccttttgttgaccaatcatcttaatccgacaatgaacatgctgattagattccttctccacttccacattaacaaatcctctcctccaaattaataagattcttccttcgatctcattgctagtataataactccaattaacaaatctcttttgcatcatctcaaccaatctatcaccctttattttagtctccacaagagctccaactccaacattatttaatctcaaaatatccaaaaccgattcatgtttctcttttttatttaaacccctaacattccaacttctaatattg

SEQ ID NO: 235405 - DNA, 1535 bp, Cannabis indica
ctgcgagggaaattgaccgccttcttttcagacttttgccagcgcattggcaccaacaaaagtatataatattaaaaaaataaataaatactttttgccggcgcatgtaagctcgctggcaaaaaatggctcgaaccgccaaaaattcccaccttttggcgattgggggccaacttttgccggcgcaatttgtgtacttcgccgacaatatttgctattgccggcgatattaggccccagtaaaaggtggaggtgaaaaaattttgttgattatctttgccggagcatttgttgacttgcgccggcattggttgacatttttcagcgcaatttctcaatagcgccgacaaaagtggacattcttgtagtgagtttcaggttcttctctgcatcgtggacagtaaagtacctggactttccgggagataagttgtggttctaatggtaacgcaaaatagaacatactccaaacaaaaacttttacctttggtggcatagtaagatttcaaattccattccaccaacgaattagcctggatgaatcggcaactccctcctcaacctcgagcgaccacgccaatgagtagccactcttaacattataaactctgtcttgatcatagtgccatcaccatccatcctctacctctcgcctcactaatggaacagacacatatgtcgacattcattggcaaaagaacctattgaagtttcactatatcccaaacaccagaaataaggataaattcactcactcaacaattatcatgctttaaaataattttaaaacatgttttgattaaaatttgcacaaaaaataatgtttatatgtatgtaagatgaaattccatccttcgatttagaattttcaccttaagcatttattctttactaatttgacggattaactttcactatttaacaaatttcaacacaatatctaaacgagttttcacatgcaaaaaaagttacggagagtttttgacagagtttttgttatgtaagatgaaattacatccattctatgtgggagaagagctcatatttataatattggattacaattaattatcattaatgcaaatattaaggtttcagctataaatatttagatcatagtgtcgataaattaccaagtcttcaaggtttcaagtgctatctgtacagatcttgattgacaaaatctctcgtctcgaccggtaattcttagtcacgttatttcatatcatggatttttcattatgtctatacttgtctgaccaggttagtgatcttctaactgattggtcactcgacaaatggaatttcattcttaatataatttagtatgtttactctaactaagtcgagcagtagggacgttctcttctatgtcgcgcattataaaatatatttcaaatcattcgagataactaaaatcacaataatatctttatatattaaaagtgcctatctaacggtggtttaacagaatatacttttaaaaataaaagaatattctgttaaatttaacgataggtttgatctcccgttaa

SEQ ID NO: 235406 - DNA, 1112 bp, Cannabis indica
gcttggtcgggcgctcacactaagcagggtgttatgctgcccttgcttccgtacttcaggagaattgtggattactaccatctctgcccgacccagttcactttgaagggcctcaaatattaatctgccatgttcattctttatgcctcacatgtatgggacgagccatccccgcatgacactaactggccttttgatctaaaatcaactgcctcttatgccaagttaattttctaaatatttggatgaatttagatcaactcaaattgatattgataccatactttgcatttatagaacataaaaaatataaaggtaatataataatacaatcacaaccttacacgtgatttttaatcattataaataaagaaaatcttctcaaaatcagagctaacaatattagtgggaaaactgtgattgttgcctctggattgcttcattccaataaacttggggacacctcataacaatagggaccatgctacacctcatcctataacatttggttcgtcaaaatctcgtaaaatttaacatggaaatattaaaacttgaaatagtcttataaaggtctaagagaaatagaaagcaaaccttaaaaccaatcctataattttacattgattctaaacctcactgcagaaaatgaagagaaatccaaccaattttgaagcgctagatggaaagataaaaagacttgtatttttccaaaatggaagaaattagtgtgtgattagttattaaccaaaatagaattaactttgctctattctataaggaaaaacctccctcttcaacaaacatttcctaaaacccaaaagatacagagaatctaccaaagcaaacatgttgaagaatcgaaagatgactcattttaatcatggggaatttttaccatagtaatcaagttataacttgattttaatcattttcccaagaggcttgcttcgatgtgacgagatttaaatttgtaacccatccttattatatttgcattgatggattacaaattcgcatctatcattacggatggtttaacaaatagcactcctttttaaaaaaattgaaaaaaaaatagcattccacatgtgctcccaggattgtgagaaaaa

SEQ ID NO: 235407 - DNA, 736 bp, Cannabis indica
tgttaatttacttgttacctttttgaaactatagaaaaaaactaagttttatttttgacattaaaatctttagatttgctaaattatttaggtattattagtgattttcaatatcattacgaggtgaaattttggaaatggttagtgaagttttataataatcattcaattaaaatgtatgtgatttgatatttaactattttattatgggttgttaggatttcgtctatcaaattttaatatgtatatagtatatatcaaattatattactaaattttttaggttgttaaaattttttttctaactttgacatgtaccatatcatgttttcaaacttttcatttcatcaaaaattcctttcaaatattgagattgttagattcaaagaaatctatccaattttgttcaattttattaatatgtcgattgttcatgtactaaattgtacctccaaaatttaatgtctatcaaatcgtacccctaaactttcaacttttatacaaaaactttcaatccaaatatcttaagagtacaattcaagatggtgcaacaaaatttttgtgttgtacaatatttttctaaaattatgcatttcgtataaaattccgtacactatttagattatttcgagtcacaaagtcacaaaattgatcagtaattattatagcatttcaattaatcttgaatgactccaaatggccgcttcaattgtgaggaaagttttttccttagcta

SEQ ID NO: 235408 - DNA, 889 bp, Cannabis indica
ttcatggatatcctccaggatatcacaagaatgacaaaggaaaggaaggttctgcatctgccaatcaagtccaaaccagcaacgattcgaataccaatcatgaaggacaagtcttattgcctcaactcaatgctgcacagtatcagcagctgctgaatttgctggctgttcaacaaacgaatgtggtaaattcagaaacaacaaacaattcaggtagtgcaggtatcattctttcaagcatatctgattttccctttgttgattcttggatcctggactctggtgccactaggcacatatgctataacaagaatttttttcaatgtatatgtaactcacaccctaccagattattgcttcctaacaatgaaagcattgttgttaatcaaagtggtactattgctatttctaatgaattaagcttgcacaatgtgctttatgtcccctcattcagatataacatcatctcagtaagttgcctaactcatgacagcaacctacatgttcatttttccactgatgactttgtgatacaggacaaaaccaacaagaggaggattggcagaggtgattccaagaatggtctctatgtcttggactgcaatcctcatggcaacccgattcttagtgtttctgctcatacttggcattcaaggcttggacatccctccaacaagcacttgaaacttttggatggaaaacttaattgtaatacttccaatttacataaagacaatccttgttatgtttgccctatggcaaaactaaggaaacttcccttcaaaaataaacctacttttgctgataaaatctttgatttgattcattgtgatgtatggggtccttaccatgtaccatctcactcgggttttaagttttttcttaccat

SEQ ID NO: 235409 - DNA, 1243 bp, Cannabis indica
caccccattaatttcagaagtggcccacttgctgaaacagtagaagccattgtgaagacctacactatttatgtcaaaaaagtaactaaactcctccattgaaggctccctatgcacatactccatatacatcgcataaaaacctaaagctatgcgataactatttggggttagttgaaaaggatatacatcataccgctgaagaataacggagatgaatggatggaaagggatcgatactccacattgaagaatgggtattgagactatcacttcctctgtaggtatgatcgccgggttagtaaaagaaaggtgcgctctctgggtagggcgaggacgcaaggaggcaagtcgtagtagatttaatttcgtaaaagttgtaagatccgatttggtgactcgcgagaccaagtcctcgcatgagaaaggctcatccaattgagtgttatccactgaatcggtcccacttccctctgcatcctcttcctcatctgactcgcgatttggggccatccagtctttgtccatctcctcgacctcgacatcaggagcatgcctggaatgaacgaggtgttcacgacctgacaccgtagactcgctgtctcgaatctcgatagtccctggttcagcaagttcctataccatcctctcgatgtctgcagaagaaaacagacccagctctgtgtctccggcagtagggatctcctcttttgagatcgaagtcgggatgaagctatcctcctgatggtcctgatcgacatcgaatgcatcgcctcctgagccaagcatttggctgtccgacagatcgctcatctgaaacatagaagctcttttcagcgtggtgaatgtgaaaaaacaaaataatgacctcacccgcatataaaatttaaaatcttcttagaaggctgattcggattcttgcgaaaaccaatcagcccaccaaggcacgaaatcgcaggtgtgcgaatagaaggatatctcaaaaaacggttgggggtttcccagtgacccgacgggtatgcgtttttgagcatgaccctgaagtgactcggagacacccaccgtttcgaggaacctaaccaatcacaacctgggaatttgtcacgcatatccgactagcgatgtacctcaaaaaacggctgggtgtatcccagtgacccaaggggatacattttcgagtatgaccctaaagttactgggaaacacccaccatttagaggaaatctactagtcgaagaatacg

SEQ ID NO: 235410 - DNA, 710 bp, Cannabis indica
ataactatttttccttacctcaattccattgtaattaactcttacaatatcttctaggccctatcaacaattagcgaactcgtagaccaccgataaactcaatatatttataattgttaatataaagcaagtttaacacaaaatttaactcataaaatgtttgaattagaaatcctactgctcacaaagctttagataatcgaaagacctttctaacggtataaagatcatcaaaatcgtagttataacccaggagttatggatattttattaaaacagtttctttaaaatcctggatcatgctgatttttggatacagtcccaaaataataattttaaaaatagttacatcatgatcgaaacaacacttcataaaaatgtagctcttttcttaagcttaaaatgagataaagatcttttaaaatgaattaaaattgagagagattgagtttttactaaggacactttcactgaaacaaaacttaaaacgagatatcctaaccgagtaaagatatggatttctgacaagtaagaaccccgaattaggggaaggtttcctcaaataaaatatggctaatcaaattatctttctaacggttttagaatcgctggaaaagaatagatttcgagagagatgtcgcacttttactgaggcaatattggaaggaaatctaaaaaaactgtaactcgacagccagcatgaaaacatg

SEQ ID NO: 235411 - DNA, 1012 bp, Cannabis indica
attataaatcacctggacgcttgttcttttcacgaaatgttatcttcaatgaagacgaattttctttcaaatttgggttttcaaacactcataaaccagagtcatctatttccctttaattttgatcttggtcagcatcattttatccaaaatcatctaacatgattcattcttcaaatgtagcaggttctcatatttctaatgaccatcaggtaaaaaaccgcagttacatcatctaacttgtcaccacctcctagacataccacaaattaggtaaacaattcaattgaacatgctgttaattttgatttgactaatgagcctgcttctcctagtattttagtaggcaaatcatatcaaaatgaagcacctcatgacacaaaattatcatcaacttgctctccaaatgtagatgaaaatgcaacctgtatatataggccatcctatgatcactcagtcaaaggctagaattctcaagccaaagacttatctaagtcaatccagcttggaaaaaattagtcgtgaacctcactctgttgctaatgccctaaatcatgctaggtggaatgcaggaatgaatgaagagtttcatggtcttatcaagaacaaaacatggttcttggttccacgaagtccacacatgaagatagtgggaaacaagtggatgtataagtagaaaagaaactcaggtggctcttttcagtgatttaaagtgcgtcttgtagcaaaggaatttaacaaaaggttaggtgttgattttggagagacattcaatcctgtaattaaagcctctacagtccaacttttcgtcactataatagtgtctcgaggatgggatgtgagacaattagacataaataacgcattcttaaatggtcatttggtcactataaacaaccacaaggattttttgatgaaccaaaacctaattttgtgtgcaagcttactaatttactttacggcttacgacaagcaccaatggcgtggttgttgggaatattttactaggatc

SEQ ID NO: 235412 - DNA, 1336 bp, Cannabis indica
aaataacccatgcaagcaaaaaatacgtagaggatatataaagaaggatcacgtaaaagaaaagggattaggaactgaaaaaaagaagaacccttaaaaagaaatcttgactgttttccggccaaaacagtttggcgccgtctgtgggaaacttcttttttccagaaaaagaaccttttcataagataatcgataaaagatatggcaaatgaaaaggaagatctcattctcaaaaacaacccagacaaccaccctggagcaccgcagaacactgttagcacaggggaagacgccatggacccaatcccgccatggcaagagatcctggagaggctgaaacaacaagaagggaaaatgacaacccagggaatggaaattgcccttcaaaaggagcacatacaaaggcttgagagcgaaaatggacagatgaaagttgtcctcgaaggataccaacaaccaccacaagcggaagaaactggtaatcgccagatgggaggagggattgagaaggaaaatcacactgataataacgatctctcaggcaaccataatatccgatgcatgcatgaagaaatgggaaggaaacctagcgactcaagaagccctagttccccacagggatcagcccagaaggaccagggacgaggtggaagagataaccgaagcggaagcgctccgaacaacaccccaaaagcaaattatggatccaacggttgctggaaatcaaacagcggcgagtaaagagacggagagactacaagaaattatgtggaacaaattgatagcattggaagcaaaaagccaaatgggaaaacacagcgaatgggcttggatggaggggtcaaccctttaacccttcgaaaaccacatcctgtgcgtagaagcccctcagcgttacgtggcccctaaattaccagagtataatgggacaggagacccctcggaatacgtatgtcaatttgagcaaaaaatgttaaccgtctccgtcccactagaggacttggaagcaatcaagtgcaagaccttcacgcaaggatggagagggcccggtctgcgttggttccacaacctaccgtcaggcacagtaaattcttaccaggatctcatcctgagattccaggccaatttcgcgataagtgtgtgaactgccaaggtggatacggatttaatgttaatacaccagcgccttgacgaacccttggaacattttatcaataggttcagcgaggaatacgtcagtatcccaaaatgcaccgattcagtggcgacaaaagcgttaatgcagggattgatacatggttcggaattaaagaaggcgatcatagtggagcctggc

SEQ ID NO: 235413 - DNA, 1219 bp, Cannabis indica
catccttcacttctctcaaatcttatttgttttattaactaaaataatacaaatttaaatatactaaaattcatacactttaaaatacttatctctaattcacatgtaaatctatttatataatattaatcaatatatattttcagtttaaattttaataaattattatatttagagtaatttgtgtcataaatatttaaatttaataaattgtcacaggcaattcttaattagttaaagttataaaatttttatttttctaaaaaatattttatttaaatatattaataaaaaataacacgtgataataacttcacatttaatagtaaaatatctataaaattttaaaaatataatttaatattattacagtaaaaaaataaaattaaatatttatttgacgtaaattaattatatatttatatataaaaaaattaaataaataggtgagataatcaatttaagtaactatttatcaaattttgatatataatataaaattagaaattttcatttttttccgagacattggatacttttatatagaccgaaaagaaaattaaatcaaattaaataaattgtgtaattcactaattattggtgcataaataacgaatatttaatactaataattacaaataaaataagatgtagccaaaaactcaaacatcatgacaaataaatttattccttaaattatattaattaggtgggataaagaaaggaaaagaaaaaaaaataatagaattattataatttttaaaattttagtgaaaataaaaataaaaatagtgcaattgaatcaatcacatcatgataacgtgggtagagggacatgattaaattttattataaagaaaaataaataataataataataaaaaaataataatcaacgcggcggtgggtaaggtagagagagagagaaagaaggggcaaaatggtaaattaacctgagcaacaaaagaaaaggggaagaactagttgagggttgtgacgtgagatgaggcagggcttttttggccgccccatctgaccaccgttgtagtaaaattacgaatttaccccacaacttgtttatttttaaatatttttgtttttaatgtttctttttcagcctcaccgtattgaacacgtgtacgtcacacgcgtcttcccatgcagctgactcctgtctcctttcgtttctaatctctaatctaattttaattactaacaa

SEQ ID NO: 235414 - DNA, 961 bp, Cannabis indica
cagaagcttggtttcagtgatctcaaggagcgggccatttttccttccaaggtcgacgatgcatgtcttgtgacaatcgcggttcttatttacaaagagttcttcgaagctcgtttgaatgttagcttctggcttgtcaggattgtaagcctcaccgagaaaatgtctgaagttaactgggagccttcccgaagcgagataggcacctcacttactagatctcgagccaactcgagtgttgcacttagtttgttcattatacaataagtgcttttgcaattgatatgtgttgctttcgtcttcctatttgtactgtccttgatgcctcgctatttgcattcagcgacatatggtttctcgctaatataatgagtactagtttgtatattgattcctcgcctaagaccttacagttagcatgttacaaatatactctgatacttacgtaattaatgagttattccataaaaagcgattgcatcgatccatattctcttcatcttgacacgcgtcctccactgagatggcagctgaatttcaggtataatactagctactgagccaacatttatctatgtcacacccatattgtccccaaatcataaattaataaaatacaaaaaaaaaaatatagagtatcgtactacattatcgtcccactatcatacctattttctctacaaattatacatcaaaaattaaaaaattaagactattgtacccacatcgtaccacaatcagacaaataatactatcaatgaaaaaaaaaataattaaaaccatcgtcctaaacgtcataaccctgtcgttccatatatcgaactatcatcttcaacctaaaattttattttctacctaagactatcataccaatattggacgtatatcgtaccctattatcctagttttgcccaacctgcaattgcatttctcaatacgacactatcagacctatattgta

SEQ ID NO: 235415 - DNA, 769 bp, Cannabis indica
cttattctaataaaccaagctccgtggggttggctagacattatgtaatgtttataggtaagtaaaaagataaaaaatgctcagaccttggctcactctcctatagttttaaattttttaaaagaaaataaaaatatataaacctggaaatcttttaagctcattaaataaagcaagagagggtagttttatcatgtccacatatctagataggttgtacatgcctttggaatattatatttcaatatgtaattcaacaacattccctcaaaatcatcggttggtaagaggaaaaatttattataccttcacatcgacattatgaaactgagtgtcaatgtcatacacttgaaacctgtagataaaagataaaactttagatatacaatcatcttaaaaccaataagatgcagattgtattttttaaggaaaaagaaatatagctctaaaacttacaccaaatactgcacgacctcaaaatgataagtaagtgtatgttttgtgatccacgtagatctactgaatttaaaattacttcagtacgaccaagctctataagagtttcatgcctccttttagtataaataaccaccatatgatcaatctgaagttcaaaaagtaaaaattcaaataatactcaaaatcagagagataagaacgaaccggcaatgactttaagaaagtgatgtactccatccacacagacttcagccgcaatagatttaagaaaggtcaggaaaaagctaccctttagcataataatactcaa

SEQ ID NO: 235416 - DNA, 582 bp, Cannabis indica
tttaagcaaaatcttgaaaaagcctctcaccctttatatttaattcacactgacatctggggtcctgccccaatcatgtcaaacacaaacttcaggttttacatctcttttgtagatgattatagcagacacacctggttatatcctctaaaaaccaaagccgaggctctctctacatttgttcagtttaaaaaatttgctgaaaattagtttggtagaaaaattaaaaggttgcaaactgattggggaggagagtatcaagccttttccaatcttgttattgaaaatggcattgattttactcactcttgtccccacaccttagctcagaatggtagagttgagaggaaacacagacatattgtgaaaattaactttacttgctcaagcaagcatgccacttaaatattggtgtgatgctttcatgaaagcagtttatttgataaatagactgcccacacctgtgttaaataacacttcaccattcgaaatgttgcagaaaagaaaaccagactataaatttttaaaaacatttgatgtagcttgctatccttgtcatagagcctaccaatcccacaaatt

SEQ ID NO: 235417 - DNA, 974 bp, Cannabis indica
aaagttgtttcttagagagaaatatttttttttgctttttaaccataagtgaatttttgcctttcaaaaaataagataaatttgcatcgtaaatacttaagtttaactatgggttacaaataaatatccaagtttaatttttaacggtaataatacttaagttatatttttagaacttccgcaagtacctatccattaagtatcacgctattattgacgtgctattttcttattgatatatttaaattcatttttaattaaaaagtaaaaatttaatgaggtgaacgtatttaggatgccacgtggtggttgacttgacacttaacgatcatgtgcttacaaaaattttaaaaatataatttaagtattgttaccgtcaaaaattaaacttcgatatttattttcaaccaagagtaaaatttaggcatttatgccacaaattactcaaaataatataaaaagaggggttaaattgtcagaaaaaactttatgagtagccatttcttgaaataactctaattttgtggtttgtgaaataacaaaggtcggtcttttatttttctatttctcctattcttctttcttcttccttcattgtactcctcgtgtccagcttcaccgccatcaatctccacaaaccccaaagctctaatctttcacggtgggtttttgctgttcttcatctttttcatcatggcatttattaaatttcatatgcagtaattttcgttaactacaactttctgaatctatgtatgtttgagatatctatgaagaaatggaaaattttgaatcttgtaatcttaaaaattatgaatgtttacattagattatcaatggttttggtctctttatctcaaacccctaattgtccctctttttttgattgatttgaattagtagcaatgttgtgatcctgtttagtatttggtcccatttgggtttatgtatgtctgacctttttattgctttaa

SEQ ID NO: 235418 - DNA, 1021 bp, Cannabis indica
gtggctgcaagagctctatactcggcctcggcggagcttttagatatggtaggttgtttcttggttttccaggaaatcagacagtctcctatgaatatgcagaaacctgtggtggactttcttgtcacgggacaggaagcccagtccgaatcagaaaatcctcgaaggttgagtgatgaagttgttgagtagagaaggccttggccgggacttcctttgaggtaacggattagatgatgaagtgcctgcatatggggggtacgaggagcggacataaactgacttaagttgttgacggcgtatgtaatgtccggtctcgacaaggtgagatagaggagtttcccaattaattgcctgtactcggacgggtttgtgagaggttccccttgtgtgtcgtcgagttttgtctttggatccataggtgttttggttggtttgcaaccaatgaagccggtatcctcgagaagttgcaaagtatattttctttgagacatgaagagaccttctttggatcttgctatctcaaaaccgaggaaatatcttaagtcacctaaggccttaagtttgaatttctggtgtaaagcgttttgtacttgatgtagggcctgtaggtttggacccgttaatattatgtcgtcgacataaaccaagagggctatgaaggtgtcattggttcctcttgtgaacaaggtgtaatcggcttgtgattgctgaaatccttcttggacaagagcatccgtgagcttttttgtaccattgccttgaggattgcttaagtccatgattgacttttgcaatttgcagacaagaggaggaccttggtgatcagaattatgaacttgtaaaccaggtggcaatttcatataaacttcttcattgaggtccccattaaggaaagcgttgttgatgtcaatttgcaaggtgtgccattgttttatagtggatatggcaaaaagcaacttgaaagtaaccatcttggccacgggagagaaagtatcaaaaaaatcgagtcctcttgttg

SEQ ID NO: 235419 - DNA, 2641 bp, Cannabis indica
actttatacgtgtttatttcatgattttagaaagttcatagttagggtgttaatcaacatacttgtgagtagatctaagatcctggtaaaataatttccaacattatgctgatttaggtctatcatattctttaagcctctggtttaataaattttatcaagaaattgggattgttcttttttgtagaaatgtcccaatctggttcagaagtttattctccagaattcttagaaacagaatatcctaaacaattagccctcacattcaaacccagaaatttcaaacctcgatccaaattggaaatgaatgatgccaaaattagagaccatctgattaaatcaaattaagaagaaattatcagttgttataagtgattcctgtaagagatttctgagggcagatgtcgttttttgtgagacatagcgtggcctgaacccacaatgttagcttctattccactcgcgagaccaatatttttacccgaagtcactgttgcttttgaaccatgtgaccttgagtttgacattatgtctcctaagcctcgcaaattaaagaccccacaggatcccagtgccactttcgaggctgaacttatcgaatctaaggttaggttgattagggcctatcttggcggcatcttaaagtcctttggcatcaagcagaggaaaggttatgtcataaggtctgtggggaattcaactattttcctccagaaagggtaatatgcgaggagtgcagtgggcgtagcacgagcaattcctcgggcattggagcctagagcctcgagcatatcaagattgggatggttcttccccttagggattactttaaggagtactgtaactaccttggggtttccccattccagccgaaccccatctcgtataggatccttgcgagcttgaaggttctataccatattttaggatgggagtgccctactcctttggagatggcctatttttactcagtcaaagtagtccctacgaggaagaatgatgtaggaggcttttactatcttgggagttatattggtgatcgcaagatcatagttaggttgccaaacaagacagagtttaaagaagacttcttttggacgacgagcctctctccaataaatacaaccgcctttcacatcatacgtaagttatttttcttagaaacttaactttgaaatgtcgcttaccaaacttttttctatttgcaaaggttcctccgagaccaattcctactcttgggatagttgagcgccacagaatcctactaagtcttcgatttgggctgcgagtaggaaatttcttattaaatgagaagaatctgaagagcgttggccttcatgactcggacgaatttacgtgtgtttacaaaatacccaagtattctttgtggaaaatggtcccagttccaactgaagaggaaagtgaggacttggtggctcgtgcacactatctcgagaaaactgcccctcgagaagaaagatcatcctgaggtaatcaatgtgggtggtcacccatggtgcttagggccgaacgtaacaccctagtttcattccgagatagtcaataaaatttctatacttggaacccctttctcatagatcccataacacatgggttcgaaagttggtacccagagttccatgttcagattatccaaactagttattactacaaggttgccgagtagtatgggactatgttgaatagatcgggacacatagattcaagctgggatttagatccactaaaccctttttctgatgactcgccatggttctaaatagaagaactccccctttgaatcctcatcaggatcccattagggtaaatcccaatgttagtgttccttccaccataaaggaaccgaccaatctggataacactatcaatccaaaaaatcatgtgagttttgttgatcatgccattcctccaaggatggaacaacccacagatctcacacagttgggctagtcaacatggagcaacctccacagagcaaaactagggctattcaataatgctacgtagaaaaaatagtgtcaggtatcggcgaaccatttattggtgagcctctatttgcactaggagatgatactgagctggccaggcttagggaatctgtaggccaggtcactcagataagagaagaatcatgcactgctggttgttatgctttcgcccagtagagatgtgcattcctaagaggacaagaagaatcacatgttgttggttgtgatacttttgcctagaagatatgtgaattcctaaagtggattgatcactagaagtacatcctctgcgcttgccaagcagaagtaaactgtcgtaatcgggacgccaatgacctaataaggtagttcaaagagagaactggtagaagaggttaggatatgataagagatccattataagaaaggctcgtagacagatcatgtagggtctacaagaatgtagagcatggacagacaatccaacaaagttcctcaaacacaagaataacccctttcttgcctaaccacactcaaatcttaccatatagatagtatgacataaacagcaagttcttagcaccatgaggcattggagaataacaaagaaaccttggaaagggggtgttccatgccagccaggctctagccaa

SEQ ID NO: 235420 - DNA, 683 bp, Cannabis indica
cttaagatggtggctattttttcgctcactaatcttgaaccgtattagagtggacactagtcactatttgtataagtacgaatcggataggatcacttgcccgcaagggatatggctctagtaccatgttgagaatcatggagttctatctcaaaactaattggcaataagtggagtagcccatgttcttatatatggctcaattctctaccatttattccatgtgggacaatgtccacaatatgtcttcttgattcaaaatattgaaagacggtgagttgaaaagaacttgatgtgacataaacacccatttcggagttccgagagtcaacctgagtgtagggctaggaactcctcccaggttgactgctatgactcgggactaatcaactctgggatgttttctttcttttcatgtgtcaaacattgatgtccacgtcatcatgattagttttcgggtaaatatatattttgaattgtaaatttgttttgcaatattttaatttatgtagctcacactattataattaaaattttaaggagaattccaagtagtgtagggaagtcattttgtgttgtacctgcttggtttctgcacttgaataattataattttacaaaattttgaattttttttaataatgtactataatcctatcattcgtaaaatttttttttttttt

SEQ ID NO: 235421 - DNA, 502 bp, Cannabis indica
tttttttcattctttttttggtttattttttttcacatttaagtgaagttcaattaattttagttaagtaatgaataacaaattgtggacaaaagcataaaaatatagtaaatttttttaaaaataaataagattttgtccccgaacaatatattacacttgtagtatttagtcctatttgtttattacaaaaattctttcaacttatagaaatttttttaaaataatttgttggacgaagcttctttggtgttatggctgcccaatttttttaaaacttattttagtaagacttttctaaaataactactttaaattttagttttatattttcgtccttcttatagtcactctctgcccaattgtattatcattatcaatttagctaacagataaatatattggaaatttagtttattgatgttaaacatactaaaattaactctttaaatattctacagcactatctatgtttgtattttttgttggaaatttattttac

SEQ ID NO: 235422 - DNA, 1104 bp, Cannabis indica
ttagcaactccttccctgctctagaaagcaatcttccttcccaaccttgaatccttttacgcattttatccttcaagaacccaactaaggccgttttattacgacccacaatatttggcaaacccaaatatgtgctatcatcacttgcctcattcactcccagcatagaacacagatgttgcctcacctcgtttacaatattagtgcttaaaaatatagaggacttctgtagattgacttgttgtcctgaggccttctgaaaaatatttaacatttctatcatgttaatagcactatcctcagaggctttatagaatagataacagtcatcaacaaaaaaacatgtgagataacaaattttgtctaattattagttatatatatttaaaaaaataaattaaatctatatcaatatctaaaagttaatttttattttattttattttattatatatatttgatttttttttttgtatgaataagaatcattgtattgctcaaacaaatctttataacttacatcacacttccatcatacttcttttagtctctatatcaaacaattatacaacattctatctatttctaatttcagcctcatctaagctttacaaatggacattacatcaattatatttcagtaattacaatttttgcatgacagttagatcctcaaaagccattgtttgtcttcttctttgaacttggttgacagccccaaaatcttgagcttacattcctgctgtattctttgtgttgataacctttgtatgccacagtttttgatacaccagcccgacaagcattgttctcagaatgcttttcctagcagtcgataatgctcggctcttgctgatatttcttgctagctactgcatactagttttcctcgttccccactgcagccaagatttaatctccttcaggcatatcctgctatactgacattcaaagaataagtaactgcccaattctctctcttgtccacataataaacatgtcaagtctatgcttgtattatatttgtattatttttaaaaaatcttataattttattttataattactttcaataacatatataaattgaaaaaaattaaaaaa

SEQ ID NO: 235423 - DNA, 2030 bp, Cannabis indica
attaatataataagagtttaaaaaataaataaatacaataataaaggagatggagattcttacgttgttcagacgttaatgagccttagtccaaaaatcattctattggccttatgaggcttgtatggatattttacaatgtttatgcaagataccctaactttgtactcttagtttctcttgaagaagaaaaaagcttagagtaatttgagcagagcttcaactatctaaattttcgatcctcctttcatatagaactaaatggatatttataggctaaagagcgggtatggacatgcgcatgacccacctagggtttctgcaaaaagcttattaatagggtcaaatacatgcaaagagctgactattgagacccttagaaggtattgtggtgtgttgaataagctggacaataggggaccaccattcgtataggacgcgtcttaccaaaaggtttacccttgaaaaggaaatgcctagaataactgtctggaaaaaaggtgtagggggtgtgtgcactaccatggcctgacacaggggacaagacctaatcctgtgttaagaaaagcatacccgtcattgagcgatccgagtttatcttcaaggtacacatctgcatctcttttgggtggtcagcatctgtgataggcccttcgtgtaaccttccatgtatcgttttgggcaaacttcgatcctgggccacttcggatcccggagtgagggtaagccttccgtgtcaatgaagggataatgaggctaggtaaatctctgtatatcctttggacttgacctgcttctggatccacgaagcttctctatgacttaatttaatggggagggggatttagttaatgagatctaaaagttgtatcttactttttgtgccacatgtctcatgtctgaaaataaggataacatttacccccaagcttttaagaatctttaggttgcgagagcttgcagtcctcctccaaatctttgaggcgcatttatgacacacgggtgatcgttgagaatacagacgtgttcgttttgttgagttgtcatcatttgaaggatcgagtggtataatagtcactggcatggcatgcatgtgtcttggtgcgctgggttctgttcatctcattttgattccatcttgatcatctaactgttttttttagtgaacgagagttacaactcgtgacaagtgaaattcatgctttgatatttcacctttaaataaggtggaatatcggtaaaatcggaaagttttgagtttacccaattttacaaaaaagtaacacctctgagaactggtgaataacttcacctaaactaagaaattgactaagtgatgtcaacatatcacttagggatcgaaaaatacgagtctgagacattttttcacttgcctagcgtccaggttgacgtcagaatattaacctaggtggtgggtgtcaaccttggcgctggatcctgaacaacctttagtaaaatagacataactccctcaatattggttcgattgatgcaaaacaacttgaattttaaagatctttctagtcatgtcctacacccatatcacaattctaaagattttaagttcaaaattcgtcctcgagacaagtgcaattttttctgcagattacccaaaaatgatctaacggacgagtacaaactctaaaaattgatgattttcgtcaagagtcaattttagctattaggtcatcactaatggtcaatatcagcccaaattgatttttctatattttttgtattatttcattattattttaataggacctcttttcctataaaaggagagccccactagtttattttttacattcaggaaagagcccataaggtcagaacatctctctttactttctctctctagaaattagagctcttgcctaagtaaattttcttttaatttttgtgagcaataaaaacttgaagtagacgtagctccattaccgtcgtaacacgaggagttaactactacatctcctctcgccaatatagtgagcaagtgttggatagat

SEQ ID NO: 235424 - DNA, 990 bp, Cannabis indica
agagtctagtcgcattcatatggctcgcatagaataggaccaaggaacggtttaagactagcgtatactgagatatatgggaggactcttgagatcctcctacgagttgtaaagatcgattctttactctgcgagctggttcagatgacccaataatctcggtaacccaataaacgcttgcatgccttaggttgccaacttattactagatgtccgtgtaagcgacttaaacaggacacaaacatcctaaactcaattggtcttgtatgcatcttacgcttgcgagcttatgcaagaatatgaacagccaactcgcactatagaagttgcatacgttgctgtatttagtgaattaaaatgaaactgcccttcatttattgtatttatgtttttattaatttaattgttgtaatttattgtataagcagagtgataatgaattcaatctttgtgtaatcaaaggacacttgctttgtatataaaggagtgatcctacatggaatggacgagacagaaatccttgcaacaaaggactaagcagactatttttgattgaaccactatattctcttgtgttcttcgtatttccaatttatttccaatattttgtgtccttagtttgaatactcaccactctaggttgagtactcgcatattttcttcctatattattactatatcatttattttggtgctgtctaaattcattcaacaacaagtgagatcttatttgaggacacaagccctttgtcattgagacttaatttaaattttactctcattctcatctagtttaaaactcatactaaacgcgaggctattcattgtgcatattcttatttttaatattgaattatttaatattcattataaaaatataaatattttttcatgtaactcacaatacaataaaataaattagtggttgatttatgtctccgacaaaaattaaaataaataaaataacgaaatcataaatttaagagaatg

SEQ ID NO: 235425 - DNA, 680 bp, Cannabis indica
gatgaggactcttttatgtttggaaaagtctttgtcaatggacactaatattctttcactgtgaaggatgtggctaaagctctcaatctgcctatgggaattgaggcaactgatgtggaatttgatcgtcaaaaggtgttcgggatctcactggtgataatgatgtggaactctctgacacaatgcatatgtctcaactcacctatcaatatgttgttcttatgaggtttggcctatccaattggtttccttactccaatttggtaaatgtttcaaataaacctgccttctttttgtataaagtttcaattggtgctaaaattgatttggctgacatgatttgggagcaaattgtttctcttaaaaagggcaagaaacctagactcaatcttatctttcctcgtttgatctataaggttttgtctaaccaagaggagttgatccttgagattttgtctaaccaagaggagttgatccttgagaatgaaaccattgaaatgcctgctattggaaccactttcaaagttcgagagaaacctcctcaaggaaaatctgctaagaaaaaggttcggtctgcttccccttgtgctactgatgaacctgctgttgcatcttcttccacttctacctctacagaaatggctgaattcaacttgcgtttgggaagaatggagaccagt

SEQ ID NO: 235426 - DNA, 980 bp, Cannabis indica
atacaaattgctctaaacaaataaaatataatgatcatctacaaattaagtgtttaaaaaattattaataaataatattataattaaaaataatctaattaggatttttatcctttaaattttaacatgtactaaatcatgttcattttttggttgttaaaaattcttcttgaactattaagattgttagatttaaagacttttgtttaatttcattcaattttattatttcagtgattatttatatactaaactatgttttctagactttgatttctaccaaatcatgattttcgaactttgacatatactaaatcatgcattctgatctttcatccatgttagatatttttttttgctaaaattagacaaaagtctttaaatccaacaatttcaatagtttagagagcatttttaatgatcttaaaagttcagggacataatttggtacatatcaaagttcaaggggtaaaaatcttaattagccataaaaatatgtactaaagttagttgctaatgattaatggtaaaattgtaattaaaatatatttatttaaatttggcatgatgttatatcttgtgttaaatttggcttaatgatagtttgtgttaaatttagcataaaaaatgagtgctacattttgtttactatttacaattttgttccattacacaagatttagaataaaacgaaaaaaaaaaaatgattattattggttattattgatgcccctagggtttattttatttaagggtttaaaaggggtagtttggtctttttgggtggagtgtgttttattttatcttattttagtttattttattttataatgattggtggctgaaatttaattaaggttatattatataaatatatatatatatatatattataattaaggttagaatgaaaacacttaagtcacatatcaccctccaaccttcttccttctacttgaacccctaagaagcttcaacca

SEQ ID NO: 235427 - DNA, 1832 bp, Cannabis indica
atagatatatagtgttatgtagagaggcaaaggacatggaccctatatgatttcgtatttttttcaatttttccaatttataaatttatttcttttttagttttttccataatatatattttatttttaaccttattaactatatttcatttatctttacataaatttttatatctattctcataaaattttttattgttcatatttatttttgtttactgagaaattccgcaaactaattatttaacaatagagctaaaaaactacaattaaaagatcgataaatgaagaagacactcagaatttttacgtgattaaggcattaataaggcttagtctacaagtcagtattattattagatatgctagaaaaacctaaggaattacaatgagtatgagcactctattctcttcttgagcatataagtcaagaaattccaactctttacatgaaggattcaatatgtatttataaagtaatagatgtcatacatagttacctttttcctctaatggggagttcacatataatatttagatttttgcttattttgtgaagctcaatccatgaagtaatacttgtatgcaaatgtgcaaatctaatcaaggtgatagatattcatactttgtccattgattgtggataattaatctgacattaattatttgatctttgattaatttagtttcccttttcagataagatattctgtgcagagcagtaaatgagaaactaggattgacttccgaatatacactgagaacatcttccagctacacggacttaacattcttctgtatgctgagcattaacgtaagctcatttggcgaggcgtgcagttgttctcttggaaggctagataacaattggactcgacaaagtttatgtaatcttgggcccacttatgaactttaaacttctaataagaatccacgtgtcccttgccagaaacacggataacatttaccccccaagcttctcgaatgttttggactgcagagtcttgcttcagtctatagatgtggacaggtggatgctaaaagtgaaacctttataaattctaatactttctatgaatgggagacatctttttaatttttcgaacttaaagtcttgtgtggagttatcttactagctggcgaagcatctattcgcttgacaaagtgtgcatatcaaatcaattgaatgtggcaactgtttactttagtgcgattctcgaggacaatatcatcattttatataccttggttctagctacaagattaaatgcctgatgcatgggcttctatgacattggatctattctgtgtttttggaatatgaaattaggtcgttgatcctagcttcaggtagattattctttgatggtataaatagctcttaatgccaacttttactatttttactgaatctttcattttttctcgtttcaaaccaagaatcattgagggtaaaaatcatgaattaaaactctagagcaagacattgattattgccttcaccttcttcttcaaattagggcaaaagaatttcaagacgctcctccccaatgattacgactctatcaccagaagaaattacaaatctggatatcaattcttagattgattccctcatcgatcatgccaacgccagtgcagaaaggcttgatcgtcttgaagatcctactataaagggaaatttctctacgaccatctttcaatgttagcgtgtgctctcccagtccatatttctactcaagtccagaattatcgcctaattcttcaccaggtaaattttttccttttgattttcaagaaccattttgcatgttcaagatataggaattatg

SEQ ID NO: 235428 - DNA, 2106 bp, Cannabis indica
aacttgcaattgatatatatataaaaatttatcatgtgctcatatcatacatattaattatttccttaatttagtttcaaaaaaaattatttccttgatttggattatcatttattggcataaaacaagtcacttgtatattatcagttatttttattgatcaatcaaaaccatatataaaattaaatgtttgatttctctctttcttctttttgtggttaactaaattttgtttctgatgtatacatagggctgactgagtatgaaattcagaaaatcgaaaagaaagttcaaaccgaaaccggcggaaccgaaaattaaaaaactgctaacggttaaaatcgtcattgaatggtcggttttattttcttgagggtaagttttcattttctatgtgtgacaagtaattttttatgaaataattattagtgattaatttatctgattattatttttctaaatatattatttttgcagggagatatgttgagagaaggttactccctaatcagctgaggagtttggctatagtactcatcaataattgtggggctgcacaaatctatttaattgctttccaattttcttatttgagatattaataattaaagacagaattatgtttattgaataattatcaactctatttgtgtgttgtgtgcttttgcttttgctttggtttggtttgatttgctatgtataataaagctacatataatgtattgtgagtgtagccaaaaactatttgtggatttgatccctttaattaataatttttgactgtggatgaatatttaaaatattcaaactcttttatatatttataattaattaataataaaaattggtgaatatatatacctcttgcttgaaattaatcaacactaaataaatgaacccttacaaattgacctcataaaaaaaaaactataaaattaaaaatttgattatttaaataaagaaaaacactgtcaatattatatgaataattaaacttataaaagatggataaaattactgcatgttgcaggtatgcttaattatttttttttagaaagtacattataagaataaatgtttaaagtattatgaagagaaaatataatagtaatttggaaaattaaaagaaaataatgtgtaaattgtataagaagaaatataatattattttttaaaagaaaatcttaaaagtactgaatatttatgatttaagataactaatttggagacttttaatcttgagagtttccaaattctgtataaagaattgcattaacaactgcaaaataaacatccttttgggaatttggaatgtggacatctcttgatccaagtcaagactttgtccacttcaaaacaattcaccacaaatattcctgcccaacataaaattatgctacaaatctctttagtactgtaccagcagccaataaaaatatggcaataagtttcagggcaggtatcacataaaagacaggtttcattatcagtgataccaaacttggttagtcggtcttgggttttgcaatctcttcttacaagccaaccaagtgatgaactcgtgctttggaatactaaaatgattccaaataaaagtatacccaagtttcttcaagctctctttcggccaaagcttgggacaaagttgagaaatattgaattttattagattaactttgtctttaatctcatcctttaccactacacaattttcctccaataccaactctttcttatggagctttatagctccaccaatcttgatttttaatgtacaccgagttaatccatttcatacacaaattatcttttttctgagcaatgtctcgcacatacctttccgaagctccaatgttccattgtttaatatttctaaaacccaatgcattgggcctttgttgaacctcgaactcaatcccacatgctaggaatggctccacagaataatctaagaacgctcacaactcatagaacataaacactcacacttgaggccaaatctaatctgaatgtgtatagctttattactctgtagtctgtacaatgtgatgaattatcttacatgtaaaggattataggtatctatagactaaatactgatccact

SEQ ID NO: 235429 - DNA, 1318 bp, Cannabis indica
aataataatgtaattaaaacctatacaattacattttgaaaatgttattaataaatgtaacataatgaactataacaataaattaatgttactatttataatatataacaccaaaataatgttataatatgttatttaataacgtgtgaaaaatgtaattaaatgtcagtacttttaattacatgagctgtcttaacatttgttaaaatgttataaaatacatttaataacactttttcagtgttatcgtaactgttttttcttgtagtgaacactgtatatacatgaataattaaactaataaaagatggataaaattactgcatgttgcaggtatgcttagttattttttttgtagaaaatatattatgaagagaaaatataatagtaatttggaaaattaaaagaaaataatgtgtaaattgtataagaagaaaatataatagtaatttttaaaagaaaatcttaaaagtagaatatttatgatttaagataactaatttggagacttttaatcttgagagtttccaaattcggtataaagaattgcattaacaactgcaaaataaacatccttttgggaatttggaatgtggacatctcttgatccaagtcaagactttgtccacttcaaaacaactcaccacaaatattcctgcccaacataaaattatgctacaaatctctttagtactgtaccagcagccaataaaaatatggcaataagtttcattatcagtgataccaaacttggttagtcggtcttgcgttttgcgatcccttcttacaagccaaccaagtgatgaactcgtattttggaatactaaaatgattccaaataaaagtatacccaagtttcttcaagctctcttttggcaaaagcttgggacaaagttgagaaatattgaattttattagattacatttgtctttaatctcatccttttaccactacacaattttcctccaataccaactcttcttagtggagctttatagctccaccaatcttggtttttaatgtacaccgagttaatccatttcatacactcttttttctgagcaatgtctcacacatacctttccgaagctccaatgttccattgtttaatatttctaaaacccaattcccatgcgcctttgttgaacctcgaactcaatcccacatgctagaaatggctccaagaacaatctgagaacactcacaactcagcatagaacataaacactcacacttgaggccaaatctaatccaatgtgatgaattatcttacatgtaaagaattataggtatttatagactaaatactgatccact

SEQ ID NO: 235430 - DNA, 844 bp, Cannabis indica
tcaaaatttgtcctcttctggccttctaaatggtagaaatttctttggaagctctctcttcccctaaagataaagaatattttttttggaaagatagcttgaattttgtaccatcttatgctaatctgactagacacggaatgtatgattctaaagtatgtcctatttgtttacagaataatgaagcaactcttcatggcttgtggttgtgtccttcccataaatccattcagtatgggtggggttttgatagcttgagatggcatctaacttttatgaactgttggctggggttatggatatcttgtccaaagcagaagttaaaaattttctcatcctttgttggcaatacctttttgtatgcccaaaacaatcttgatccgtcgacccttttgagttctaaggactaactcttgtcatatagggggagcaggtcctgagttgaattaagggaaatttaatttgttttggatgctcgtatctgttatgagcgaaagcagtttgacatgggggcggttttgtcttgttctaatcttgaagtgctttgctcgactattactccacctgatggtatgcttgtacctcatgtggcggaggctttagcccttctacagggtcttcttctttgtaagtggctggagtaaactcacatttgtgtgttttttgactgtttacagatggtgaatttagtctttaataagatgcatgtttacagtgagtatgatattttttatgttcggaagtcattatttcatatttcaatctgttgggttttgtgccctaaataaaacccatttcaatataatcagatttactttaaagatcagaaataacattttatgtt

SEQ ID NO: 235431 - DNA, 1396 bp, Cannabis indica
attcaagtcagggtcctaggtctcgatctgcgttagggtcctagtccgagtgttggtctcggtccatgttcggaactggtccttgtctcggtcttggcctggtctgggtttatttaacggttaagttttgaggtcccgcatttgagtatcgggtcccggtcccggtcccagtatgagttctagtcctagtccaagtttaggtctcggtcctagtctgggtctaagtccgagtcctgatctatgttcaggtctgagtcctgagtttgagtctgagtttttgtacgagtctgggtctgggtccaggtctaggtctgggtttgcatctgggcccagttttcagtctgtgtttgtgtccgggtcttggtctgggtcaaggtctgggtctatgttcgagttctggtacgggaatgggttctagtccaggtctcaggtcacgggtcttaggtcccaggttatggcgcaagtctgggtccgtgttcgagcctgggtcctggtattgatcccagtctaggtccgagtctgtgtttggttccttgtcttgatctgattttgggatcgaggtccaattcctattccagggttcttattctagttcttgttcctattttgggtctctggctccgagtttgggtttgggtcctagttaagaaattgttccaagttcgagtcttggtacgattgcaagatctagacagcaactacgggtcgggtacaagcccaaggtggtgggtcaacatccggatcccaatctttggtcccggtctcatttccattcggatcttgggtcccagtctatgtctgtgtccgggtctgggacaaagaccatggttgggtctttggttttagtcctagtcttgagtcttgatttttgttctaatttttagtttgggtccccaatctaggtctgggccctggatgcaggtctgagtctcccatccgagtctgggtcctgggttcgggtctaggtcgaagtctgtgtctcggttcgagttcgtatcccgagtcccgatctgagttttgattcagattcgcgtcctgatccgggtccgcttcccgatccaagtctgggtctgggtccttgtcagattctagttaccggattcaaacctagactcggactcggaccctggtctggggtaagggtctgggtctaggccagggtcttgttccgactccaggtctgggtttgagtccagatatgggtcctagatccaaacactgactacgggtccggtccaagccctgggtcttgatctggatcacagtctcgagtcctagtctagtttcacttggggtccaaggtcccggtctgggtcctaggtcaggtccgggtccaagttcatatcctgggtctcagtcccagttctgatgctcgtgtcccgggtctaggtctgag

SEQ ID NO: 235432 - DNA, 746 bp, Cannabis indica
ttgggaatgtatcatcgggctcttcctactaattcacagcttattagacccaaggttcttgtgcagccgatttgtaataggtgtggggaggaaatggaatctctcgagcatgctttagtgttttgctcatctttacttcctctttggactaatctgcgggtttggcatcatttataccgaggtcggacgggttccttagcggagttgcttgtttatttatttgatgtgcttagcaaggaagagtttgagttgatttcaatggtgtggtggtgggtgtggtatgataggaattctgtcttgttcgggcaaaaacaatcgcggttgtgtgggattgtcgagcttgcgcacgaggcattggttgaatttcaaggggctggtgtgggggttgagggggctgtattgaggagtgggattgctggtggttcggccatgccccgtagatggtgtcctcctttgcggggcaagtttgtgttgtctgttgatgcggcggttactccggttagggggtttgctgggtttggggggtcgttcgaggtggggatggtaaggtgtgggcggcctgggcggtgggtggggttggggagttttaggttgcggtagctgagcttttggctatgcgtgttgggttacggtgggcgtccatgctgggctacaagttggtgagagtggagatggattcttctgttgttaattcttggattacttttccgaattctatttttagtataaaccaattgttgaggaga

SEQ ID NO: 235433 - DNA, 842 bp, Cannabis indica
ttcgagtttgggttcgagtttagatcctagtaccgttccaagatcccggtctggttccaattcaagtttcggttttggttcccgtgtgtgggcatgggtctttgtatgtgtccgggtcctagtttgagttcgagtttgggtttgggttctggtctaagtcctagatccagacaccgactatgggtcgggtcgaagcatcgagtcccgaatcccaggtctcgaggtgggtcctaagtccaggtttgggtttagggttgagtcccggatcccgatccaagaactgaggcccaagttctagtcctagttcgtgggcccgattcccagatctaggtacccgtctatatttggatcctaggtcccggtctgggttaaagtttgtgttccggttctagttcgggttcggtctgagtcatggtcccgatttgggttcgggtctgagtttgggtcccagtcccagtctgggtccgggtttcaggtcccagttccgagtctggttcttgggtcctgggttcgcccccagtttttgggtctggttttggcttcgggtttgggtccaggtcccgatcttggtttatgtcccaggacacaggttccggtctgggtccaagtctcggtgtgggttctagtttgggtttaggtttgggtactgctacattcccatgtccgagttctagtcctagtcttggtccgattccagttctgggtccccgtgacttgaaactggaagtgggaccgaaagcggactgggacatgggaataagatcaggggactaggacccagactcagacctggacacgacgtggacccaaatcaaaaaatcagattatgactcaggacacga

SEQ ID NO: 235434 - DNA, 1149 bp, Cannabis indica
agagagagagatgagagtgactttttcagttttttttccatgttaacataataagatggttgttttggaatttgtaccagctggtggaggaaatggtacttgggctgggctgggccggctggaggaaatggatgttaggctgggcctaaattttttttgttaaggcattatatggctggttggtttcaagccctgggttggagtgggctctaggcacgggcctagttcgcctaggcccagggccgaccctgaagataacttttatattattgtctaataagacaacatttttcatcacataacagtattaaccgtattttaatcttgatatcaatcaatttacaacaataataattgtattataacataacatgctatgtagtacaatgtacttttcttacctttaatctgaattcatgcattcaactcaagtggagaaatattcctgatgatctcggccactatgtcgcaacaacggtaaaccaataagtgtctatcccaaaatactgcttaatttttgcataagacaatttagtattttctactaaaccccgtggcataaacaccttaaaataaaacttatattttggctctaaaatatatacctgaactcgttgcaagcttcaaaacggtatatagaaagtctcaaagggacacccgagtgaaaagttatggccaaaatacgatattcgatcatctcaaaaaataccaaaaccggtaaactatttggtaaaacagttaactattttctaggatttcctggcatgaaactgttaaccatttgtcccaaacagtggaccattgtttgcaggaattgggaacccaaagttttacacatctcgaaactctaccaaaacctgactaattgattccaaacttcacagaaaacctatataacatccgtacatcattttcaacataccagaaataaaaaataagtccttaaacaaaaaatgccattaaaactcgagctttgagctttaaaagctcaaacttgatttttacttcaaaactatagcaaaatcatcaagtaaacgtcaaaatcaatcccatattatcccagaaacaaaaccataagatcacagatcccaaaaccactctaaaacacaaagtcaacttttaaaacttaagcttttcaaaaaaaaaaaa

SEQ ID NO: 235435 - DNA, 2027 bp, Cannabis indica
catactttgaaatcattgcatgattccacttagatccttctttgaaatcaatgccaccataagacttaggaagacaaaccttctcccaagaggtcatgtgctcatatcacctttactcccccaaagaaacccctacataattttccacttccctagtaacactttgagggagaataaagatgctcatccagtaactcatgaggccaagcaagactgtgtgaatcaattgagctctaccggcaaaagacaggtgtcttgttgcccaattatggagccgttgtttgattttggtaatgataatcccacaatcttctatctttcattttgtaggtctcaagggcaccccaagatactttagaggaaaatccctctcaatgagagacatatccgctaaaatatcaattttttctctactatctaccccaccaaagtagatatgagatttttgagtattaatgaacaaccatgtagttgtactgaaatcatccaaaactactttgataatacgtaaagattgtctcattcccttgctcaatattatcaaatcatccgcaaaatacaagttaataagctttaaacttttacataagagatgatacctatagttaaagtcatgagcacctagttgtaaaagccgagtaaggtactcaatgattagaacaaacaacagaggagaaatggggtctccttgtcgaagacctttggcccctttgaagctaccctgcacacggccattcataagtaaagagtaggaagtattcctaacacaaatcatgactctattgacaaaagtccttggcaaattgaaggcattaagaaaatcctcaagaaagtcccagtcaaccatgtcataagccttgctaatgtctattttcatagcacatctaggtgaggtattcttccttctataattcttcaacacatcttgaagaatcatcacattatgagcaatggacctctcttgaacaaatgcaccttggttttggttgataatactaggcagaaccatagccaatctgttacacatgagcttagagatgcatttgtatagagttgtgcaacaagcaattagcctatagtcaactgccttagaaggattataaactttaggaatgagagatatcattgtgctatgcaattccaaggggatattacctgaagtaaaaaactcattaattgctccacatattttagcacctatattagtccaaactgccttgaaaaaaccagagccatagccatagccatccgaacctagcaatttcgagttagggatactaaatagagctttttttttatctccttgcaagtgaaaggttttagcatagcaagttgttgatcaacagtcacaagagctccaaacttcaaacaattcttattgatacccgtcaaggtcttgctactgctccccataaagcctttgaaatgatctacaaaatgcttcacaacttcatgaaaattatcattagtaataccattgtcagtagtaaaagatacaatcctgttttcatttttcctttttttgagacaagcatgaaagtaagaagtattaacatcccccttccttagccaagtgactttacttctctatttgagaaagctaaaataacacttctcacaatcatgaaatatggcagcaacattagttttggattgttggtagtgtaggtcattaggatgagcttgagcaagatgtcgagcttctacataccttgactgagcttcatggtaaagtttgccaatatcccccaccttgtcatgattaaatttctttaataggtgcttaagtctcattaacttcagataaacacccctcaaacctttagcaaacataggtctattcgagctttagatgacaacttccttaaaatcatggtgatcgacctagaaattgtagtacctgaaaggttttaaaagcctatctcacaagtagcagcagcagtgatgatataagagcaatgatccaaattaattcccagttaataaggctgaagtgtttggaaaagatcactccaatcctcattcac

SEQ ID NO: 235436 - DNA, 1229 bp, Cannabis indica
tgatctggctttgatgttctgttttatttggtccatctggaatcagaggaacaatatttttcaccaaaaaacagggctctcttcgtaccaactttttgattatgcagctaactatttgcatgaatttttagatgccaatgctaaacagatggtttcgactccttctatcccgcggtcaactagacgagaattccagctccctgctggtcagtggatagtctatactgatgcagctttagattgcaaaaatttgaagcatagttttggagttgtggccttcgataatgcaggacatgccagagctggctttatggttccttgctctggtgttgtgtctccggaggttgcagaagctaaagccatacttgcagctctcgaatgggtacaagcaatccagcttcctgtgttgattattgcatcggattgtcaaagtgtggttactaaaatttctagctctttttgtaataattctgttctttgtgatgttgttaatgccattagaaattcattgttgttcaatcctaatctgtctgtaatttatgtcccgagagaatgtaacacaatagctcattttcttgctaaggctggattaggattagacagtgaatgtacttggaatggttctttaccttccaatctcacctgaacattgtatttgctgagttttaatgaatatcaggtttttctcaaaaagtttttttctaagtgcgagtcttccagagttttattttatttttagtgcttcaaaaaatcttttttctttacaaaattatctttttttttttgacaatttttcaaaattatctttaaactatcataattactataaataggatgtcttatacttctaccctatcacttaaattttattttatttattatagtttgaacttttacccgtaaaattttgatcttaaaactttctctaaaaatatatagagaaagtcatataaaattaactcaggtaaaaagttgatgtaaaagctcatgttattttagtttcttcttctttttttttttttttttgaaagtgtattttagtttctattaaatcattgttatattttattgtttattagattctgaatattcgtccttctattttcttaagctaaagatatagaaatatctaatgtggtgggccaggtaatatgtccacttttgcttaattgtagtattttacttgattatggtatggaccactttttctttttttactcttaactagt

SEQ ID NO: 235437 - DNA, 786 bp, Cannabis indica
taataggttgtaaattgttatttagagtaatgaaattcatgatttattgataaaaaaaaaaaacaagacatttttgtcgtgttaaattttttcaaaattctaaaaattttgtaaaatattttaaataattacaatgcacccaactataaaaattaggctaaaaaattttctcgaatgccgaaatagattggggtgcatcgcttcctaaaatttttattcaatttttattttattggatttgatattatatttacatgaattaaaataattaaagatgtacaaaaattattaaaatgagtagcaatttgaaaatattaaaaaggtaatcatatttagttttagagtagcaaagagtttttttttttttttgcagaatgtaccaattaatcatttttcaaaatacaaggtattgtgggtattttaacaaaatataagtatcaaattgtatttatcgaattttgaagggatttttacattacatactaaaatgtttaatttttttttttttactgtggggggattttttttttcaaaaatactgtgatttttttaaaaaaatattgtatattttttatactggatactgtgttaaatttttattattgtttcacggttgttttttagttgttacactgttgttttaattgttttatagttgtttttaaaaaaaataatatttttgtaaaaaattacatataacagtaaaattgtaaatttttgcccaaaattcagtatttttgtaaaaataccaattttgtaaggccgttttcatgaatgggctaggtg

SEQ ID NO: 235438 - DNA, 829 bp, Cannabis indica
atattatatgtatgataagagcattgatattattataccaatgtgcatatattataagtagttaaaagatttttttttattatttattaaattaaaatatataagatttgatattaaattatactaataattatttatatatttcttataataattgcataatatatatgtgtaatataatctttgatgagcatctttaacatccaatgtaattaaaactaaaatattttacaataactataataaataccaaaatattattttgtatttgactacacattaaaaaaaatatatatatatatcttttctcaaatatatatatatatatatatataaccttataaattcagtaaatttcatttaattttactaaaatatctctattaattaaaaattatgtctaatttatcaaaaaaaattaaatgtatgcatagtttaattgataaaaagataaaatctataatattttaaaaataaattaaaaatcattattttaaatatttaaaaattaaaatcatcgcatatattattttttaatttttatttttgtttctatggtttgaattgctcgaataatttaagttgttctgttagttatgtcattggctatatgaattttcgtaaaaatatacaaaaaaaaaattattttaaaatgtaaaaatgaaaaaaacctccacaaattaaataatatataagtgaaatagaaaagatgattttttttgtaattttctagttttgtggtttcttactgtttttttttttctttctttgtggtggagcttttgtttttgttgttaaactctgccatttgtgtgtgtgtgtttttttt

SEQ ID NO: 235439 - DNA, 1560 bp, Cannabis indica
ccaaacctaccgatgtacaaccccacttagagcacacctaggcttggacatcctttttacggacacttaagagcaagatgatggtaaaattaagttttgattcaagataggggttgtggcaacttatattatcacctgaagttgtcagacccacctggtgtccaagtactggacgcccacgtggactatgcgcccaagtgagcattcacctgaagcgtgtggttctgtccattaattatttcattgaagaaggccaaaatgcttcattagcattaaggagaactaagatgacttgtggcaagtgaaccgtcatagccctaggcaccatgcacccgagtgacacccatatcctcaggtgatccccgtgcattacctagtgaacccaaaaatgtttctccaccaagtatgaacgtcttcacttaatcctttgaatcatcaacatactggtcaatacactaatttggaagtttggcatccaaataaccttatagtgcctcctcatgcacctaggtggtgttgcaccacgtaggtgatcatgcgtgtttttagtcgaaatatgatgcaaaactcaagaatttgatttagtggtgcctcaatatcaaatttttcatccaaatatttcaagaatagatgtttcacagtgatttacgaccagttggaacaaaagtgctcacatggttgttggtctaagagatagttacacaccacaaagtgttttgggcatatcctgctcaatacaactcgtattgatgtatttttaagtgcattagaatgttcattcctttgatgtttcataaggaaagccaaattcgaactccttatcatgaaaaattgagtctcaaagggaagtatggatttaggtatcagtgccacaattttgatcaatggacctcaattaatcaaagatcatcagtcatcattcaattcaagatgggtaaatctcaaatattcatcaagaaaccatattaaagtactagatcaaactgttggaaatattttaccaagatcttagatttactaacaagtatgttgtttaacatcctaaatatgaacttctaaaacgatattaaataaacacatgtaaagtatgagaaaccttacagtggttgcagcggaatataatgtctccttctactcagatctctagcccttgtattctttctgtcgcagagtatcaccaagatctgagcccgaatgtccttctctttaatctggattcttcacaagcttccacactatgattgaggtaccatttgatgtgtgtgggcactcactcactcactatgggctttggctttcagaagtgaagaaaaggaagagagagtggcggctaggcttaggaagaaggcactcagtttttcttcaaaggaataagatgcatcatctttttcctgaagccatcactacctatttatagtcaaccacctagggttaggttagatttatttggcattaaaataatgaaaaaataaatgataaatacctacataagtggccggctaaggtataggataatgggccccacttttgcaatttggctgttttatcatttctacatct

SEQ ID NO: 235440 - DNA, 1115 bp, Cannabis indica
agtgctagatcgagagatggtctgttgcttttttactttttcaagtaatcaaattcgagccaaggaagatagcaaaccctgtagttgatcctctatcatcggggtctgaggctttatttgcatcacagtaggctacaagatcaagagtatttggtttctacagattaagcccatactctgttgtaccacttatgtagcaaagtattcatttaacagctgcaatgtgcaaacaaaggtttttgcatatattggcaagccttatttacactgaaggaaagttcaggccttgtgatgattagatattgcaaggctctaacaactaacctgtacaattgaacatcttccaatagttccccagttaagctgataaacgaataccactagtcattggagtaggtgcaggcttggcattactcatttgagccttaacaagcagatctttagcatatttggcttgtgacaggtgaatacctacatcagtttgtgtcacttcaattccaaggaagtatgtgagagggcctagattttttacaacaaattgtcgactaagagctataataacaacttccactgcagtttgatcacttcctgtgattattatatcatcaacattgactaatataagtataacagaattagaagtatgttgaataaaacgtgaatggctagacttggatgaagtgaatccaagagacagcagatagtgtttttgttgggttttgtgcatgccctaaataaaacctatttcaatataatcagatttattaattaataaaagatcaaaaatcattttatgttgcatgattcacatgatttatttcatgattatatgtttaatgtataaattctattaaattcaaaacatatagttattcatgattatatgtttcaaagtttaagtcccatgatttttcattacactagatttagactgacatgataatcagcgataaagtatatttacaccttggataagtgttatgtcctttccaagacattggcaaagtatgctagtatcggatgtatggagtatatatcaaacttggaccgatattaaacttaggataagatatcataaactaccgttatatctttctaagttgatatcactggtt

SEQ ID NO: 235441 - DNA, 1878 bp, Cannabis indica
aatacgtcctcgcctgcgtcgccagtgtttgccggtgttccgaggatgttatctgggttattttgaggggtgagattctcctgttcatttgccatatcttttattgattatcttacgaaaatgttcttttactgagaaaaagaaaaagtttcccacagacggcgccaaactgttttggtcagaaaacagtcaagatttcttttttggggcctttctttttccagttcctaatccccttttcttttacgtgatccttctctatatatcccctacgtcttttttgcttgtatgggttatctatcatctactcattgttttgttgacacgtgttcccgttcttttattctttttgccctctaccacgtgtttgtattctagtagataacttccttgttacatgtgtttatgccttaagcgggttttaaagttattagtctccctagtttcaacggtgttgtgtccgtcggcatcacattcttgaattaatcaatttcttactttatgctttagtcccctccctgcttccgacggggttctcgtctgcggggatccgagttctcctccgccgggggcttttattccatgagtagtgttacctcggtccccttttgttgtgttttaggtacttcctccgtcggcgttttgggtatttcctccgtcggcaaggtatctgggtgcctcttcgggtcccggtacactatttcacttgcagttaatcttcgatccgtcgattacccattccttcctgttcttccttctgtttccgtcgacgctctctttattcgtttcttgtcatttatcgttttcctcctttttgtctgtagtgccccccttatagaatgacaacccggatcgatagtttggtcataccgagttgggcccacctttatactctaaggcctggatgtatttattttgatgggccttttaatgtgggccttttggtagtcctttattttgttgggccgtttatttccaagttcgattttttccccttaaacacatatattctacgtaacatcacttaattaaacctaattaaaaaaaaactaattatacgtgcactacacgtaacatcaacctagtatatattaatacattaattgtataagttttcaacttcttaataaaaattaataatatagaattagatgatataattttattatcactatatattagaattatatttttattatcatactaaaaaaaaattaaattagtgactatattacttagttgttaatattgaaaagtacatttatacatgaaaaaaataaataaaccatctaaatatttcaatattcaaattcaaaaataatatatatattttttttgaaatgcgcattcagaggtttagatctttaaaaaatattggatttcttcttaatttaattgagattaactatttggctttgatctaattcgttctccatcaaattctttaatattttaatgaattagaatcattgttagacaatactaaattacttttcaatttgcttaggcatctataaagccactaatgaatttagcagtacattatgtatacttttctaatatttttcatgatgtatcattattcttaatgaagcaattcacaagtttataaacaggactaaacacactctagatttttaagataaaagaacatcagattttcttaggagtatttgcaaacttccaggcatatttagacagagcagaaacctctctttctccagccacttcatctgccggtacacaatcacatatttctttcaaatcatcatctgaaagcttcactgataaagattcaatatttttatcaagattttcgactttagttgtccctgtaaaaccatcacaaactactgttactaaaaaacaatgttcctc

SEQ ID NO: 235442 - DNA, 1369 bp, Cannabis indica
cgacgacaccagccttttactacatgcttttgctagggcagaattagatcgtcagggtaagattagtttcattactttgttcttgcatgcatgattcctcgataatgttctaatgcctttatttgtctatttctttaagcagcgaagccaatggatgatctcctggacgctcttgcccagacctacagtcctgaaccagttctgcctcagacacaagacccggtggtgactcccgggaggacttattctagcatacccctggaccgagtcattttaatcgacgaggaagaggaagtagaagaagaagaacgcaaaatccttcctcccctggactgaaagcgtaaaggcaagatggtggagacggaggcagttaagaagccacggcgcatggacactcctgccccccgctcccgctcaggcattccatctaaggtagaggagtatacagtgccacacggcattgtcttaacccccaatcctactgacgaggaaaggactcaacttcgagtagcgaagcataactacgccacagcggagtatacgaaggggaacgctgaggtggaggccctgaaaaagattttgtgggaggccaaggatagttttacttgcagtgagtacgccggaaatgtctgggatttaaatctcgatcccttgactgactggttcaaccgcttcattggacctaccctggctccctttgcctcagagttgatgagccactttgctgccggcctggttaagctcccgatgaagagatacgtggcctgtgcttctaccaaattgtgaaatccaaaccttaaaataagggttttgttatagacaactaaaactaaaataccctaagtatcaaggaatcacccaaccaaggctctaaaactaacacgagttgacgaatcgaacaatttaggaaacctgcccctcttccggttaaccggttttacaagaccagttaaatcggttaacaagtttgcactaggtttcccccaaacaatttgaatcttgctcaaaatatgcccaaaccttccaaagcaacgataataacatcaaacaacataatcaaagcaatagaattctgaaatacacccagaatcaaaatatgccatggatgaaccaagcttgagttttcaaacttaaacttgtgcatccaccacaccaaaccctcaaactagcaactagaactcaaagtcaactcaaaatgaacatagaaatcaaactacaattcattcaaaccctaacaaccactatactttaaaattacacacttaaacaaaaatcaaagctccaaattacacaaggattagagctctagggttacctttgattaacaccacttgggttcagctaatacctcctcaaattcactccaaaa

SEQ ID NO: 235443 - DNA, 1433 bp, Cannabis indica
aagggctagagatctaaacggaggagtcattatattccgctgcacccaacgtaacgtttcgtaaactttatatgtgtttatttcattgttttagaattcatattaggttgttaataaaacatacatggtagtaaaaccaaaatcctggtaaaatatttccaacaatgagtgcgattgtaatatcccggaaaataaataatatttaaatagacatattttattaaatatgtaattattttggtaacgaagtaagattatgatcttgcttagggtaattattgagaatttactcaatgaaataaatagcgtaatttattaattacggagattatattgggatatgtgagtaccgaggatatcaatttcgaaataaaatatttttttgggcccggtaattgtggaaatttagcgatgtggtcagaaatgtcatgacgttaatggaagaattattttgggaatattccggactaggttagaaattttagaatgtcggtttaatggaattagcaaaattacaaaaatgccctaggttattttaaagtttattttttttcattgggggtaaattagtctttttgcttttaggttttagtgtcccttttatttttgggctggtaagaaaagaaaaaaaaatgaaatgaaatacatgaaaccttatttaaagggaatagcttccaaggcaagaaactaagtttcttcttcttctccccttcgtgtgaaccaagaccagccagcaagaggattgaaagttcaccatttcacttgaattgaagcagcttgtagaacctaagtccaacctagaagcaatcaaggtaagttctcaacaatttttcgattgaaaatcctagttttgagttagttttgaagtagggttttacttctttgttgctgtaggaattaaacttggtttcgggtgtgtttagggtaggtttttgagcatgttgggaatggttttaagtggtctccatgcctgcttgaattggttttggtttgttgaaaccaaagttgagttttcttcactttgaagtgtgattttgaaaaaattgatatattgcaatgaattggttgttgggttatgtcatgtttgctatattatactgttttggaaagtttgagcagggttggtggaggtttgatttgtttttggagtgaaaaaactagaaaatttcatggctgccaggaaaaaaaggtaggtcgtttttctgacacccagaaaaatggccgaccgtttttcacagtagggggaaattttgggttcttctcctcaagtccgatctgattcgaggtgtctttcgtagttaaattcagggtgttttagagatggttaagctagtttaatcagggggaaggtagggtgtgttcgattgtgagaattggagtcgattatcagaaatttgattaaggtttttattgagttttggttgttgtgacat

SEQ ID NO: 235444 - DNA, 664 bp, Cannabis indica
tgtctacgtgtacatagagtattatccacatgggcacattatacacatggcatactaatattggcccacataaataaatatataaaaataaaaataaattaatttaaaataaaaaataattcatttttcatttttccttttctacttgttttctttcatttacagcttctctcctttcaaaaactctctctctcttccccctctttctaatttgacgccgaaccgtagctgccccacactagaccagactgttgagtgccccatcgaactctccggccacacgatggtgataaaaaactgtcatcgaactcctcctctctcccgtgcttcctttctctctctatctcttgcactctttttctttctttctctctctatcacggtgaaacaaaggttgcgacggtggtggttttcagatctggggttttgagcgcatatctaacggaggaatttgatctcttccatcggaggagcaaaaatctggggttcggacctcttcttttttggtttttttttttcttgtttacccatttttatatatatggtttctttatttttgatctcgtactttggcactatttaatttcagatttgattttctttacttgttaagttgtggtgtgtgatggttcatatctgggtttaattattatttttttttttg

SEQ ID NO: 235445 - DNA, 601 bp, Cannabis indica
gtaatatttttattttattcttttgcttgtataaatatatattttagtagtgtctgtaaatgtgttaatatatatatatatatatatatatattaggatggcaaagtaaaattggcttgtgagagaagcaaggagcgccgtaagtttttagaaatttctgcattgtatccaatagtttgttcaacacactgttttattggagagtcctcatattcttcttacgaagaagttgtgactaaatatatatttgacaactcactgaattgtaggtaagtaatcactattatctcttattaagaattatgtttataacttaatttgtcaataataattgtgttactttcaatcactgaatgttaatacattgattgggacaagggttcgttgaataaatattggctcaaagtattgctttaattttttattttattcttacctattgtttgataaataattttgcaagtggtgaacatggtagtagacttattgtgtgactgaggctaagctaagagggcattccatgaaattttggtttataccgacgagtatttctgttagtgttaattttttttagtcaattatagatagtaaatggttttag

SEQ ID NO: 235446 - DNA, 803 bp, Cannabis indica
aattctttctctgccggcgcctctgttctcccatcaatccacttttccggttccctacatttcatctcttattatcttatgttaactcttttcatttttcatttctctatttatatgtttttcccagaaattttactttatgtaaccgatcttaggttattgtaatttgtaagttgatttctcaaaatgttttctttcctgatgaatgatgagactgcttatttgttcttaaatctttatcaaatgtcacttacttcgttgttgaaaattttatgttttgcttcgaagattaagtaatcttttacttaaatgttatagcaaattgtgtttactagtttttgttagtttttcattatgtctttttttgtgtttttcatgacaggtgtagaatttcccataatgtcttggtgcacaattgaatctgatccaggtacgatgtttgtgcagtttatttactttttcttggtcttcataaatctttattatgttataatgaggtgaaatatgagggttcataggtttagcttaatggtactactcctctttgtttatgaggttccaagttcgaatcttcccgaaatatgacgattattatcataaagaccatgttggaatgttagagaacttggactctaaggaaaatgctatagaatgacaatctcatttactattaaacacaagaatgccttcctagaaccatatctatatttggtagaagttaacattttacttcttgatatttgctctacattagcttggagagagttctaatcatgttttagattattgggttttctagaacc

SEQ ID NO: 235447 - DNA, 697 bp, Cannabis indica
tgtcagggtcacatcatctcgcttagtctagttcacgcgaggtttatactcaagtggtctccttctgatagctcaacactcctcgaggagagtgagtccacatgtcatctttataagagtctggtctcaagtttctaggtgaaaaattcacactataacacatgctcctagtttcgcgattgacagttatgtcataagagaaactataagcgagaggcaggcgagagattgtcacaagatggtgacttttggttgtcttgtcgaggatttcaaaaagacggttgtaatcattacttttaatccatttgaggtgccacgtcatcaaaactcttttgagtccgtccaggcgtgattatgggcaaccgttagattatgagaccttaggcattcctttgccatgtgtcttcatcctaaaaaaggagggatattgaaatgttatcggtagttgcaattttggtttctctgcaacgaaggtggtgtgaattatcggtaattgtgattctaatttcttcgcaattagagggattgcagggtgggttgcgattctgatttctcagcagcaagagtggtgtgagttgcgatataggctacaattttggtttttatgcaaccaaagcaatgtaaggtgatgggtgccctagctacaattcaattttttttgcaaccaagacagtgtgagttgcaaggtatacgctac

SEQ ID NO: 235448 - DNA, 1335 bp, Cannabis indica
agtgacattgcaaaaagaaagaggaaaaagggaaaaagggaaaaaaaaaggcaaagccgagaaagcacgaactactctaagccctataggcgttattacgaaagataaaggcaattcctccaaggaaacgtagtaaaaagaaacaatcaagacacaaaaaagagggatttaacgcatcatacagcaaattctggcaaaattatacccagaagttcaacattcaacccagaaactgtaaacatgcaatacaaacgaacagtaagcaagtgtaaagtgtactgaaaacttacatgaagtttgaaggctgggggtttgtgttgatcgccggtaaagtgaagactgacaacgacgaaggaagagaagcaagtaatctatggtgcctgaaaatttttcctctctgtgaaagttctgagaaaatttggtgaaatggtgaaagtaaccaaatgaaatgggaaagctggcttttataggccaaaacgggtgtgagacagctgtgatcgaccatcatcaaacggtcagaatagcaatcgattcgcattctacagatccaacgattgggacaagcgttcatcaagacggtaaaaaatatttgagtactcgactgacaccccacttaatgcgccgtatcattaaatggataggaaacaaatcgttgtctgcaaaaagcaaataactgcactaatgatggtcataaatgaatccccacatgcccagggcacgtgcgaggaagttaataaggcaaccggaggcatctaaacaagccttgtttgctttttaccaaacaaggcttggggggtaaatgttgcccctgattttgtccaaaatacgtggaccaaccggactgtgacatgttgactgaagaagcaagactttgagataaatcgactacgtatccttaatcaaaaggatcaacagttaacacgcctcctatactctcggagagcaagactacagtgaggcatatccgagaggtatcaaatcctatctgaacagtcacctcgcatttaatgccgcatgggagaaggcgtattgaaactgccataagtattaaagtctgacggcgtaaccccccttctgcagctactacgctatgattaatgagcctagtgacggctactttatgagaaatcacatcagtcaagaaaggataatgggttacgtccattaaacccctaaaaagcctagggattagaccatgcatttcctatgatgtatccattgggaatgtgtgcatttgctgaatattacagaaagacatgtacctcagttctggggatcaccccccaaaaaacactataaataccccccgaactcattaaggcagggtcgagaatt

SEQ ID NO: 235449 - DNA, 1075 bp, Cannabis indica
atgtttttatttatttatttataataattattaagttttattatttataataatttgactaacactgtatttttctaattgcagaacaaaaaatctaaggtcatggaatcatcaacaattgacgatgagattattgagtgatgacgatatcattttattttgtttgagtttgttttggacaatcttaatagttttcagactttagatgattgatgactgtaatatttgatcttgaattatttgtaattttggatggatatgtttatgttagaactttcaatttttcttttaatttatatatgattttgataatattgaaatatgattttttttttttaattatgggataagggttataacccaacccaacccgcaaaagaaaaaattggttaggttataaaaaatttaggatgtgaatgggttgaaaatttctaggccgatgtcattggattgggtcattaaaatactctcaacccggccaacccaacccatgcttagtcctagttatcaggtaagtctctctctcttaagttgtttgtcacattgggaaaattgtgaaaaattagtttgggggagggacttattgtttgtttatattctattttctattttgagtgtttaattttcgagtttttattggtttagtgtattgttaattaagctgatggtataggatgaattaaaaattaaaccatgtgctaggattgactactctttggattaatttggttgcctcttggaaatagttgtgtgatcgtaaattttcaatatttggattgcatcatacatgttttactttggtttttggtaagaatggtttaataagaaaaaacttgcacgaattatttcttaaggtgaaagtcttgacaatgcttgtttggaatatgagttaggcaatttttttggatcatttgggccttttcgagcttacctttatctcttttatccctagtttttctgtttgagctttagcctgttcaattatttttaactactttatgaaattaatttttgaatctactcacatttttcccttgtcccttaaattataccataagcttagaaataagtttgg

SEQ ID NO: 235450 - DNA, 780 bp, Cannabis indica
ctcctacagtttatggaccaagtgcttccgcgcagccagctgcagagtagtacaaactgaatatagtactaatcccaaacaaacaaactaaaaagaaaaagctccagagtccagtgtaagccaatcatggagtaaaaggagttccaagggtccaagtcgaaataattctgtgaaaaaatgaaagactcaagagtcaagatactccgagtacacaagccttgttgatcctcgagagaatatttataaggcaacttgtaacatggcccattacaagaaacctccaccaatgtacaagggcaaaagataaaagagagatcctaacaagaagtgcaaatatcacggtgatatagggaacaccaccaatgagtgtgactacctgagggatgaaattgaaggatttgtccgaaatggtcatctatctaattgggtaaggataccagttatttatcctggatagggagttgcacatggccaactttttcttcctggacaatatggagccatgaatcctccttagggagtaggccatacacaaactcctaaaattcaagctctcaatgcataatccctttagggggtgcagaactctctagtagcaagacctattgtagctcatggtccaggaaatccattccctcctagagcagccctgctagcactagatggacacatataaactatttttggtggatcacacattgccaaaagcacccaaaattcaaaaaaaaaggtatttgaatgaattgaatcaagacggaacttgcaacttggtacaatcac

SEQ ID NO: 235451 - DNA, 1150 bp, Cannabis indica
atatagtttgttaatttataatcatctatgaccacattaaaagatcaattcgtttggactagctaggctagatgcgacctgtctcttataaaagaaatgatatatggataagcacttgtggaatatgagtcactaataagtttttttgtactatgattgcttgatgtaataatattttttttctcatctgatttaatttaattagtaattaaatttaaaaaaaaaatattattcaatccatatctaattaaacttaaaaatccaatctattccaattcaatctaattactaattaaattggaacaaggcaacaatcaatcatgtatgtttgtaaatatataaataagtataaaggcacgcgcacacagaaaaagatttatacataatattttttattttctttcaatgaatttatatataatagttgattttagaaacaataaataattttaatggtgttttataatgaatatatttatatatttattatcctccttaagaaagtccatcgaacacgagatctgatcttcgatctgtatctctttttatttttatgtgcccctttgttgaaaaatagctatatattccttcaaaatatataaaagtgtattagttatttttgtccctacgttttctatttcaggtacctacgttgtctatttcaggtgcctataaaagtttattttaattttaattaggatttttacatgtacaaattatactttctaaattttttagctgttcaaaatttttgaagctgtaaatttaagaaattttgtctaatttcattcaattttactattgcggtgatggtccatatatattatgtcatgctcagactttgatatttattaaatcatatctctcgaatttcgacatgtgtcaaatcaggctctccgaatattcatctatgctaaacttttcttactaaaataagacaaaaaaaaaaaattaaatccaacaattccaatagtttaggcataatttataacgttctttgaaattcaaaaagtataattttgtacatgttaaagtttggagataaaaaatctaattaacctatttttttatatgatattatatggaaaatttgaaattccatgcttaataaacccaaaaattggtcccttaaactaatactatgcataat

SEQ ID NO: 235452 - DNA, 878 bp, Cannabis indica
tttattttaaaatggaatagttattcagtaaaatggtggtaaagttaatccattggaatgatatatatatattcaatactttaaaaagcaaccaaacaaaacaatagaatgaaaattgttttatgtccattctattccatttgattacctctaaccaaataccactcttatgaaactaaaaaaaacataaataaaaataaacatgaagtgaaataataatataataaatattatgtgccattttatttatgttttccttttttttttaaaaaaaaaaaataagtaatgtttaattgatgtaataaatattttattttactaagttatgttaatatttaaattattactagtagttatagtaatcatgatatacttatatcataaattaattattttggcttattaatataaaaaattattataaccagtgagaagagttctgaattatgatgacaattcacactttcgcattcattctaggtttctttctttatcttgtatacccctaatatttatgtgtggttgtcttttatccttataaaattaacaaataaataaatatatatgtaattccatcgtctataaatacaatcacaactcatcgtattcgaagcacacctctataatttccaaatagtttatattctctcaaattaccctttcttttttcaaaatgggctgtgaaagtatgatgatcaaaacctctttcatgagtactagccttacacaatctccattctctaataaaaatatggacagggtaggaaccaaaacctttaaatccactgttaggtcttcaaaaactagttcattaatagtgaaaagacactataatgataagaaaaccgtaacaattaatggtaatggtaatagtaata

SEQ ID NO: 235453 - DNA, 1173 bp, Cannabis indica
taagacagaatcagaatcaaataatcagaacccaactcaccaggctatacgttaacctggttgctgagtgctccttagcggacttcttggggctcattttgatacttttatggaatttaagattgtgatgaggtctcttaccctatttttgaccaaaataaaaagaataccctagagtagaatttgtgtttaagaaggagaaaacatgaatactaggttatacatcaacctatgcgcagggcgcagcacttatgtcaacttaggcactgacgctctattttggctccctaagaatctcctttgctccctaaggtcacttgtattttcagttttttaaaacggtaaagattcttcgagcaactttttttataaaacacttggaactggcccaggttgataaaatatcaacttgggtgctgggtcccagtttttcccactagatgctttcgagtgattcctagaaatacttgtatcacagttattggtgaaaagaagaatatgcctagaagacttctcaagaaaatgtttagaaatggcttaggttgacaatatgtcaacttgggcgttgggcccagcactaggtcaacgtggtgtaaggtcgcagttatgactcccagaaggcttcgtttgtttctcaaaagcacccatatgttaattattgatgaaaacagtgaatattcttggaagactttgcttgaacttattacttttatggtattaaatcaggtccgtagcgggataaaagtttctgattactatcgtaccatatcctcaggatcaccatatatattatatctaaaataaaatagacaaaaaaattaatttacctcttgaagcctatcgatgtattctcgagtctttttgtatgttgtaccctcagttgatctcgaaatactcacaccatagttttctgaatcttctaccacacacaaggactattttgggctagtatgataaagtgtatacaaagttcttattaaaatacatgagcaagaactattctgtagtaatgatggagagaaaagattaatcagattaatcatttttaggtttacccaaaaataatatgtattagcttttggtttgtacaatatattcaaataaaaatcaataaagattttatttaattaaatatttaaattaaaattatttattaaatcatatttcataatt

SEQ ID NO: 235454 - DNA, 1139 bp, Cannabis indica
ccattcacaagccggcctcgcttgaaaaactagctgagcaaggtcgtatttcctaccacgctaggtcgagacactgctttcattcttcctctatcaaaaaccaagcagctgtcggttgttccctccaatttttggtgactgaaccagtgagtaaatgcccaaatattctttggccattccttgtcaacaatccagtagaagcataatccttagcacctagatgggagcataaaatagccagtcccacaatggtgagttgagtcattcatggcaagctttgattcatgcttttgtttggtgtattcacgccctctatcaaaaatctacacaaaaaatttgagtattttcgtcttccatatccaatcgctcagaccaaattgtccccatgaacaagaaatgcttgattttcctttgtcaaaggtaaagccttctcgagttctcttctgtctgaattgaataaggatactatgcggtagcaattttatcgctacttttaaaacagaagcccaggaaaaagtttgaaaaacattcatccgccatgaatgaagggaggaagaaggtatatcattgtaaatgaagaaacatagttgtggggaagagatcacgtgggattgctcattcattagcacctgttttcttttgtaatgtccaggccaaaataaaacatctaaatgggctttactagggtcccattggatcagcccatgagtcatcaagtatttcttgtttgagtgggcccacactaaaaagaaattaaatggaatgggctcgaatcttacctgatattgatattggtaagattttaatgctccaagaattaattgatccattattttattagtattgttgtgggcttgatctgaatagtaactccaagaattgggcctgccttcatagggttggaagatcatgtttgtcaatcgtatacttttggttcgtcttctccacttcgccatctgcgattgctcaaccccaggggcgctatgtttggtaatcggccggctcaactcttcattgatcaacaccggcaatgtcctcggtaccagtggcgacttcttctcttctcccgtcaacacccacgccggcaaaagatcgttctccgacgacactttcttctcagacgactccaacaacggacg

SEQ ID NO: 235455 - DNA, 705 bp, Cannabis indica
ataaatgaagaatcaaaaccaagcagaaactttcaactttaccagtacaagaagaaaaatgatgagataaaggatgtatcaaaattgaaggacgaaaaagctgaatctagagttccctcttttggagtggttaaaacatccacttttaaggactcaggccatgccgaggcctagctagtgctgcaatcatgaaagcttattagtcatgttaaattaatgttttatttccaatccaataaggcagtatatctatgtatgtcttactgctgagctgaaataataaaaatatatatcatatatgttttctttaattatactaccattatttccatcatttttaagaaaatattttgtggtaattaatgactatgaaaatcaattaataatctaaagcgtgtgttttttcacggcatttaactaattcccacaacagtttttaggaaatcactcttttagagccatcattagggcttggagtaacattagtcaattttaaaagaaatatatgagaaatgctaaagggcacatggtgtctagcactctcctatgtgttaatatcgctattagtccaactaagtaacggattccatatagtttaatataataacttttagggagtatccctaaccaatcacaacgcgacatgctgagaaaatgctagacaccactaatgcctaataagaatgctcatatatatatatatat

SEQ ID NO: 235456 - DNA, 1719 bp, Cannabis indica
gtcagctcagccaccttcttctcacagcaagaagcttcttgttaacctctcccagttccatccggacagccccaagctgaaccctagcttcatcagcatccttcctggccaagtccacttccgcccgcatggtgttggaaatggcagcattcttagaggcagtcgacttagctcgggaataagcataagccatcttcataccgatctgcatagagaaataatatttaaatctgaactaagtgaagaaggacaaaaggaaatcgtcaggaaagacttaccctcataaactccttcaggactcctcccatcaccagctccagagaaaggtcattgtctgccccagccagctgctcattcaccttagggaccgaccgagtcatgtagtgggtgagcatgtctttgcctcttttagtctttgggtgcagcaccggacgtggggcaggggcgttgatctgctcagatcaacttctaaccagctcggatccgcccttcaactgctctggcttgtccgagctacaccctcgagagtctttggacttagtcatttttgggacagcagctccacaacagtttgttcctcggagaggtcgatgaccatttcagctggtgctttctccctggacggggttgtctcaccgcccctagacttcttagccggaggagataagcccgagcttcctcccactctcttcttcagagcttcgagcattttctgagacatgtctgcatgaaataaaagcaacatggttaggaaaaagcatgagaaatatgaaagcataataatcaagaaggttaaaagcaagatggagtatcctacactttggcagaagcatctgcatgagcaaaacctgatggggcatcatcatccgacgagtcttcttgctcctccaggacggctttctcctttcctactacaagagtggatggccgagcaggtagaatgggctccctgatctgaattgtatgttcgatgggcctgtacttgaccaaaatattctttttccttttgagcggtgtctcctgctcttcctcagcctcatcctcctactcagaatgctcctgagcatactgcttggctcccgcacctcccttcaatttagcctcacgctttagttgaatggcttcattctcctgatgagctccctcaacccgaccagcactggacttcctcttcttctccttcacaggttgaggaacaaaatctgatggataaagcccatactccacaaagtttgcctccgaggtcaacaaagtgatattctgggcatcatccggcagctgagcgatcctttcagctctgtccctaagagctagcgtgaagggtggacggtaatatatagtgatctgctggaaccaagtataggtggtgcccatgccttctaccatgtaatacttgtcaacaaaattcccaattttgctcacggccttatccacggtgtctgtcaaccacttgaagtcaggctgggaaaagtagaagtgccctgacctaccttgcttgggggtagactttaggtcaaaaaactaattgacctcgtgtggggaaggcatgccccacttctggatggcgtagaggacaaacagggcgaacaaatacttaatgcccttgggagtaaactgggtcggacaaaggcggaagaaatctgccaccttcttgaagtatgggtgtagaggcagcattgccccttgtttagtatgggcacccgacaaggcacacaggga

SEQ ID NO: 235457 - DNA, 646 bp, Cannabis indica
attaccttgggatgctctttcactagcttcttgaggggtggtgttctgaagatacagtgcccgagccacgcgatcctgaactttctccttgtcagggacaggaacctactgcaaagaataatacttgggacacttgtaatcacaagtaaattccttgtcattcaggaggtccacagaccttagattgacttcgcttagaagaaaatcgcatgacctaagaccgtagggaagagttaacaaaagcctgtgtcgctcgtctatctcaggagtggggacaggtcttgttgaggcagctagaaaaaaaaacaaattttagtcagataaattagaataaaaagacacagattaatttaccaagtctaatgcgagcaatcacttacgaattatacagaaagtggttgtgccaattggggagaggccagttgtctagaagaagttatccttgaaggatgttttgtttggaaaaatccacaatgattttgggcttgccggagttaatgaaagcctcctacggaattcttcctcgctagacgactttgacagagtaaaggtactctatttccacgggagtggggcactcccaatttataattttgtacagaaccctcaaaattgcgaagattctataggagacgggattcagttg

SEQ ID NO: 235458 - DNA, 787 bp, Cannabis indica
caattaatatatatttacattattaatagtagtaagtagaaaatgattaagagtctacttctaaataactctaatagtatctaaaagctacataacatgtccaaaataatcacacctctaatctattacatgtggggaaaataatccacatgataagaaatgtatatcctagataatgagcttgtgttattgaggatgatataatggctaaaaatggaaaattctcacatattgcttcaagtgagattattaagttaatgtttgattatttgatctgcttcatgtatattccattttctagagtggcttgcttttcgtaatgatggaaaatatagtgagcagactataccaaatatgcaagtgaaagtgttaagcaaagctattctggaatcaaagagtaactcacactcaactatggtaaatttacctcgggatcataagaagatgaagatttaagaaatgggtacccatttcatttataaaatgaacaatgtaatttgaatgttgctaatgattgagtgcattacaaaatctgcttataatttttaatacatttgataacattttgcttaccaaatacactaatatacaattatttttataaaagggtgtatatacattagtaccctatgttttatctaaatacaagtttagtgccttgtatttttaataatacttatttggtaccatgtcttttaaagcatatctatttagtactctaaacacaatttttttttataaaattttatcaatacaattaaactgtcttcaattttataaattctat

SEQ ID NO: 235459 - DNA, 1825 bp, Cannabis indica
tatatatatatgataatatttgacattcatacccaataaaaaaataattaaaaaaaagatatgacttaaaaaattagggtcctaaaaatttagaaatatagaggatatgtattttggttacttggatgatagtgttgatttttagttacttgcatcctaagtacacgatacttaattacgcgtttttattccctttctaataagactttagaaaacggcacaagtgggaccacatgactattaataatatagcttttggtgttagattgtgagtaatgagaggacaacgatgcatgagaaagaaaaaacacacaaggactagtgaacatgatgaagtttgtggcttgtggggtcattcataactttgagtctgatgttgatatattacttactaaaagggaatcagacccaagtggttattctgaggccatgactgttttccagtcttccaggtataattaatcttttatggtctgtattctatcttcagttaaggcttttacatagatattttttattttttgtagttcctgttgaaaaaatttggagttggttgtgtggtttttcctggaaaaatcataaaatttgaagatagggtgttacagataaccacttaagttttccaaatgatccttttgttttatgcatggcttgttagatcgataatttcctcatggagattggacagaggaaaggtaaccaagcttgaaataacaaattcaaatataggacgtaatgacagtgtgtttggtaagagggtgaagtgggagaaaggagagaaatgaggtgattatagtcaagctcaagtgttagtattgtacaattgaaaatggctcccttctctcaactacttcctcctaccaaacaacacaagactgccttttcaattcttctctcaacgctaactattgtggcgctctccggtcaatagcctcatctacgtcgtcgtttcatctccgccattgccacacactgatcagtaagttatttagttacctcacaaaactcattttcacgatattttaaccatacgaaagagtataaatgttgaatttttgtggttgattatgtgtattaaggagcttttgaagcaatcgcactcaagttgaattttcgtggttgattaagtatattaaaatttcgattaaaatatatgttcttttttttggcacaatccaggtgtgaaaaagcataaattatggaacagacactagacctcgtactggggaaagttttatcatttgttgggaatgaattgtttttgttgagtggggttcaagctgagctcgacaaaatcaagaatgagctggaatatatgcaatctcttatcattgatacaaagggcaagagaggtcttagtgatctggaaaagacagtggtgagaaaattcaaggaaaaagctgatgatatagtagattttattgaagagtacacctacttttcaaacaagaatcgaaactcgaatgaattctacacatccattatttgtttcccaaatgcgctaatcagaaagcatcaactcgctactaagttacatcacataaggaggtcaatcagagagatgagagagacaagtaaccaatattatgccattgatcgtcatcatcatcatcatcatcaacaacaatgcaacaagtctgatgagtatgacactgaatgggcaatgaaaaaaagcataggggaattggctctttttgagagtgacaaaaatcttgttgggattgaagattccagaatgagtgatggaattattgctgggtgaaagtaaaagatttaactgtatttctgtctggaatgggggtcggtaaggcaagctagtgcagtc

SEQ ID NO: 235460 - DNA, 695 bp, Cannabis indica
aacattaaatgttatttctgatctttattaataagtaaatttgatcatatgagatgagttttatttagggcatgaaacccaacacgcacccctaaactttgggggatacaacgaggctggggagccagtagatgcggacggtgatgtcttggtaaaggtcgtggacttcgtcactgaggaacttactactgtagttcctcacaggaggcaaggtgcctttggtgccaagtgggtgagccctctgtccaaggtcattgaggcaagcctatgggacctggaccagttcgattatttgggcgagctggactgttatgttccttcctcaaacaaccaagccacaaaccctaagagggggatgtgtgcctggtcgagtgctcattccaaacaagggccactgctacctttgtacctgtattttaggaaggtggcagacttttttcgtctctatccgacctaattcactcccaagggcatcaagtatctatttgccctgttcgctctctgtgccacccagaagtggggtatgccttctcctcacgaggttagctagttttttttgaattaaagtctactcccaagcaaggaaggtcgtgatacttttatttttcccagccaaacttcaagtggttgacgtgcaccggggacaagcccgttagcaaaattgggaattttgttgacgagtattacatggtgga

SEQ ID NO: 235461 - DNA, 891 bp, Cannabis indica
gtgtaaatttccctttctttttaggggccgtttggtatgcaagtttcatttcatgggaataggtttagcattacttggaaagggatgaagggaattataaaattaggaaagcaacattaccgtgtttggttgtgcgcagtaatattatgatcatgcctgggaatatgaaaattactttgtttggtattaacataggaatagaatgtgacaatttttttttttacaataatgagtattttttttttgtaaaatattaataacttaaatattttttttttaaaatgttcaaaataatttttatttattatttttcatataattttataaaaaaattaacaaaaataaataattataaagagtaaaatatatatctatatatatatatatatatataggaatttcaatcaggacgggtctggcacaactcgacattgacccagcccgacacgatatcttttggcacgatctggcccaaagcgaccatttctttcagcctggcgagtcaagcgcgaccctgaaatcgatattgtcctaatgttgtgcatatatttttttaaaaaaatattaaaggctacatatatctcctttacccaaaaaaaaacataattgtctaataatgaccgacacaactattattgggccgggccggatcaggtcaatgacccgaataaagcccaattgtcatgggccaaagacctattcctgagtactttccttcaaaaaaaaaaagaaaaaaaactattatgaatgcaagacaatggtcaatgttttattattagaatattaatatttcaaaactgtcctcttttatcattgtcagctcttcattgtcatatttcaatatatactagtttttaaacgtgcgttacacgagtgtgatatgtataatta

SEQ ID NO: 235462 - DNA, 649 bp, Cannabis indica
tgctgaaaccatagttgtagttgttgaatctaggaggcacaacaggagatggatagttggaacgcccataagcaccaaagccagtgtttcttacctgagaaatatttgcctcagctttataaatgtcaaggttcttgacatttttctccattcgaatcgattgagccatcagcaaggcttcaatttttgccacagtgtagagatattttttggtggtaacaaatgtgacaaaaacctcatactcgtcgagtaagccatttaatatggcttctatgtgatcatgagtagttgtcgatgaccaatcgtagcaagacgatccactaaacctttgatcttgagcaggtaatcacatagagaccctgtcattttggtgtttcgaagctaagtcttgcaaagacttatgttagcagcattcaaagccatgcagtactttcttaattgttcccagatttgtgcagtggtctcatgctcgatcatttaattcctggttttctcagacatggacgagagaagccaagaaacaagaagattatcttgttgttcccattcttcatattcaagattgataatgttgattctttgatccacaacagttagaaacatgggtcgagctcgagtaggatcaagaaatttttaaagtctgctgcct

SEQ ID NO: 235463 - DNA, 954 bp, Cannabis indica
  modified_base (767)..(767): a, c, t, g, unknown or other
  modified_base (796)..(796): a, c, t, g, unknown or other
aatatatatagtaaaattatatacatggtatgatacaattatgacaactctattttagtttaatttgggggctttttatatataattataaaatttttttgagtggatttctaaccgtgagtgtatttgtatgattatatatctatctctaacatgtcaaatatacataagctttagaaattgaaggggggccacagcccctgttggggtatatgtggcttcgcccctgaaccttggacaggtttggatattgcaactactatttgtcccacatcgttgtgaatcacagctccaacatccaacactatagtttcataattaacaacaacatctacattcatctttaaacaattagcatcatgtggctttcatgggacaccctctaccagttgaatactacaaccagggattacaagtagctttgcatatttatgttgctttcttgtaggcttagtaatctcctagtgacatcattttactcaaatacagttattaaaataatttattgcataagaagcaataaaagactcatcatgtcgagaccctttatggaacactttgttcctctcagtccatataatccacataatacatataaaaagttatagattaactttggataataaagatgggaggtgaattaaataatctccattaagcatatgtcgagcatatagtagtaaatatgtgtgtgtcatgccggcttggcccatattttgaaaaagtccacaataatatggatcgtgtcataccgacctatgaaaagntaatggggtgtgcagtgttgtgctaaatnttttaaaagagtagtaagcccgacacgcccgtaaagcccatattttcgtgtcgtactcggggcaaaccccatttttttataaaatgagtcagcctattttcttatatggctcaaactcgggcttcgctttttcattattttttttacattaatgagtt

SEQ ID NO: 235464 - DNA, 1338 bp, Cannabis indica
tatctatggactcttcaattcaactactttgaatgatcaaaacacttatcatgtatagctgtttatgcaattaacaaatcaattgaaagccaattcaacaaataattgaacacaaagagttatttgtatatgcatgtacacataaagtaaaatttcacatagtattatacaaaaatgagatataaaacacaatttagtattaatactatacaatacaatacgaactaattcaattcagcttactaaacgaacccaaaatttcatcttttgataacaaaaacataactcccaccaatgattatctcataattcaagatctatgtcaatttgagcccaagtttggatccaaaatcataaaattccaaattcttatcttaattctaagagaaaaaaacaatatttttatttcttcagccaccataaaagccatcatggtctccaactccaaacttctttatttctatttttgctaaaatcctttcaacttaaaaaaatatgggttttatatatcaactgaaataactggatgtaattcaacatatcattaaatttattcacacattaaaaaaacaaaaataaagtttcaaactttaattgagaaatgaaaacatgagagtaaaacagaaaaccccagatgagaaaaatggttaataaagctgtaaatcgattagtattaaagtaaaaatcaaactaaatccattaaaaagaaaaaagttgcagaatattaaagagtgagttagtgagtgagtgagcgagttaggtgtacttacgagtcaaagcagatttgaatctgaataattaagaagtgtagaaagaaaatggaaacagagaaaacttgcaggaaaaaatgaaataatgaactcgaatgatccaaaaactcatatctagcgttgtcttttatatgattactccaataatttattaataataataattattaaggtaagaagtcaagagttgggtaaacaaagcacaatttcattatgtgacacgtgtcaaaatgtcggccatgacagtgtattggtatggttatataactgttttttctattatcttagaatataataatattgtggaaagtggaaacccaagtaaatcagatttggtcaattttttttaataaaaatatattttagatataagaatatttccagctaaatcttcttctttcacatatattttaatgtaagaaatcttattcattctgggaaaaaaatgaggcattaaattattattcctcttattttttgttagagtcttacatttggacctattttgccttataattgagcttaataatatacatgaattattacacaaaaatatgacaaattgaca

SEQ ID NO: 235465 - DNA, 2998 bp, Cannabis indica
tataagtaaaatattttaacaataaaatatttaaacgatataatattatgtaaaaatttaaagcaaaatagataaaatatattttaaagaataaaagaaaattatagcatttgaagtcttttggtagatttacctctttaagagttttagaattgtatacataatatttttgagttgaggttataaagctaacaacttatttattctatccttcacatataataattcaccaattttttttctattttaacatacatcaatttcttttgtggtatcaccacctgaattggcactcttaaattaattccttccaatccctattttgaattgttaaatgttacatcttaaatgcttaagatctaaaaatttaaaattgttaaatattaaaattttagtgttttttttctttgaagccaaaatttttagtgtttaatgtccaaaatttcagtgttgttaatgttaaatacaaagtttcaattttttttcttgtcaaaaagaaaaaatataaagaatagatttttcagctttggttacttaagaatgaaggtataaataattaaatcaacaggaataattctcaactttaattgcttttttctttcttctacttttaattaaaccttttaatgtaatcaaaaatcgtgactgtacatatcataataaattaaaattctacaaatgtcgagctaaataagacaagaaaaaactttgttgttattcctcatatatctttacaaaagctaaaaaggtttcatctttagcacgaaaatcgagcaaaaatcatattaaactcgagaagtaatcaagatttgaattcatccatcatttaaattgacaagactacaaatgtaacatcctttcttcagtaaaatgtactgtaattctttctttctgttctagactagagtaaaaactctaattctctacctcgttaaactactctatattgcactgtaatgagtgcaaatctacagaagttatgggcacctttatacatgtaaaagctaaaattactcaaaagaaaattaatctgcaatctgcaaaagtactacaacaaatgtaatgcaattacattacattccttgttttactttttcgtttctgtggttttcatgaaaatgaagcatgatcttgctcctctatcttcatgacaagaccctttaggatcatccactttattctgtgtattgtgcagattggagattgtgagatcaagatcaaaggtgaaataaactttgatccaaatgtaacagcaacaacaacagcaacaagaagatgttatggtctaaaatcctctgaaaaatttaccacctctctttcctatgttagctccaatgacacttgatgcaagaagagatttggtgtcaggtctccatttgagctctttaagcatggagaataggctagacaatgcaggagagatttcctcatccttaatgtttttgcagcctaccactttgagactcacaatctccttccatgaaaggatcactgactctagaccatttgtcgttagcaatgagcatccttctaaagacaggatattcaccctcctgtaatgacacaaacacctcacctcattattatactgaaaaaggtcataatccctgcatattatatttaaaatgattaaaaagctgttatgttaaatggttggtgagtactattgagtgtatttcttacacctttcacatggatctaatcataataagaccattgggaccttgcaataaagcaaaatgaagatgattgaataatcatataattattttagcgtcgttttcgccaataaaatagtcaatctctagaaatccacctaatgaattaaaagcaagcaaagcaagataaaccctttacctgcaaatgcttgccaaaatgaacacatcattctccaatccccaacagtcctggaagacaatctccctaacagccccacataaggtgaacaaatcactagctgtcttcttgtcccttagctgacacttgtgaaaatgcaaacgctcaagagctggacataaaccaaaattctcatctgtttccagactagaatcaatctttttacaagacacaaacttcaaagtcttcaaattctcacaatatggaagtgcagataaccacccagcttccatcctatgatcacaaatgatcaattcctccaacatttgacagcattgcccaattgctttcatcccaacaaagcttccctcacaaccattgagctcaagcttaactagtcttctacacccttgagccaaaaatgtcagcccaatatccgaaaccaccgaactataaaacccatttaaattgccaaccagcttgagtatttgcaaattcttacaagcagatataacatgtaagaggttgtcattgcacttgtgcaattccagatcttgcaaagtcgagcattcttcagctaaactcagcagacccagttcagtagcaccaacaagtgccactttgccaagattagggcaaccgtttgctaattcccgaagccctctatcaataacctcaggtgaaagcaaatgggtttgaaaagcttcggattccggcgaaaaatgagaaccgatgtgcaccgaaaacattttgtggttcaacaaaatgtccgaattccgagtcgaaatcagagacccagaaagcaaatcgacctgaatcaggtttgggaacctagtcgttaacctaccggactggataaagccccaatccaaaaccttgagagaccgtaccagacgaccttgcagaaagagccatcttttacagaccagcgaattggcgtcgcgttgggagtcgggcagcttggctaggattctgagaaggatttcgtcggaaaagaggagggttcggtcgaagtcagagaaactgggggttcggctattggttttgggggtttttggggaagagacggactggagtttcatggcggagactgttacaatatttttcttcttgtgtggaccatcgtaattattggagaactttacagatatacacgtaattt

SEQ ID NO: 235466 - DNA, 919 bp, Cannabis indica
gatcaaagccatagcagaattggaataccttttttgtctactaataattcttttcaagataatatgctatcttcatcagcaaatatagtttcattccagcacaaaaaagtaactatattctgttttatttgctatttattctatgttttgtttatctaacttatttttaaataattatttcaataataattatatttaaaactattaattgcaggttataccatacacttataattttgatagttatgaagatatgaatgaaacaacgagtatggttgaactattacagcaagtatgtaattatatataaatatatatatatatttatatgtagtgtttatttttaattttattaaacttgaaaatttatttagtataattttgtttttgcaggctatatcaactcctaccacatttaaaagatttactagcaacaatttttaatattatgctatgggcaatcatttttaaaaagccacagtggtgtaattttttttttttttttttttgtaaggaaccacagtagtgaattgagtctttgcattttgagacattaaatttctaaattattaaattatgaagtttttagcataaataaattttgttgctttatagtcaccattttcttttattgaattcacaaactcttttttttatcaaattttgtggctgtggaaacaagtaatataacgaaggtataatctcattccttgtaactttttgactaaggtatacatggtatagagtaatatagtattgtactcaatagtggtaaggtcaaactcatgatatagtggtgaaagaaagaaaactatcattttatgatagtctaatgcagctagtaggattggatgtatgtagatataagagagattgaagaatatatttaacagtacagttaataggattgtaaagtctg

SEQ ID NO: 235467 - DNA, 578 bp, Cannabis indica
ggtaaagcaggaggctttctcgccatagattcgcgcgacatcgaacccgtctcttctctcgcccgagctagcttcaatcttcccagttcgctcttcgaagaacttgatggccacaaatcgtacggttatagaacccttgacattctagtctcactatcttcgaaacccacaaaaatcctccctcctacggttctcgatcctccaaattaaagtcgtggatcgatagtagtacagctcggagcccaagaacgatcagaatagtcgaaaccacggctcaggttcatccccaactccttgtgaggacattgatttcgaaagcggcggagacttacgacgttgagattgtgattgggaaggtagaacgagttgagttggagaaggaaggaggacaagttacctcagtcgttcttgaaggtggaagtgtgattgagtcgaacgtcgttattttggcactcaggccatggagtgggaagtttgagcttctgtcttgtttgtttagggtttctggtttatggggagcacaagcgaatttctgggggtggtattggtagaagaagaagaagaagagagagagaaga

SEQ ID NO: 235468 - DNA, 2090 bp, Cannabis indica
aggattttgatcttccttacaccctgctctcgagctactttcaacgctagcagaatggccaataattccccttcaagaatccccgagaccgtgtggaactcagaagccacccaggaatcacccacatttggttcaaccacttccacagccgccacaccagcagcatcatcaagaatagaagcatcacagtgaaagcactgcatttcatccaggttctccacaaccgggacatggaaataaactcgatcagccacttccagaggaacatctctcaactccatctccttaactctttttcgaatgtcctttatcaatcccgttaaagagaatgtgctacctttaaaaattaccttattcctccaatgccataccgtttcacagaggcaagcagcaaacaattgaaggtcctcatcgctcacttgagaccaccattctccaaagtccataattgtttcccattgaaaatcttccaaacgaatgccccatcgactttgaaaccaagccgcacgaaccacactgcaggaaccaaagagatgaagagcagattctgaagccacatgacagagtgaacaagtgttatcaaccaatcctaaacgttgtttcgaaagcagaacatcggaccatgttttccaaagaaaaagctttaatctttgatgaatcttagaccgccaaagcttttcccaaacgcgattaggattcttgaatctactgtgttgacttaaccaatacccgcttttgacagtatacacccctgactttgatcctttccaaaaaatgatgtcttcactagtctccaaaggcctgattcgcaaaatggacattgcaacttcttcattgaaactttcccttatcaattcttcattccacactctagagccttccatgaaaagatccgagaccctaataaaagcatgtcttctagagtaatggaaactatctcgaacctcctccatagatttcccagggacccacggtctgtcccacaggtctgactccccaccgccaatcagaacaccagccctagcaatacatatctgtctagcctctataattcccagccaagctctcgaatcaccagctcttttctccactctccaagcatccgcaacctgacaatatctagcctccatcaacttaacccaagccttatctatgcccgtaagaaccatccaacaaagcttggccaacatagccttattaatatcactaaatcttctcaaacccaatccaccacaacgcttgggttggcaaatctcctgccaacttttaaaagctctgtatctatccttagccgaattccccacccaccagaaacgagcaacaatcctatccaactcttcacatagagttttagggaccaaggctgtagacataaaataccccggaatactctgaaggaccgaggcaaccaaggtcgttctacccgcctgagacaaattttttgctctccatccttccaaccgagacatcattttctctttaagaaaattgaaatcctttctcttgttagcagagaagaagaaaggattactcaagtacttctcgtccctccgaaggcagttcataccgatcatgttcttcaactcatccttgcacctttgagaggtattaggagaaaaaaccactccactcttttgtttgttcaccttttggccagaccaatcttcgtattgagagatacattgcataagagcattcgcattcgagccattcgccttacagaaaaatattgcatcatcggcataaaaaagatgtgtaatcggcgttgcaatccgagacacttttaccccgttcagctccccattattctcggctctaaggattaacttcgataagacctcgctacacaggatgaaaagaaacggagatagcgggtccccttgtcggagaccccgtttaggattgaagggagtcaaaggggccccattaaggagcaccgaataagtgaccgaagtcacacaagtcatgatgatagagcaaacatgatcgctgaatccattagctttcaaaacccgaaggaggaaggtccattccaagcggtcatacactttactcatatcagttttcatcgccatcaccccatgttttcc

SEQ ID NO: 235469 - DNA, 832 bp, Cannabis indica
ctcccccaaacacagatggtgatgcatcaactttagtttgcaagttgcataaatcgatctacggcttgaagcaatcttcgaggcagtggtacaccaagctttcagatgctcttatcatggaaggatttcaacaatctcaagccgactataccctattcactaaagggacaggacctacattcattgcactattagtttatgtcgacgacatcatcatagcaggtcccaaccttgctctattgcaccaattacaagctgcacttcacaaacaattcaaattaaaggccctgggaccagttaaatactttcttggtttcgaaatcgcacgctctactgaaggtattttcttatctcaaagaaaatacactttacaactcctcactgatacaggttttacgggtagcaaacctgctaaaaccccaatggatccaaggactaagctcactgacaatgaaggcacacctctagacgatccttctgcctatcgtcaactgattggccgtttgttatatctcaccctttccaggcctgatatcacatatactgttaatgccctgagccaatttatgtcagcaccccgcactcctcacatgcaagccgttcatcacttacttcggtatctaaaaaggtgccccggacaaggtttattatacagttccacttcatccttacaccttcgaggattctcagactcggactgggcttcttgtcctacaacacgacgatcaacatcaggtttttgcctcttcataggagactgtttaatctcctggaaaaccaagaaacaaacaacaatctctcgcagttctgctgaagcagagtacagagcact

SEQ ID NO: 235470 - DNA, 1307 bp, Cannabis indica
gcagacttgacatgattctccccggctctatggttgtcccatgtaagtttgtctccattaataggcatgttaatgagccccctagagttaaccaaatttgcgatgaacgggataaaagggtccctaccatttgagccaactctttccgactcattcagaacaaagttagtatcacccagaatgagccacggaccaccaaacctatctccaaccttcatgaactcagcccaaaatgatctcttggcattacaatatggagggccatatacacaagacagcagccaagggttggtcggaggatccgaatagacaagaacaataatatggttttgggagcaggcaatacattcaaactcaaaccctaacttccaagccaaaatgatccctcccgcattaccaacagctgaaataagtatatgaaaatataaatgaagcgaagtgagtgtacataccagaggagtggccttaactttgagttcggtcaggaaaagaacatccggtgaacgagaccggatcagggacttcagctcccgaactgtagaggtctgccctaaccctctacagttccaagcaatacctctcatggctcatgtggaggagatataacattctcctccacaagggtatgagagtaagccgaagcaggagagctagcatcatcaatgaaaaaagtgccaaccatctgacgatccacgatatcatctctaccatttggactaccctcactcgggttaacagaacacccgatagagttggaattgtcattgaagggttcatctaacgccactttggaatcacaaaattggttacttttgtcccatggaaaatcacgaacgactccggggtgttggcaaagtaacttgagaggtctcgagcaaaacgaagcagatgcaccatcaaattttcttttcttaataggtgtggttctctcatttgtttcagaagtgggtttgaccccaatgtcaccaccaatctttcttatctcatataaatccaagctaccaaaatgttttagctcttgcaacaaagtctctaggccttggaaaaaattggataaggccatgtcttcatcaagtaagaggtcggcctcttgcccacaaactgagctatcccttgaattaatagccacatttttatccttctttaacaaattctgtctagcattcttgcacggcccattcgacttgaaggagcccaaagcacttatcttggatacacgactctctttatatggcccactgactaacttcttgaaacgtggccgaaataaaggagaatgattagggatattaggagcatcaacatta

SEQ ID NO: 235471 - DNA, 1019 bp, Cannabis indica
gctcatcgcagtaagtgcttgcatcaccctgtaacgtgcgaacctgggcatcaaacctactgtaacgtttcgaattcaagctcgcctgggaattataattttgggtattgttggaatcagacgaatcggattcaagatcatcggagaggattgcatccttaccttgagcaataatctgagccgtccctttcaaaacggtgttcccaagctcatcaatggcgtgaccaaccgttcccaaagatccatgagccacctcgatctccttcttcagacccgaactgaactcctgcaaatcccgccggtaggtttcaatgacagattcggatttagtcgctagagtttggatcaaaccgccaaagctccatacaccaccaccaccgacggaagaaccggaatggtgggagtcgggaatcggatctgggtcttcacgttcttgatcgttggatgattttttgggagacccggatgtggattcgggttgaggaggatctgggctttcggaaaaaacggtcttgaagaaattcatggacgatctttgatgtgttttccgggtttgagaagatcggaaaaataaaaatgaagaaaaaagcaaatgaaaactttccctttcagaaaatgtcgtttttagaatcctaacacagtcggtggggagtacgcatcagtcagatgaaagaacaatatggtccttttgccttttgcgtcgttttgtttgcctgctctgccgaaacgacgtttgctcattgaaacgacaactccgtaaccaagccatttttttttttaagttagtgattaaaattactcgaatttacgatgcagatattcgcaaacagcatataaatcaccttgaacctagatagttcatcgtttaactaaaaagcatgctttgtcaaactctgttaaagttggcaagcaatatgagacaaatctgcctctaaaaaattagataagaaagttataacgtactcaaatagcaaaatgcacacccgaagagttagatagcttgtttcactgaatgctac

SEQ ID NO: 235472 - DNA, 1705 bp, Cannabis indica
ttatgcttacatttggttaaaaaaaaacccataaacaaataataactaatatttgtaggatatgacaactttttatgatatccctaaaataccccccatttacatcacccccatttacacaatcggaccccttcatcggaccccacatcagacacaatcagaggacccatcggaccaatcagacccccatcagaccctatatctgacctattggacctacgtctcctacctcgcaaactcacagtttcattcaaccctatcggaccccatcggacctacatcggaccccatcggaccttgtccaaaatcacagatttgagattcttaaatctaaatctatccctaaatctaacaaaatctatctttaacattaaaattacaaacaaaataataataaaaaaaaaacggtggtggtgctttggtggtggtgcgtcgtgggtatcgtgggtcggtgggggagcgccatgggctggcgggtctcctacgtgcgtgtgtggccgacgtttggggcgatttggggtttcgactggggttgggacgactgggttgggacgaacagagagaataaagggaaggagagagaatggatgtggaattttgagaggagtagttttgggatttaagtaaagtgagcctattctaacaattacctatagtttaagttttcctaaccaattaactcttaaatcatgcataagaaatcaaattttccttttaaaaatacaaagtccgaacgggtaatacatcaaaggctctgaaaaagattctttttccttttcattcacgtgcctatcctactgaattcgacttatatcatacaaatattttgagtattgctaggaagtactcatggtatttagcacaacaataaagtgttgcctcataattagtgagtattttttataatatttattaaaataaaataagtaggagctaatattgaactatactaatagcaatattacaccttctaataatgctaagtactacgagtaccctatagcattttttaaatattttacatgcattttgttggatcccacattagggatctacgtgggaccagctcaatggatagatggacatgttggttgcattctaattttgtgaaactagtttgtttatacacaatgtacatatggataataatatcattcgaatcttgggccattatactcatgtagtgtctcaaactaaaccacaaaaatatttatgaaagaaccaaaaataaataattataagtcacaattgaagagaagagtccacatggaccactttagttttaatgcttactccaccatgagatgaactgttgtgactggcaaacccaccctcacccgctactccaaaccaaaagaaaagcatatacaaatggacaaatatatgtatggaaaaccatatacaaagagcatatgaatatagggatatgattttgtcctattattgtactttcacggattgtaatccgtgatatacggcagtcgtcaaatgaaggaatcgtgaaagtacattacgagacaaaatcatatccctataaatatatagatatttatacaaatagacatataaattatgtatatattgatttcaaaaatatatagacaatgtatcacattaacataaaaaaaaataattaaaaaaaaaaattttttaaagtatatttttttttattttatttataattttacaatttaagtttttattt

SEQ ID NO: 235473 - DNA, 1981 bp, Cannabis indica
taaacaactgctaatttccaaattaactaagcgggctttacattattagtttccacccttgcttggccaaaagggcttggttgaagtcttctaaatcacgaaatcccatccctccttgctctttcaaatgacaaagtttcctccaattaccccaatgtaacttatgtttattcttggttgatccccatcagaaccgagctattaaactttcaatatcatgaaggatccccttggtgattctaaagcaactcataacatagcaaggtaaagcttgaataaccgctttaattaaaatttctttcccggcttgtgaaaaaaagacccatcttccaaccttggagctttgcttcgaccttgtctcttatcttcccaaatacttgtttcttgtttcttcccacaaaggttggcatgcctaagtacttggtatagtttttaacaagtgtgacacccaagttagaggctatggcagaagccattgagtcgtttatcttgcctcccacgcacatctcggttttctcaaaattaatacattgactggataatttctcataagttgccagcacttctttcaatgtagtactttcctccacagttgcatcaaggaatacaaggctgtcatccgcaaaaaggaggtgagacaacctttgttccatattaccaaacctcagcccatggattttcccagctctttcggcttcaaagatcatacaagagaggctttcagaacataaaagaaataaaaaaggagataatggatcaccttggcgaagtcctcgttcaggaataaagaatcctttgattgagccgttgatgaggatggagaaggaaaccgatctaacacagttcatgatctttgtaatccacttatgatcaaatcccagagaaatcatcattgcttctaagaaattccattcgaccctatcataagctttggacatatctaacttgactgccatttttcttccattcctgaagcgacctttcctcgtacaatgaagactttcaaatccaataatagcattgtcttggataattctaccaccaataaaggcactttgatttgctgaaattacggtattcaagcattgtttcattcggttagcaagaaacttcgaaaccaccttataaaccacattacatagactgatcgggcgaaactcggacatttttgttggcttagaaaccttcggtatgagacaaatcagagtttcatttatagggctgcaatcgacattgttgttcaagatgtcaagacaagcattaattacctccgtacccacggtatcccagcttttatggaaaaatagacccgagagaccatctttgccaggagccttcaacggctgaatttggaacatagctgattttacttcgtcacatgtaaaaggctccaacaacctggaattgtcatcagtactcaatcagtttggaacacatctattgagaatctcttaaatagcaactcctccattagctttagtaaaaagctgtttgagcctattcaacaatttccaactatccattctacctcccgaatcggggctgccatagaagccagtaaagcgccaagaaaagccaaggttattatcaactagagcatcaatatgagaactagtatatgacttgatatgaaccgcatagtccttagtccaaagaatagccaatccaccactctttcctttagcatccaccgaaaaacatccttcaaagccaagttgtattcgaataaactccatacgggtgctatttaagcgtgtttccgacaagaaaatcatccagggatgatagtccttgacgtgggattttaaggtgtttaaagtccaagggttcccaagcccttggacattccaaataaggcgatcattgttctcggcgacctagactcgctgagttcaccgcttccaagttcatagcaaaggtcaaatcagtcatagaaatttcctttgcattgtcttccttctctgctgtaatattcttcctc

SEQ ID NO: 235474 - DNA, 1056 bp, Cannabis indica
gtaaggcgcatcaattaccgtatgaagattcaaagtttaaagccaaagcaccattggaattggtccattctaacatgtttaggcaagtcaaacaactatcaatcagtggcatgcagtacatggttacattaattgatgaattctcaagatatgtatgggttttctttatgaaagaaaaattcgaaatatttttaaatccaaaaaatttaaagaaatagcggaaggagaagttggcaagaaaatcaaatgccttcaaatagacaacggtggcgaatatacctcagatgaatttttctgagtatcttcgagaatgtcacatatgccatcaattcatgtgtgcaaataagccacaatagaatagagtagcagagatgaagaatcaccaccttgtaaagacatgtcgaagcatgctacgtgcgaagaatattccaagaagattttgggccgaaagtatgaagacaacagctcatgcgatcaatagacttccccaagaaaagttaggttttgtttcaccttttgaaaaaatgtggggttgtaaacttgcagtaagtcacttttaaatatttggttgtgtgtgagccatctacgtagaaaatttgacaagaaggcgatacctcgtccatggaatccttgtcgattcttctcctcgttccttttatcttaggcatctcatttctttccataggcatacattgcagtctaacatgctttctaactttaggggaccgagaatcagtctcttgagacataggcataggcaggatagggatagggctttgtttgctttaacatagggctaaaaaaaagctctacgttttcttgtgttgagagcttctcattctcttatagaagtgtatctttgtgggatacgacaaccaacggaaagggtggagatgttgcgactctacaattgaaaagtgttatacatcaaggaatgtgatcttagatgaggcatcatcatggtggtcatcgtaaaatgaagcattaccaaattctaaagaaatggaaaacaatttgtgaaaaaattggggagcaaattgttgagttacctctaac

SEQ ID NO: 235475 - DNA, 1449 bp, Cannabis indica
aaacgagaaagttatgaaagtttgaaaatggggtgcacatggtgctcagtcgcacgcaccaagcttcaaacaaggcactgatgtgcgcgcgtgtaggggacatttattcacatttttctataaacccttttattagcaaaggagtgcacatgattaagaaatcacaataacatgcttaaactaatagggtgttacaaccatttttcttctaacctggtccaactccacaccaagagatttgttatctgtgcctcctctaaccgatttaccaaatccaagacgtgagcacggccatgacatcgataagtccttattttttttatttctttagcttctttactaaaatttttttgctaatcttgatgcgtgaatttggccaggttactgcttaagttggccgcttatccaagaccatgattgattaaggatttgttgcgactgaatatggcagcatttatgaggcactaaagaagcttaaggatggggaccagtaggaggtgactctcaaggatgaggtcttaacggagaaggccttaagggaatgcgatcggcaagtggtcaaggaatcattaaagacagcccaagctgatctacaaactgctagagaggagaacaaagaactttaagacaaggtgaagaaactcaaagagcttcacgaagcagatctctagaaggttgccaacgtgtctgtggagctcaaagaacttagggatttctaggagaagaccaagcaggaggttgccaaagctagccaaaaggctcttgcggctccagtcacttgtgaccagtgcgtgaaatgttttgaacatggcatcttcatgtgctagaggtatagcaaatttaagcccatactccatttcctacatgatcctaaagtcgtccatacctgtttctgggaaaagaacaagaaactatatgctaaagttactgaggctttgggtcctcgcctttctcccaaagccgatcaattttccatttatccataacccttttataacttattttttaatttgtgtacctttgtagagactttttattagcctttcctaaggctcttttctaatatacgctcttttattgacatttgagcaatatatatatattatgagttatttatgctttatatcctactgcccccaattgaccaaataatttactacttttttgtcactttgcatgagtttaaaaggatagtatattgcataaaggtctgttgggattttatgccctaaataaaattcatttcaatttaatctgatttgttatcaatagaagattagaagtcatttatgtttacatgtaattttcatgtttatggtttaatgtgtacaaaatctgtaaagtccagaacatatagttattcacaattacagtgttgtcaacacagtggaaggtaattgtgattatatgcttcaaaagataatgtccttgattcattagtgtactgga

SEQ ID NO: 235476 - DNA, 801 bp, Cannabis indica
caaaggaggaagaaagaacaaaggaccagcattctcagcaggccaatgtccatcatcggcctgcaaagctgcgacgaattgaactgcctttcttacagacgcagtcgccttttcataagtaatctcttcaccatcttctatcttaactctaccaattcttgatttgaatcttttttctgtcaaaaactgcatgcatgcatgtatacatcttcaattaatcaatgtaaataaaactatattaattagtatatatgaataccaataatttggtacttcatattttataaaattatagtgtacaaacttatatctttaataatgtttgttttggtttctgtgttttatgtaaatacatatttaatcaaatttaatcaataaaagtttataaatatatgaacaaattaattgtactcagctatgtagattattaatgggaaatttgattttatatgcttacaaaattaaaaaattttatcattaaaccaaaacctaaaccttaaaaactatgcctttttttcaaacccaaaatacccccacaattctctctctgcatcatctctctctctctctctatctcacatcccaaccgcccaccctcaccaccacctccgacctccatcctccgacctccgaccctcaccgccacctccgaccacccgcaccaacaccccgacccagcccactctctcggacgcccaaaagtcgcaccccgaaatctcttcctctctctgaaatcgcagaaaaaaaaaattgcccccaggtccgatggggtccgaccaatcggacccatggtccgaccat

SEQ ID NO: 235477 - DNA, 1269 bp, Cannabis indica
tttggcagcaacattatttttttggtttttcttctcaattctttcaccacttgtcctcaattcttgtaaatactttctttaaacactcggggacctgaaacaaaagaatcaagcgtaaaatagtcctaaaactagaaacaaagagtgaaaactaagcgaaaatacgtcccgaaacttagactaattttagcctaacataccttagttttgtccttagtggactttctagtaaactaagttaattaagtttaatttttgtttagctgaatttaattaattaacgtatttcattttagtcaaaaggaaaaatcgagaaaaataattctctctcactctctctctttcttcttgctcgaccacacccaagaaccaaagaacccaaatttctttaccattttcttagtaattcaaaggggttttggttagagttcctagggttagaagactatggctcaaggtaagctttctattctcttcctctttgattttttttaagttttaaggttagggttgcatgcaaagatgagtttttgtcacggttagtgttgagctgtgttatggcttcattttgaggttatttttgagttgttctagctatgttgtagatgtgttttttgttgaacttttaagctcaaactttgctctttaatggtgagattatgtttagggggtttctcttgcaaatacttgttgggttatgcttattatgccatttttaggtgatttggagcatattagaagatttggggtaggattcaatgaaatgagattctttgtgtttctacagtaaaaaatggccaactgtttttagcacttagggacccgaaaaaatgacctaccgatttttaggaaacaacctgctattttttgtagtattttcctaaaaatctcctttttgttattttcttgatatttagtgtattcttatgctatttattgataggcaaacttttagttttatgtttaattccctgaaaaagaatttaacgtatcacttatcatttttacataattgtgacttaggagcttgtaaatcgtccagcagtagttctactcaagttgatcgacacacatgaactcagaattaaggtaatattagtgtaataatattatatgtgattacatatttagcgtgcatttttatgaatgcctaataaataacatatcagtaatgacagttttaatgtacatagagttacactgaataccgacgaatatatggcatagtacagattggtgctatgacatcggtatgactagggtactgag

SEQ ID NO: 235478 - DNA, 1004 bp, Cannabis indica
ttatgtatctgaaaaggaaatgattattggacagacgcaaatagaatttcttgggatgaaattatccaaaggacaatatgaagcccaaccacatataacccatgaactactcaaattcccaaatgaaaatctcacgaaagttcaagtgcaacaattcttaggcatcatcaattatttacgagactttgttctccaactgtctgtactaataaggccactcagcaatatgctcaaaatgaatagtctagaatgattacatgaccaagccgtggcagccagaaagctgaaagaaatcatgcaaaatctaccacctttacagattctctctgacgaaaaacatattcttcaaatagacggtagtgataaacattggggtgttatccttctagagcaagatgagcaagggaaaagataaatatgtggatataagagtggacacttcaaagattcctagctccattatcattcaacactcaaaaactaattacaatcaagatgagaataaaaaaatttgagttccacctcatcggccatcatttcttagtggaaaccaatttcgttgcatcaaaaggaatgataaacctaagaaagaacaagacaaccaatgctcaacttttgaggctggcaacatggtttgatcattactcttttgaaataaacaccttcccagaaaagaaaatattttggtcgagcttctatctagacctacgtctataaatatggtcttctcatatttactcaaaaccatccccttaatcagccacaactcctcccataccattacatacatatatataatggcatcatcatcaacatcacaaaagaattgctcatttctccgagatgcaaagctcatcatcctttccaaatcaaaaaattcaacaaaagattgggcctctcacagggctatttatactcataaccaaattctctctaaacttggaccctattttcaacataattttctaatttatccaaaaaatccttttgccaatctagtcccc

SEQ ID NO: 235479 - DNA, 1051 bp, Cannabis indica
ttttaataaaaaatatttttgtttattgaataacatccacacatagggatggatggggcctcgcggggacccgcccctaatagggcggggattttccgtctaaatggggaacggggcggggatgaggattactttttgtccctgaatgttaaacgggacggggatggggatcacactccccgccccgacggggacccatttaatattttgttttatatatttaataatattgataattgataatgtatatttgtatttttttagtatagtaatattctttttgtgaattttaagttgtattttagataataattaatttattgaataataattaatgtgtaatattttaatttttatgtagtttaatatttttatatattaaaatttttattgtaaactttaaatttttattaggggattccccgccttatacccgatggagaataaacggggatgggaattaaaattcttaacggggatataaacgggggaagcattccctgccaattccccgccccgtgtgcatccctatccacacagcaaaaaaaaaaaactaattatacaactaaaaatatacataaccaaaataaaaactaagaacacatatttttttttgcgacacttgagttgctaaataagtatatgtgcattgcacgtaatattaacttagtatatatatatatgttatacataaattttagaaatttttacataaaaaatacaaattgacactttatttacaaaatacctccataaggtatgggtagcaattttgtttttaatgagcttttatttatcaaaataccacttgcacaatccattcatgtcagtccaaactaccttccagccattgtccttttaaaatccacattgaaaacccacgaaaacaacctcctagccataaccttcaccatcttattttcccaactgtcccctttatcaattttttttatacatctttcattttgcatatataatggctattacttgtgattctgcttctccatctctattgccaaaaaaagcttaaaaatgggtcataaattagttg

SEQ ID NO: 235480 - DNA, 784 bp, Cannabis indica
attagattaaaattcgatggtttgatatttttaaaattaatatttatagttaaatttgtttagtaaccggtaatacccattaagaagtgtcatatatataaatagaataaacatttgatctattaaatttgaaatatatttgtattatgtgttagatttttaaattactatttttttacataaaatattagttatatataactttttcaaaatttatataaatatgtgtggattggattggatcggttacttttacatgtcaatcaaaatccaattcgtacaaaattgaattttgatttttctaatccaatccaatctgcataaatgtggatatccgcactttacgaattgaattagatcatgcaaattgaaatggattgactgttttatgaacccctagtcgcatattaccctttgagagccacatgatactcaaacataatgccatttggttcgtcggtcaattttgatcttcctctagtcttctcgcttcttgattaaagtctaaaagttgacttcttttatttttcgaaaatcaggttaaacatatggactcaagtaagcttcatgttctaaatctaagatttaatgaaatcattaaaacatacaattttgagcaaaatgtcaatgaacctttgtttaccatcttaaggaaaacaatactatggtattcttgattttttatgtagatgatatctagctcattagaaacattgtcaagaaattattaggcataaaaaaacagttgagaatgcaatttcatatgaaagatttgagtgaagca

SEQ ID NO: 235481 - DNA, 1303 bp, Cannabis indica
tgtaaggttttttaaactcttatgtgtttaatttcattatttgagagatattcatatttaggatgttaatcaacatacttgttagtaaatcttgatcctagtaacatattcccaacaataataagtgtcaccaaaccctaaagcacttgggccatcgaactcgacaaatatagggccacctgtcaaccttgcatggccataaaaggcaaaactctccccagcttcatggctagatagaaaagcatctcttcctaaatctctcaagatttaggagaagagcaaaatccaatgaagaagtgagagcaacagcaagacaatcaaccaaaaaggtgaattgactacctgcccaatgaaggcatggccctcaagacagcagggggcaatggctgaacgaggtaataaaggtcagtttcaaagcctctaacaatgaggctgagtatgaagctcccatagttagcattatgctagcacacaaagcgtgggctgaatacctagacatacaccataactctcaacctgtcataggttatctcctaggtgaatatgtatctcaatgcaaaaagataatggcctatttaagctaatttcaagactcgttaagtcacctcaaaggctgtaccaaaaggcaagtccacaaagacgaagtaacagtcgatgcactcgcttgactagccagcaacgccttgatagccaaggcaaacttggtacccgcttagttcatcaaagagctaattaatcatccctatttaaaaagaaaaagacatgctagacaaccgtccaacattaatacacctatagcagcatacctccaagcaataatcttgccagaaagtaggggtaagggggattgctgctaggtgtccaatttttgataacgtaatacatagacgtgatatcccaataccccctttaagatgtgttaccaagtaagaagctgaatcactattgataggagtgcgtaaaggctctacaacaatcatgccacggggcaaaggcaattgggtgtagatgggatcgaattgcagcattgacctggcctcttaaaggatggctgacaattgcctcaaaaggctaaccgaccctagaatcaagaatctagccggtcactacgtccactagctggtcgaccatagcctcatccaactggccaggcaatgccccctcaatgtggctggacacttgatctgtaccccagctggcctgctctgccaacagtctactcttttacttttggtctatcatggatcccttgacgaaagaagaaaaaaaggaagagaccaagctgttggaatatattttacca

SEQ ID NO: 235482 - DNA, 1277 bp, Cannabis indica
gtccccattttgcatcgtatcgttattttcagagttcctgaatccccatcatcaggaaaataaggtttcaaagcttttgatgcaaaattggaagatcataccctattccagctacatgacatttgtagtcagcaccatattgctatgggtaatacatcgatacaccccttttaaggggtgcattgtaaaaattttctataacatttaactactaaaatagaccattaagcaaaaaaaattactaaaagagactgcaacactcacattagatgctatataatagagaatctctaaaatatttaaagaactaaactaaaattacgctacatcgtatgctttaaactcctctattttatagcttctttaaagtttactattcatgctctacatttatgaaatatattattcattgctctaaacatattttattaattgtttgaggttttaaattatactttttagatgaggatacatgtaaatattgatattatatgtttgaaataaataaaatatattaaaatttaaaaaaataaaagtagaattattgtgatatattttaaagaagttgatatatggtgtaatgtaaaagtttaaggcaaaacaataaactcacaactcctaaggtgtttctcagccaagccatttccccacatgcctctaaaacactccacacctggtgccatagtacatattacacatgtctcctactcatataaggtaattttaattatataacataataaataaattaaattatattacacagatagtacattctaattaaagaagaatttaatttatttgatttctgattggtttactttactaccctatactatagggtaaaaactggcggatgtacaatagatacctcatatatatataagatagatatatctcttactagtttatttatgggttaattgtggcaaaactctcaatacttttactgttctagtaattaatccctaaaactcattttttggaggtaaaatccccaaaactcgtgttttgttagcaattgagcttttccatctaatttcatctgttaagtgacatgttggattatccacttgtacacagtttacacgttggcatgattttattggtccatataattaattattaacaaatataaaaataaattaatttaagactaaaaataaatcattttaaaaaaaaataaaaaaccaaaaaattaataaataaatataaaataatataaataaaatgataacaacataaaaaaaaaaataatttcctaaaccatctttctc

SEQ ID NO: 235483 - DNA, 1359 bp, Cannabis indica
taattcaaaacctcaaaccgcactgcactgcgcggttgggaaaaattcaaaccgcaacgcggtttaagcggtttgatgtacaccctaatagtattttttttttttaaatctagtgctatgtattttagtttaaaatagaatatatagaatttaattataattatataaattcaaaaaaattactaaagtaagctaataatgatatgtattatgatattttattattactacaatttagtacatatagaattacattttaaattaataaaaatttaattatagtgcaattcaatattaatggtttacctttattggttataatacgggaaatcaattaaaaatttgtgtgctatattgtgttaaattaattaactacttttgttaactcaattagaggtttaattttttcataaataaaaaattaattgattaaacacagtattaaacacgacttatttgatattttaaggtcctcaacaacaacaacaataataataagaataaactttaatgagttgaaaaagtcaaaagtgacaatatatattaggaaagagagaagattggagagagagagtacgtacctcttgaacatggactttggggaacttggtttcaaaagccctgagtagctcgggggcaagaggagcagcggcgctcataacagcctggagtttgaggttggtcagatcaaactcatccaccattggcttcttcaccaagtccgaaatgattggggggacgactggtgcaaaagttacttcatgtgataccaacgctttaacaaacgtcctcaggtcgtacctctccatcaccaccacttttccctttgtttctcagcgtagcacagcaaatgccagtgatcccatagatgtggaagaatggcattagcccaagtacagtcacttgtccaatcatctcaggcttgattgcgaagagagtggaacagaggttggccaccaggttcctgttagtttgttattactaatattaattagctctgttctttaattagttataagataagtatatatatgtacctgtgagtgagcataacgcccttggagagtcctgtggtgccggaagagaatgggagagcacagaggtcgttttggtggacttcctctttgatgtgacacgtcccagctcgatctgctgcttctagaagcttgtgccagttaatggctccttccactactacttcttcctctactgctatgactggcacctctagcccttttacctgctctttttttcaacccttacactttaggtatgtaattatgtattatatattgattaattagtgtgtacttttggtgttgcaactgatcaacaactagttacatcacttttatatat

SEQ ID NO: 235484 - DNA, 645 bp, Cannabis indica
ttttaaaaaaaaaaaaaaactgatacacttaagacgaagacttagacttttaaaaaaaactgagcacattaaaactgatacacttattcaaattcacacttaagcttttaaaaaaaactgatacacttcacaaaatttcagaacccaaactaaaaataattagctgtgacttagatccatatactaaaaattaataatcaatacactaagagacgaataagaaggtgccagtggattgacacgaagatctagccttcgacgagatgaaaaagcggtgatgctggactaagacaaagatctaggcttcaataaaaaattacggcttcgatcttcttagccattagatcctgtcgaaatcccaatcctgtcgatgccgattccgtcaaagtcggcaccgtcgatgtcggtcttctcgtctccagccaccggcaaacacccacaccaaactttgatgcccaccctcaacaacaacatctgcagaaagaagaaaatagcgaggaagggataagaatacgatgaaacggccaatacctcagtggactcactgacaagagaagtgaccattcatgctcttcatacccactggtacagatcgtctctaccattttagggttgagactttgagatattttgagagagagagag

SEQ ID NO: 235485 - DNA, 1083 bp, Cannabis indica
aaatactaattagggctgcacacatgtcagattttcggatattcaggtggtcgggttcgggttttcagatgtcgggttttcgggtggtcgggttcgggtttttgaatgtcgggtcaagtgtatcgggttgttattaggcgggttcgggttacaatggtccagatccgattgaaagattttttgggcccaatgatattttattttttaaaaatatgaattttttctatttttaatatattttttgggttgcataaaatgagaaataaactaatttaacatgctgatttttcttgggagaagaacagatcacgattgggtttgggacttgggaggagaaagtaaaggttattaataatgaatatgattatacaggtaataatggtataatgggatgggatagtgacattgggatgcgtataccattaattaggtttttaatttctagtttttttttttagttaagaatattacaaataaaataataattattaaatatatacttatatataatatattttggtcgggtctcgggtgcacacccgaataaaattcaatggctttttgaaacccgaacctgatacctgaattatgcttcttcgggtcagaccagacccgacaatacaggttttggttttttcggctttttcggcatcgggtcggggcgggtggtcggatttttcgagttttcgggtcctaatgttcagccctaatactaatggtgaggaatgtgagtatctagcttctgcccatttcctatgacaaagaaagatgccattacatttacttttcgatcatatcaaatctatataccactcaaataattaatgtcatcatttatatatgtaactataagtgaattgatttgagttttcaacgactgagaattactaaaatttctttataaaaaattcgatattatatttaaggttattatctatgaactaattactaacactaaaataacaaatcaatatatattttaaagtataaaataaataaaattattacctaaaaataattaaaatatgattttctttgtagtggtgttaatggttgattcataatggtggtcccttctcctct

SEQ ID NO: 235486 - DNA, 1246 bp, Cannabis indica
acatgattaaatggcaaatacaaggcaaataaaatggcaaatacatgattaaatttattatacaaggcaacataccttatatttgaggctcatttgtctttgctgcattagtgtttcttcaggtatttttgccagatttgtgaatgttctcaatgctctattcttgttgttctaataccacttttgtacaagactgtagagacattctattaattttgcaactggtaattctcagatttccttgattgctacattaactgattcagccatgttacttgtcatggttgcatattgtttgttggagctatatattcttgtccatttgccaataccaattttatgaaacaggtatggttttatcctctcatcaatactgtccaagtctctcataaagtcttcaaattcagtttctgtgtatgctctggaagcaccattgaatgctttttagcccatctcctccctttctgaatttagactttatgtttttgttcaagtggtagcaacatacaccatgcattaaatttgggaaatttttttttgctgcctttgcaatgctttcatgtctgtcggaaataatgcattgtccatctcgttccccataggattcttgtaatttctgaaagaaccattgccatgattcatcattttcagagtctacaattgcaaatgcaagtggaaatatatgtctatttgcattatgtgcattatcaattagtaatgtccctctatgtggatattttaagaaagtgccatctgttacaagtattggtgtacaatgattctatcccctattaaagctcctataacaaagaataagtacttgaaccttcctttttcatctgttaccaagtctgtaacagttcctgtgatgtaaatattttacaattaatatattgctctatataataacacaaaaaataaggttatagttacagtaaaagttgaaggacactttaatgaaagaaccaccattatctatatagtattggaaaaaaaaaacataataatataaaaagattgaagctttttttttatgtgcttaatccataactttttatatattataatgacacaaaaatttataatataacttggaaattgtaaataacagttgcaagtatgattattgacaatataaggtttgcaacaactattttgtggagtattttattttagtaagcatgcttaatagttgctagggcaacttaattgcacttatactattgaaatttttcagatatacata

SEQ ID NO: 235487 - DNA, 1117 bp, Cannabis indica
ttataattttgattttgatgctgctcttgtccaatattgcacctgtttttctcttaagggtcactcgatggaatgagtgattcagctgtatgaatagactatatagatttatatatgttttcactatcttgtacatgttacatttgatttgtaatttggagtaaattagtctacaatgaagtaattgttatgttgtaaagataagttgtaaaaaaaaattgttctgtacttgataatttatttttaatcttgaaccaatattaccttttgtttagtgttttttttttgaattaggacaaagctagctagttatttgttattactactaactatttacattcgtgtcaaatttctagtactatttttcttatcatttaattagattgtttcaacaccaaaaagctaagcactagttagttgttgctaatgtgcttgacaacttttcatttttttttttttgacaaaatgaaaaaacttcattacttcaaatcgttcatcaatacagaaatgaactctgagggagcgttgctcactcgcaaaatacgatcagcaataaaacaaattgatctcgctagaaggtgagctccattgtttccaccgtttaacaaaacttaaagaaatagacttattatttaactcaattaacaactccttgcacttagaaattattctaccaaaataagagctcatggtagaagaactacgaatggattgtatggcaacaaggcagtcggactccacttcaactttgccccagccctactgttttatccaactcagagattcaaggatgtcgatagcttctgcaacttcaggcctcataacaccccgtcgacaagaggctcgagcctccaccagtaagccagcatggtcacgggctacacatgagaagttgtagcatgttgctgaggtaaagactgctgcatcagtgtttatcttaatcatattctccttaggtgcatgccaatattcttttccatcttcaggggtcatcaaaccaaaagagggatcgaattgtctatcttgagcataattccattgactaagagtagttcgggctatcactaacacatcagcaacttcaacacttttttgattccaaattaaaccattccga

SEQ ID NO: 235488 - DNA, 1451 bp, Cannabis indica
tacttggattggatcactaacactttttaactccgattacagcaagaaaatcacacccaaagctgctgcttcctagggctttcgatcaagagaaagagagaagaaggttttctctcaaattcaccgtttttttttttaaaaaaaaaatttcttaattctccaaaaaggatcaacactacacttaggctattttaacaaattgtggcgagctgccactttaaaattcagcaacaaaaacaaaagggtaaatgactaaaatacccttccccacttgattaattaacaaaaagatctaagggtaaaatagtcatttctaactcacgactaatcccgacatatcccgacattcccaatgtctaactaaactgccccgctatacttaaaatactaggatgtgattctaatagccaaacaccgcgttccaatgttgccggacaccgaatatgcaaaattatgaaatttctatatatgacatataaaatgcatcctgaattcaaataaaatatcagaaattaataatttaggattaataaataatttccataattaaaccttaattatctactaatttctaaatttaagctaagcggtctttacacgtattttcgaacgtaaaaatggtgattttcgaactgtttgattccagacctcttaatcacattccaaaagctctataagaggatatagaatcaaggaaacgatttagagcagcccataaactctgaaaatataaaaactcaaaatctcacctttttctcacggctcggtttcgttcatcagcctctctctccgtctctgcctctcaccccgtttgtaaaccctctaaaccctaaacaatcatattaacatcttatatatagtcataaccctaatataaccctaaatcaatcacttaatttttttttaaaaaataatatatatattcctacgtatagtatacttacgtagtaatattattattattattattattattaaactaaacaatatactataatatatttactcatatttgtactattaatatacctataataatattcacaaataataaaatattaaattatctgcaataatttaattatttatctagcattatacgtacccttaaaataaaataataaattttattatcactaaaaaaaagaatattaatactccactaaactcataaatattcaaaatagtaaattatccccattgaccaacaaaataaactaaaagttaaataaaaaaaaaatttagttagccaagaaagcggatattacagtcatcatgacttccattcttgtcgttttcctaagatgtatctcattgaactgatcctgtcgagataacttgcttttagttaattacagttttttggccataatgatcacaagatctcactcgtcaggtttgtccttttctccaatactaccgccaataatcttgtattggtgatttccctt

SEQ ID NO: 235489 - DNA, 993 bp, Cannabis indica
ttttcctcaccatgaccctctgtgactagagatcccatcgccaacaagattgtggccagaatcctaatcgacaatgggagttctgtgaatttattatttaaagaagccttcatggcaataggcctcacggaccgagatctctcgccgagtggttcccaactcacaggattgaacgggacaacattcatcgcaatgggaaaagtgaggttcccagtcaccctgtgcccagacacaccccaaagcactttaaaatactgcacatttgtagtggtggactggccaacagcttacaacgcaatcctcggccgaccgaccctggtggatttcggcgtagttacgtggatcatgcacttgtgtctaaagttccctactcaggaggctgggatagggaccgtgaggggaaaccagggagaggctaggcagtgttacaatgttgctgcccacctacaaatattgatggtccgtgatgttattgagccaggaatggtggaagaagatgagttggatccctgtgtgggattcgaaaaaatcgtagaacctatggaggacgttgaggaagtatcggtatgtgacctcaaccccgccaaggtcctccggctggcgaaaagtctagagctggaggaaaagaaaaaataattaaagcactaagggcagccacagatgttttcgcgtggtgccaaggggacatgaccggcataagtccccatgtcataactcatgtccttaacgttaacccggacatgccgcgggtccaacagaagcgatgccccctcgacccagtgaaggtagaagccctggagaaagaggtggacaaactaatgaccagtggcatgatccgagatgtgtattatccataatggctggccaatccggtactagtgccaaaaaccaaacgggacatggcgggtatgtatagattttaccgatctaaacaagacctgcccaaaagactgttccccctaccacgaatcgaccaaatggtggacgccacct

SEQ ID NO: 235490 - DNA, 1070 bp, Cannabis indica
cgtaagcgaccatcttttctccatgcatttggtattcttccaacacctggttaacaactagttgagagtcgttgtacacatccaccctgttggctcctactacctttgccagccttagtcctgctagcagggcttcatattcagtccatcaggagatatcattgctaccccgacccccgatccattctcgttcgatgccccatcaagatacacttttcatgtaggcatatctagatctggcatattggcgttagcctcggtttcattgcagtcaataataaaatctccgagtgcctagcctttgattgagatgcggagtatgtactgtatgtcaaattggcttagttccattgcccacttgaggagtctcccagaagcttcaggtttttgtaagatctgccggagcggatggttcgtgaatactttgatggagtgcgcctgaaaatatggcctcagttttctcgatgcaataaggagacagaaggctaacttttcaatcataggatattagagttctgcccctatcatacgtttgctgacgtaatatacagaatgttgaaccttttccactttcctgaccaatgctgcactgactgtattatcggagatgactaggtataggtacaggtattccctgtgaacgggtttggacatggccatgtgctctttaacttcttaaacgcttcctcacagtctttcgccactcaaacttttagcattttttcaagatgttgaagaatgggatgcacttatcggtggagcgagagatgaagcgactcaggacaactaccttcccagtcaagctttgcacgtcttatgtctttttggggaaggcatatctaataaggcctgtatttttcagggtttgcctctattccgcgctggcttactatgaaccctagagactttcctaatttgatgccaaaagtacacttcttgggattgagtttcatcccatactttttgactacttcaaagcattctatgagatcgtttgcatggcccatacttttcttagatttgactatcatatcgtccacgtaaacctccatgtttcgtcttgctataat

SEQ ID NO: 235491 - DNA, 952 bp, Cannabis indica
caacgttatatggaggtaaaaaagagcttttcttagttcttgatcagaaggaagcgttttggaagcagagagcaaagcaattctggttgaaggaaggggaccaaaatagcaaatactttcatagggctgctagcaatcgtcgaagcttcaaccaaatttcaaaacttagagattctagtgaaaattggaaggattgggatcatggccttgctgatgtagtggtggactatttttcttcactgtttagtgcatcaaatttgagtagtgatgatgtggttcagtgcattcaaaggaaagtcaccactcagattaatgaagatctccaccaatctgtgacagccgaagaagtgagaaaggcagtctttagtatgcaccccgacaagagtcctggcccggatggtatgacgccgactttttaccagaaatgttggggcattattcagacagatgtcacggctgctgttcagaattttttcatttcgggtgagtttgatcaagggtgtggggatgctaatgtcgttttgattccaaaaaagaaaacccctgaaagtatggttgatctgaggcctattgctttatgtaatgttctgtacaaaattattactaaagtaatggctaaccgaatgaaaccatatatggatcaaattgtctcagaatcccagagcgcttttataccaggtagactaataactgataatatattagtctctttcgaagtgcttcactacttaaagaggaaaaagaaaaggtaaggatgggtgcatggctcttaaactcgaccttagtaaagcctacgatcgcattgaatggaatttcctggaatcagtgctaaggaagatcggcttctcagagttatggatttccttggtgttaaagtgtgttaactcggcaaaaatcaaatgtggttcatggtggaagacaatgggaccgattcccctctcgcggtatcgtc

SEQ ID NO: 235492 - DNA, 1730 bp, Cannabis indica
attagggagaacagtaccatgtatgtaatatccttcaaaggttgatttaattttgttttttgttgctctgtcttgagtggctgtctagtataatgataaggataaatgagagctttttcttatgtttgtaaactgaattggagtgcaaggtttgcaaggtaaactgaattggctttaatttcattttttgttgctctgatcttgttaggaagtggcagtgcattatgtaaaagcaaagatacctacagttctatgtctgagttcaatgatcagtgattttatatttaactttgggaaattattattgtgtaattagtttaatttgctactgatagagtttacttattagtagtattctttctttaatctgaaaatgaaacatttgagggcaattttcacattcttttatatgcactacttttatagggaggtggaaaagtatttcagtcacattctccccccccccccccccccctcccttttttttctgtatatctttgcagaattggtctacaaatcctcattaatattttaactttcaggtaagacatcgtttgaagaaaacttatgggattgagggtggcattcctgttgtgttttctttggagaagcctaaggctaagcttcttccattcaagggaccaagcggagaagaagaaaacccatcagcttatcaggttaagacagttgtaaatttaaactgcattctacttttttgtaattgttagttttctgatttagctacacaccagaacttgtaattatgctgctcttgtttttgtgttttttggggcttacacgtctcacctttttagtgtgtatttagtcatttacttgtgttagatttcctatcatatacttatgttaggggatctaaatacttaggtggctttaggtggcttgcttaagagggggctggttagttatgatacttacagggctgttaactgtataaaaaaagacttgtagactctgtaaaagtatcataagagatcatctgtatagagaggtttgactgcctttaatcagtctaaatgttcagttgtaattctggattgttctctcctttagaacttatcaataaaagagaaagaggatgtttagctctaacaactctgttttgtgtgtaaagaaaactttttttttttttttttcttgaaaaagaagtcacttgtcttagattgaccccctcccaaattttattcgggtcttgcttatggaggatgaaaattgtggttacaacacaagcataagacacaaaaataatagataaatacaaacatgaatcttaattacagctgactatgttttcttagtgtaaaatgaggctccattctctagtcaaatcttgaaatgctaacctttcaaaccattcgcttaaataagcaggtggccacccagaatttaatctttccctaaaccacttcagccccattttgaactcttgcaaaggtcctcccatttctttccagccaaccaccccaaaatatagccaaaaactgctgctgtccacaattgtgtggttctccaccctcctttcagcttgcacatgatcagctggctacatgtttgatcataccaattggttggtgttatttgtatttccagatgctgtgtacgtgacaatcacagaaggatgccacatacagatcatgcatggttagtatatatcttccgtccttcggcgtcacggaaggtgctatatatcagaagttattcggaggctctcc

SEQ ID NO: 235493 - DNA, 931 bp, Cannabis indica
atcttgatcatactctgcgacagttgggatcaaggattagagattttaatggaaagagacattatattctggtgccaccaatgtaactttatatgtgtttatttcattgttttaagaaatttatatttaggatattagattatagtttataatcaaacatacatgttagtaaatctagatcctagtaaaataagttcaaacatttaatgtctgaggctttccatacccccgacaatgccatgaaaggattaacatggggggttgggggcgttgtataggcccgcctcctcgtccttggaaaaatccttctcattatgctcatttttgcactgtttctgcatctgtcatggactcgctatactcctcattctccttctgagtgcaggttttctgaccatctccatcgaaatgagctgattcataacctggtttcgaatcaacagtaaagtgattgttgggatagctagttagacatgttttcttccctttcccatccttccctgaaattaaaaggtctcccatccatctacaagggccttcaatatcctttagccgcctcttttttccaaccccagacccaatagaaatagacgaagaactagtccacttagaaatcagggagcacatttgacccatttttcattattagacttagtagctttgctggccgacctatgatttggacgaagaatacctttaaagaccatcatgagatggctagttttctcctcagcgggcccttcactattaaggcccaatttcctaacaatattcttcgtattgggaccaccaagaatcatgggctcctgagccacattctctgacagctcatcattcccaatcaccttagcgttaccaccacccaaatttgaaagaccattcgtaccctcttccgtactatccacattagcattctggattgatccacctt

SEQ ID NO: 235494 - DNA, 574 bp, Cannabis indica
agagtagtagagagagagagagagagagagagagagagagagttaatgtatatagacttatattatgtactagtaaaaaattacgtgcgaggcacgtatactaaattttatgctagatattttctactttgattgtagcaacaattgcactaattgtaatgaacaaaagaattaaaagcaatcctacaataacagatcaaattaattctaatatattaatgaaccaattacatatatagtggcagaaaatagaaaaattatgagtgatggagaatgctcttgatcggtataaaattatgaaatatatagtctaccactttaagctcctcatctgtaggttgaagatttctactatcttttgatatgcataccacattgcattttgtaaaaatagcttcctgattcaataatgagcgtccgatagattagacacagaaagattataaagaccattcaataatgatgaccatcatatgtagcgaaaaaaaaagagtttcccaatacttcagttttaagaaaaaaaaacaaaaggtccaaaccaaaacatgtggtacacagacctgcaaataacagg

SEQ ID NO: 235495 - DNA, 2519 bp, Cannabis indica
acacactacacaaggctataggttggagatcagacatcctttcagcattcttcttcttcgggatcaaaataatattggctcaccacaaccattctcaaagctaccactcataaagaacttacgaacacagtcaataacatcaccacccacaatgttccaacacttttgataaaatgctggggtcattctgtcagggcctggactcttgtcggggtgcatttgaaataaagatttcttcacctcctcatttgtaactggctgacacaactccaaattaacataatctggtacaattggttccacacagtcaactacttcactacatgatacgtctgaggtctggaaaatctcctaaaaataacgaaacaccacccctggcagacccgagtcccacgaacaccactgatccgcctcatttcgcaactggataatctgattgttcctttttctggttgtagcagctttatggaaatagctactattcgaatcaccctcttttaaccagtgttgctttgctcgttgtttccaatagctttcccgcctatcaagagcttcgtaaagcttcttttttgtttcagagtaccgctggaccaaatcactatcccgtcgaggatgcagaagtttcaactcaaatttgtaacatttaatccgatggttcaaagttcccgtaatctccttcccccaaagagccaatttttcagcacataaagaaatcttagctgggaaatcacaaaattgggtttgatcccaacaatcattcacaatctcaaaacaaataggatcttttagccatatattttcaaaacggaaacagacacttggagaaaaattattaagtaccttcggctctaggaagattggagaatgatctgaagtggagtattcaaggttggtaagagtagcttccggaaaagctaaccgccaagactgagtaaccaacgctctatctagtcgcacttccacccaatggttagtaccacgacctttctcccaggtgaaggagtgtccatgaagctccaaatcagtgaggttacattgacgaagagtagagttgaaaccagttagcaaccattgcggataacgtctaccaccccgtttatcttcttgtcagactatattgttgacatccccaataacacaccaaggtaactcagattggttagataacgttctaagaagattccaagtttgttgacgttgattacgatcgggttccccataaagcccagtgagtctccaattacttgcatgaggggaagaaaccacaatatcaatatggtaatttgaatagcccaacaaagtcccttcttctttattcttccataaaagggctagcccacccgcttagcccaaggcttccaccacaaaaacaccttcaagctttaataatctagccaaaccctcaattcttgctttaagacatttggtttcccataaaaaaatacaattgggtatcttttgagaaacaatttctctaaggaattggacactccgttggttccaagccccgacaattccaactaaggacattcatgattcctggcgggcctggaaaccagtacctgccccacacaagttttttgtaacctccgaagtctcaccattcacctcatattcactttccaaaatttccatgttttcaaaaaaggtgacatttttgtcattagagtccaccttatttccaagcccactaacactctcacggcccattctccttcttttcacttctaaaaaaggcaacccaatatttgaatcattctccacactttcctcaattatatcattcttcacactttcctcaattatttttccaacaaaaccgtcctgatttcatgggattcattttgattgttatcaatcacataatcaaccatcccatgattgtgtctcataacacatgatcccagatttttctccatttgactactacctccagctacctacgtaacagtcggagtaaccatcgaaacattaacggagttgacaactgggctttgagaagtcgacccctgcttggtcagcagacccgattgtagccacctcgaaccatcagcgtagttacgtcgtctcagagcggccttaatttctagactataattcttcacaatctgatccctttgagtgtcgaacagcttctcacagaacctctctgagtggcctaaaactccacagatgaagcaaaaagtaaggaggtcttcatatttaaaaataacatgacatactcggccaccttggatcttaagctttttcttcttcttcaatggaatattgactggtattttcacccgaatacgtaagtaatcccgccaaacaccaaaaaaattattcggatccgacttaacgaagctaccgagataattaccaattccgctaataattctttgagacataaatccaatagacatgttatgtaattgaacccataattctaaccttgttaatggaacaagtcgaggattggtacccggtttcacacgttcaaaaatcagaggagcctgatcgaacgtccatggactgcc

SEQ ID NO: 235496 - DNA, 944 bp, Cannabis indica
caaatatcacaagattaaaaaccacagattcacaaagagaatgtccaccaaatggattacgataggagaactctataggtgacctgaaatttccaaaaaaagaaaaaataatgagatctatccagagaaaaaagaaatttctactaactttatgaaattaatcttttctaattcctacaaacttttacttccatccagcaaagagaaaaaaataaagaaatttcttacaagttgaagttagtaggtgcggctggtgtgtttggagagctggacggtggtggctggctggcgcggctgagagctcaacagtggtgcctagtgcagctggctggcacgacgcgggtgggagaagactactagatgggaggcacaaccactggcagggcaagggggcacggctaactggctaagaagattgatcttctattcctcctcctaactgagctgggagtgagagcactgagagagtttttttttttcaaaacaaaaagagtggttgttagggtttggacttggacaaaggagagagaggaaggattatgtattaggtttaggttttctctgatgtaaagaataaagataaaaaatctatatgtatattaatttttttttaattttagttgggctaggccggcccggtttgggtttattgggttgaaaatccttcagcccgaaatcaacccatttgctgcgggttgggcccttttcaacccatgtgagtttcggcccactaaatatgaccatgtttcggcccatttcgggttgggttggccgatttggtcggcccatttccaacccatgctcagtcttaattgtaacgatttagaaatatatttgtttgtactaaacataaagcaatactatagacgtcttttattaaatatataaaaatttagggtgcatttagtaatattttttttaattaattttctgttttttaatta

SEQ ID NO: 235497 - DNA, 2935 bp, Cannabis indica
cttatctcttagtcttgacttgtctcccaattctatgaagcttcttcgtgactaggcctttagtaggagattttaatttgtgaaattatgagcttatctattcctttatatgccacgtgtcacatattcgaaaatagagataacatttacacctaagctttcgggactctttgagttgcgagagcttgcaattttcttccatctcttcgagataagtttttgacacgtggtgactagtaggatcacagatgtcccttgagttgtcattaattaaaggactaaaaattgaaggtaccacgggtgtggcacgtatgcggtgcctataatgcatttgttgataacacgtgcgtgtagggggcgcattacttgaaaaaagttgcaatgatagtaggtcgattgaaatgattcctctttaatgcgtacaatactcgaggcaggcaatgatgataaataaacacattgagcaagttttaaatgccatctttttaacttctcattcgtaggatcaaattgtacgtttggaaagagaatccggaccatccatttcaaattgtaaggattttgggtcgaagtataggttcataaaaccctttttttttttttttcaccatcttagacttttgacatcatttgcctttaaacttcaaacttcaaacaaaaaccccattttttggaaaaaactttaaccttgccatccttcagtggtgaatgcaagagatttttgattgcttaatttaataattcctgaatcttcgtgtagcctgatttctaaacacagtcaataaacccgaactactccaccccaagccagatgaaggttttgacgttaaagctgactttgattgcatgattggttaggttaacaactccttggtaaatttccacaacaacctttcattccccactcatatattaagtaagtattctgacgctctgttgaaccttgttattttgtatccatgatagaaatgcttagttcaagctaagtcttgaaactttgatatgtgtgaatggtaaaatggtgtccgtagaattttcattgctaggatagggtccttttgaaatttcttatctaggagagtgctgatatcgtctggatgttaggacatggacgtctgaactttgtaggcacttgcatgtttttatgattctagaattagggtttagaccaggcaggatgaacttttgagtgagtactatgcatgttcatcttctgtgcacctatttagattttttaggactccgaatggacttaattttttggaatttgctttaaatattgttttggtatatttccctgggttcttcacctgttacttcgagttgcctggcgtagacaagcttttaggaattatgggtccggcggggacctttccaagaaattatagggtaggctttccctgatgcccactttgtcatttagatattaggtgtctaattgcttgacttttcttttctctttatttttttagtgatggatttgaatcaagaattccatctcgatgcaatgaaaattgaagaaaatccagctgctactcttggaggctactccatccgggtagtcactaaatccaaaggaaaagggaaggttaagacaccgcctcccacaccttagctcaacgactccatttgggaaatggatcataaagaaaactactttaggtcgtatggcatgctaagctatatgccactgaagttggaatgcacaacattccgggactaatgtggcacagattttctaccgcaggagaatctactttcgtgagcactgacgggttcagcgcttggagctgggcccatatacaagcaggtcacatcttcccatgaggacttactttttagagtttgttgcgcagattgggatagcgcctttccaattaatacctctgacttacaagctcttaaccgaatggtatatcttttgaaaaattcataagttcgaggtgccccctggaggagattctgtacttttattgtgtgaagcctcaaccaatgaaaaccaactgtaagaaggtggggttctacaagctaaaaaggtattcagattcctattgtcctacctgccatacccaccgttcttatgacctccaggaatactggttcttcttcatagtttcccaataaagagggtgcctaccttcaacttagcttccaaatcccaggtgaatatttttacactcactgttttggtctttctctctttcaaaatcttttttattctggtttaagtgctaattgggctttttcacttctcttttttggcagagcttgtacctcggaacactgaaattgaggaaatgaccaagaaagtatcccaatacaaggcctttctgaagcacaactaaaagttgaaggtttggtcaccaccaagttgctccgtgaacatagactaattgctagtttctaaaacatcgataatgccagtggttggggccaaagtcaagctttgaaaaaggtcaaggaggtgatagctcgtgatttggctaagattatcacggaggccaccaaagaggataagctcctggaaggttattggatgctctgccacccaaattccttgacaggggaggaagaaattttggagagatatgttgtagcgtgcctgaatgggggtgtctcgggagacagaacttttagaagaggtaacaaacccttccgtgtactccgtacccccagcctttatcgcatgtctcgaatggatcaagggggatttgatagatatttcttaaacttagatcatcttaagtaccccgagaaggacttcctagacaggatagatgaaattgttaggattcctaataacctagagtcatctccagaaactattagaatggaccctttcatgactatgtctttccccaactttagagaatatgacaacttcattgattgggatgacatagtcctctttgcccgtggggaaccttatggttgc

SEQ ID NO: 235498 - DNA, 1457 bp, Cannabis indica
tgtatggttatttttgttgttatttttattgttattatcatgttattttatgtagttttctttttgttttcgtgttatttttatagaaaaccgtaaaaatataaaaattaaatctacataaaaatgtaattttttttacaaaaaatagtaccttatgtagtaattatcccaaaatactatcctggtccatttttattactttcatactctatggacggaaaagtgcatatatgcctccaccttccaaaacgacaaatagaaccagaaaaaaattcagaagaactatttaatctgacgatatggagaaaaaaaaaaggtgaaatctacaaacaaacagattcatcaacaacacaaaatcacaaatcaaaaaggttagaaacttaaacccaactaaattcttttaaatacaaataatgttgaaacataaatctggaaatcaataataaaattagactgtagcttctaaaattatttttgtataaatgcgtgattgaagtaaatgcattttaatatacataatttttgaaaaaaaaaatgctgattaggaattaaaataaaattttaaacaatttaaagttgttctagagtcgttattgtttaattacatgtaatttattagaaaatatgaaaatagataaaacttggacactcaaatgatagttggaaaactgaaacaaaaaatacaacttcaatagttgttttacgattgtcgtctgtttgcaaaaatgttgatttgttgaaatactgtcaaaaaatttcaggttatggaatctatacccattctcttgaagatcaatgagcaatgagaagaaggaaaaaattatatcaattacaaggttaatggagaattcataccaaaggatcacaaatatgaacacctcgtacatattctactctcttcaatagaatgcgacccagcaacaacaactatgcaaatctagttccaagtaaaagaaggaatacctccaataaaaatattcaacaatccgagcctattttttttacttgcgactgaagatcaaagaaactgattttaccacatattcattttgtgtcaacatgcagaacaataacacaacaaccgctacaatacctatgatcacatcaaaaacaacacaagaacaagaaaatatcgaaatgcttcagaacaacgcaccaacaatagaatcaaacacactggaacaaccaacaaatgaagaagaagaaattgaaacagaagaagcagacaatagccaattcaacatagttgactcaataaatcttgttgctaaagaaataatagaaaaactagaaaacaactataaaaaaatagatccagagattaacaacaataatgcaaagctcataatagataaattccacacagaatttgaaaaaggacagacatacaaagacaaagaaacactctaaagggtcctcagctactacacaattaaaaataattttcaattcaaggt

SEQ ID NO: 235499 - DNA, 778 bp, Cannabis indica
gagtcactctatgcatgccactatacccttttagggcaacctacattgagtgtcactctatctcttgttttttttttctaattattttcctaataatgtacttttttaatgatttttttagaaaagttaatttcaggttaatacattaaaaaataacaaaaaataaaattcattttacttacatatagcaacaaaaaaaaatactctacattttgataaattaatatttctactaataattacaaaatattttattactataacaatgaataaacaaaattaacataaatctaaaaattacaagtgttatcataattttatcctcatgacgtggcatgcttacgtggagtggacaaaatcagtgccacgtgacagtacatctcaccaaaaagaaggccaagtcagcatccgagcaaacgaagaccccgacactctaacggggatcaagtgacagatcagctcactcttaaaagctggccagctggtcgggcaaggattgcaatgtaggccccacaggacactcctacacgtggacatcaaaggtgggctgtgaagtaggccctaaaaacccaacagaatagctgaataatatatagaatcaagggtattttggtattttataaatatctaactaactatacgattttcaaaggatttgaattgtaaacctagggtttaagaatttctatataaaggccttaacctctagctaaaaacttaagttgcctctaagctagaaacctgatctcaagtgtctgataaactctctctctctctc

SEQ ID NO: 235500 - DNA, 1118 bp, Cannabis indica
acgaaactcttccgctgtgtatcggatttagtaccataaaaactgataattggtattaagagcagttccatgaatgtgtatacattaaatattgtgtaaattttatgcatttatatatatgatatgtatgtgaatggatggttattattgtgaatgtatgagaggtgatgaatcgttaattatatagtataattagatataggttttgttattattttttattagaaaataatgtaagccaatttgtggcatagaaatttttatataattttattttacgaaattattttacgtaaaaattatacattgtaatgttcattgcatgtgagcttggtttccaaacttgaaacccagccatgcatgccaaaatatcacatgcatgtgagttcgggttcatggaggaactgcggccatgcaagacctcaagtaccgtgcccatgctctactggaaggagtcgacctagggttgacgtatgcatggctcaatgataactctacaaattagagttattttaccatattttataagtaaaaatcggtttagttcttgactttttaattattttattaagtttttaagtatttttgaattttttagtctaaatattatttttatagctttttgtgtgttttagaataattttattatttagtattttattttatttagttttaattttatgttaatttttggtacttttaggtgtatttattggccaaagtttggacaaaattggagaaaatatgaagaattagagtcaaagagctatttttaaaaagaaaatcaaaactcagagcatcgaagcccagtcgcggatcagccaagctccccatccgagccgtccgtgtgctgattgtgtggcccaggcgcacgcgtggcgcttcatttcttcctgccagttccagctgcgtgggcccctcctctgacgcagttgttccccacaccagcctccatcagcgcgccacatgtcgtcatctctcctaccagccatctctaggagctctccatgtacgccacttgtcagctcctcattccagctgccttttccaggaattttgaagctgccaagtgtccctaatgcatataaaatgagctcaaaatgtcaatttcgaaaata

SEQ ID NO: 235501 - DNA, 847 bp, Cannabis indica
taaggttttttttctttaatctcatgtgttaaatgaatattaaattaattaatatatatttttaaataaaatatattaaatatataaaattataaacgtattttaaaaatatataaatataattggataaccatatgatgataattggatcggtttggtcggttatttattggatcgggggacatccaaagcacgatccgatctgattggatttttaaaatttacatccgatccgatccaattattattgaatatctgattctattggatcggttgtgattggattggataattttttgcacacccctacttaatatgtattgtattgatattatttccaaataaaattgcatatttatgtgttggagaagattggtggttttgggaaataatggacagtattccaattccccttcaagatcaatatttgcgggaaagtataatggggactctgaaattccattctgatgtgaaagatcagtcacagctgtaaatcatagagcatattcagaatttttagatatcttccaatgtaaatagtactttacgaataataattaaagcaccaaaaatacgctaaaaaaattatctcgtggcaaataaaaactactggtaaaccttctactgtaacaataataatgtatacacaatattacactctaaaattttgataaatacttgagaaatacactcaaaattctcacactcactagtgtagtaatctcaccatctccttacaaaatatttttcacaattttgtaggaactcttttttttctctcttagatttctctcactaagaggtattttcactatttctctctcaagagcatcactcttcactcttg

SEQ ID NO: 235502 - DNA, 707 bp, Cannabis indica
ataccgttgtcgttcttgttaaagtcaccacggactttaatccctagattttacttgaatggaagactagtattggattaaaatcttgtaaaatctttaatgtgctcgtgtgaacacaagtgattattttaataattgtgggacattaatattaaagtatcatagtttaaatgtatagatactttgagtgatgggtttaactatcctctcaaatgagagaatggtcttcaactatcctctcttcctagagtttggtcttttaccttcctctaagcctagcaactcctttttctttagtttttcctgtctgtttccattcggtttgcatcattctgtgtttttttttctggtgtgttttaaatcctctagtttcttaagttcccatcttttccttgtcctgggttttggtttttccttcttgggtttttcctagccgttttgtctttttgtctcttctgttgtgagtttgttgagagtagggtgtgtgtttcctttgactctctgtcctcggtgttggttttgtggggtagggggatctggtttggtgagggttggtggagtgttgtttgtttgactgtgcggttttttctcttgtcctttgtggttctgatttatggagctagttaatgctctttgtccccctaataaaggcaaaagtttctcttgtcttgaagcttctgtcatcctttctcctagctcttcatctc

SEQ ID NO: 235503 - DNA, 673 bp, Cannabis indica
ggccataacggagacacaactggcataaaggtcgatttgggggattatggctcctgaagttagatcgggcaccagttttggagaattgaggtgggcggtaagcattggttcttgaaccagtgaatgctatgttggcttgaagcttcatggagtgatctgtgagagagctgtgatgttccaggcgactctcatgggagagtaatagtgcctgaacttcttcaaaggtcagtgagtcactacgagcagtgatccctgagacgacaggatcgtactctggtccgagaccattgagtagctgcaggatgagatcttgatcaagaatcggagagccggccactgcaagagagtcggcaatggcttggactttatcaacatagtccgatatagtttgacctcctttgcgaatcgttgagaactgattcttgagctgaagcagtcttgctttagattgacttgaaaatttctgttcaagtgcacgccagactgcgtgggaggaggagaaacacgccaccgaggcaagaacaccttcggacatggacgatcggagccatgacaggagcaattgatcttttcttttccactgattgtactcagggtttggttctccggttaaaagattttgcagaggaggagtaccagcaagtaaaatctcatccagatcatgtccgatcac

SEQ ID NO: 235504 - DNA, 1049 bp, Cannabis indica
gctataataactaattccataatatttctgaccctttttaacttgtgattggcttaagattatgaaagaaaaaaaagaagaaagattttatctcatcacttctttttatatttttatatatagcagaagaaaaatttatctatcacagtgataaatgttttacttttgagaagcttattttaaaatagtcaatggctttgtgaagattttgagagaaagagacggcattcctgatcttcgtcgagcagctcgttatcgctattcaggcatcatttatctcgttgaatctgcaccgtcttgatgaacaacttgcgaaagatgtttgcgtaagttcagcatacatatacatttccccactgtttctagctgagaaagatgtttcctttgctgctcatgttatccttgaaatagttttattgttcaaatcttcaaattttaaagtagggtataccatacttatcatagtttgttgtacagcgtgcaacggagatatcagaagcaagcagctcttgggaaagtgaccaaattcctgcaaccaatgatcgttcaacattgaaagaaatatctgaagatttaattgattctttggcgaatatttctgaggttaaagcacctgccagtcttaatccgtctctgggattttgtgattcatcaaaacagattgatgatgccaaatctttaatgatgctacaaaaaattacatactgagaaacaaattgtgtcctctaaattttctataagtaaataacaagtattattttgttatgacttaaatatacccaattatattttactaaccaaatatgatagcacatatattattttaataaaaatgatatatttagatacaatctaaataaaacaacaaaaaactaaactctaaataaaactaatatttacgtgcctcggcacgtaacttctaactagttaaatatatacgtacggcgaagatctgtatgtacgtacgtacatatatatataaatatacatgacatgatgatgtatacgtgcatttttctatatacacatatataattggataacattat

SEQ ID NO: 235505 - DNA, 1200 bp, Cannabis indica
ttttcattatatatcaatattaatcatatctcaatctcaatattaattaattcataacaatattaattgtattacaatacaacatactatgaagtacaatatacttttcttacctttaatctaggttcatacatctcggtcaacccaagtggagaactatccccgatgatctcgccctatgtcacgacaacggtaaaccaataagtatttttcccaaaacactatttaacaaaggcaaaggacaacctatggttttcctaccaaaccccatagcacaaatatgctaaaataaaacttatattttagctctaaaacatacaccatacggtagagctcgttgcaagcttcgaaacggtatatagaatgtccaaaacagacaccgagtaaaaagttatggctaaaatacgaaattcagctttttcaaaaactgaccaaacagaattccggtttgtaccatccggaattccgatcctaaacagccaaaaacatgattttccttaactttaaaccctcctaactagctccaaacctaatcaaatcattcaaaactttacatgacacatatatatcattcatataacaatctcaatgtaacagaaattaaaaccatgttctcaatcaaaatctgccatgagagctcaaactttgagcttaaaactcaaacttgattctcttcaccccacaacaagcaaacctatcaaatgaacattcaaaatactcctaatctaacccagaaacacaaccaagcacttacttaaactccaacaactacagatgcagaattcactttcaaaacctaaacttttccaaagaaaaaagagagctaaaacttacctcaagcttccttccaagcttagcttcacctagttgtccatatatagtgttgaggagctgaaccttgaactgaagaaattgaaaaaaaaaactagttagtggattgttcttggttgctcgagagaaacgaggagaaggtgaatttttttgaaggtttgtttttcttttgtttttaagatatacatatacataaacttatcttatcttttaataataataatatataataaaattaatataaatataataataataataatcttaagagtaataataatataactgttatgaaataatataaaataatatagaataaatgagaagaaagaagaagaagaagatgaagagagaaagagaaagtgaatg

SEQ ID NO: 235506 - DNA, 829 bp, Cannabis indica
gtcttgaggaactggaaaaaattggaagccttctatgcgatgtacgtgaaagggatagggcacaaaaaagtatgatatttggcatgctcatggggtcattgtaatgcataggtgggtttgttgttcctagggtttgaaaaaaaatcacatcaccagacatagaaagaaaaaatgacctcatgatcgaactagaactggatgtcaggcagcattacaaatttcattcttaagatcatgtaacacttggaaatgcaaagagttcagcacaatgcacaacacgagttggctttaccaagagaggtacaattcttaagatcctatcgagttgtgtttgatggcttacttgctcaagttaggtctatgaactcggtaggaattaaaattgccaacataatgtctcatgctgctttacaaagtggtggttacgagagaatgccatgtcaatttgagaagtgtacaatagtgttgttggtgcagaacaagaagaaaagatagagatagaatcagaaggggcaaagatttcttgattgtctctcagagaaggacccaaatttctttattttctatcaggtggatgaggacaatcgattggctaacttattttgggcagatggaaactcacgtgtggactatgtggctttcaggaatgtactagggtttgatacaacttacatgaaaaatgaatacaataagcctctcactgttcttattggcctcaaccaccatttaaacacatgcatttttgggtttgctatcctcctccacgagaagcttgcatcttatccttggctacttaaaaaatttcttgaatgccatggacataagaagc

SEQ ID NO: 235507 - DNA, 855 bp, Cannabis indica
tataagctactaaacctacctcttagtcaagtgcatgcatactttagcttggcataatgaaaagtaaatttgaatacttatatgtcaaggcaataagaagatagctaagattaaagaccgcctgggtggtcacatatccatgataaaaggctttagggctaaacaatagtaatgttcaaaaatagagtgcctataggccaaaagtaagagcgtgaaagccatgaggacaaaaataagtaacgttcaaaagtaaaaggccaataggccatacaagagcatgaaactaatatgtctatgaaaataaaatcataaatgcaggatactactaaagtgtatctaatcatgtgcaggcctcagtggagtcgagccgaaagctgcagtattgcgaagaagtgggtcggccatggccgttgcacgctggccgatcacatggttagcagcttggcttgccacctctctataggtgggccgaccatagcctcatcgagaaggcccaatgacaactcctcaagttggatggtagtgtgataacctggtctgtttgcattttgctctcatacagttctctcccctgggcaagtgttctttcaaggaaagaagatcccatgtagaagaggtcaacattggggttgcgtagcttaaccttgcacaagagctccgaagacaagccaacatactcgtctctaatagcttgttggccattaacgaaaatttatagtgctttgtccttctttccgtgttccacctccatcctggaggcctcaacaacaagagtggtgttttctttgattctagtgctaagcaagtgctccaaatcgctgatcaagtcctacttttgttccacaagagcctggg

SEQ ID NO: 235508 - DNA, 1196 bp, Cannabis indica
tttagtacattctaattaataaaaataataatttatagatcaacttttctatggaacccaacgttccaatcttaatacaatgaatctatattacatatattttacataatatgaaaacaatttaatgtaatatatatcaataactattaatataattacactttattatagaaactttaaaacgcatcaggtttaaaaacatatagtaactattatgaattttaatatattaattattaattattatttttttataaatcagaaatgtattaatccacaaaatatttacaaagtaagagcatttcatgaaaatggagatctcaaaaatatttctaagctattacaaagtttgctaccactctctatcattttgactcactttttttggctaaagggaatcaattttatgtttaactgtaagctgaactttctttacaattgtatctacattatcaatcttatcattccatattttgtcatttttagtataccatattgagtacactaaccctgttatagccgctgcaagaactcttttcttgaaggtgctaatctttgcactgtttatccaccgaaggagcttgtcgaggtcattggaaagagtaccccaggacagccagcttttaatccgcttcaaacactcctgagctaactggcaattgaaaaacaaatgcctgaccgattcttcatggtgagtgcataagctgcagtttgcatcaactgctatatgaagtttatgcaatctatcttttgtttttaatcggttttgaactgaaagccaagtgatgaaactgtgtttagggttgttaaatctcccccacacttcattactccaagcgactttagtttgtggtgggcagagcaatttataaccgagagagatagtgtacctattggatgtgaattgttgagtgtcaattagttctttgagttgatcttttgcagcgacaatttgtttccaataccagctccctaggattggagctttgaagctccaccaatcttcctctttgagataaacattgtgaatccaacggacccaaaggttgtcttctttgttggcgatgacccacacgtacttaaacaaagcagcaacattctattaattattatttaatatatgtaattatactttattcttaaaaggtcagaaaaaattaaaatagtagatctatatatagatagtaggttgaatg

SEQ ID NO: 235509 - DNA, 1663 bp, Cannabis indica
tataagctgcttcaagaccaaaaacctcaatcggacaaccccgagggtcatcatttttggaaaaaaactatgggctttgaagataccgcctaagactaaggacctggtgtggagagcacatcaaattgccttgcaaccaaggtgaatctttgtattaaaaaggtcttgattgaaaacacttgtcctatgtgtggtgccttcgcgaaaacggaaatgcatctcttagtttcttgtccatttgcctggtcatgttgggagttctcgggtcttactgctgctggcagggagtcatcaaccttactgtcgtggctggaaacttctgctaccagtgtggacaacgaggctttatgtaaaattgtgatgatatgttgggccatatggtcagcaagaaatgatctcatatggcagcagcgtgttcgaacagttcgggatgtggttgtgtttgcaagttcgagacttgatcaatacataaaagctcaagggcgggggaatattcctttgctttcacctcttaaagaaggtgatggcttggagcgctggatcaaaccgaattcaggcatcaagctcaatattgatgcagccactttcgatcgtgtttccaaacatgggttcgggtgtgtggtgagggataacaatggggagctgctttcagtcattgcaggcttcaaaaatggcaaagtttcacccgagttagctgagattatgggcattagagaggctttaagctggttcaaggataacaactacacacgggcagtcatagaatctgacagcttggtctgtgttgaggcaattcgaagtgcagaaagatttgcttctggttttggtctaattgtggaggagtgcgaattgcgcgcgcatttcattctatttttttttttttgaataaaaagtgttctttattaacttgagcaatcgctcttcagaatagtctacatataacatttaggtattttttttaaattattttttatacggttataacttattagttgaatgagtagatattttagttttatttaattattaaataatgaattttttgacttaataaaaaattaaaaattataaaacattaatatgtgtgtataatttttatttaaatttttaattaattaataaaaaaatattataaacttaataaaaaaatcttaaaataagagaattaatcaatcatctattaataaaaaaaaaataaatgagagaattagggagagaatagataaaagtatttgaggtgattatagaccgctacatcaccgtctcatacttctcctttatatatatctattctatataaagtgtgcctatataaccgaattcttggtttatgagaaattcatgggttactttttatttatattaaaaataaaataatttatgagaaattcatgggttactttttatttatatataataaaataaataaaataaaacccattaaatttaaaaaaacactcattaaaagatcgatttttctcttcttcttctcttcttctcttctagaattaccattttcctataaaaacactcattaaaagaaaaaagttatattttagcacatacagtataattaagaagccataaaatatataatttcgtcttctgttaaataaaaataaaagcaacttaaagcattattataattatgctgctttgtaca

SEQ ID NO: 235510 - DNA, 886 bp, Cannabis indica
gtaaagggtagccgacaggtatttgtctgtttttagaggaacaattgaaactggaaagtttttggttggttgttttaggaggtgcatgaaatctctttggtttaagttactataaatgaagtcctcttccttcttttatatcttttagttctatatggttttaaacttcagatagatgacactaaaattaacttgagtaaatccttgttactccttttcattgtttgtatgattttgttaggcacatatgactatgcatatatagtggagtacttatcttccttatgattacatcgattttttctttttgatatcggggggaagggagattcgaacatgggaccttctcttcctctttactagtgtctgtttcatagctctctaattcccttttaccttgttctatccaaacataacttaaactttgcactttgaaaaagtagcttcaaaccataacttggcccggtatatggttgacatgtttcgattcttcatgctttttgtatagaaatacatctaacgatctaaggggcttttattgatttgcccattttatagaaactggaaaaagtgcagcttgggcttgaagaacagcaacaagcatgtgatgctcttaaaaataagtatactgcagaaattacagcacgaagacaatggtattctctcttgaaggtttttcaggtatgtcctttaaggtttagtttccattatatgacagtatagcaactcaaactatataggcacagtaattactgtcactttttttagcacctgtccttaaaattgatttcttagtatgttaccctaagcttagacaatcatgctgtataattgtgtttgtgtttacgttaatcctgtcatatcataactatgttgacaccaattc

SEQ ID NO: 235511 - DNA, 814 bp, Cannabis indica
cccttatcggtcctaaagctagtcattattgatctgcaatgtgcatcttgatctggttgtagccggcgtaggcatccatgaaggacaataacttgaatccggaggtggagtccaccatctggtcaatccggggcaaggggaagcagtctttcaggcaggctttgtttagatcagtaaagtctatacacacctgccatgtcccattcggtttaggcactagtaccggattggccagccattctggataatatgcatcccagatcatgccactagctagtaacttgtccaccgctttttccagagcttccgcctttactggatcaagggggcgcagtttctgctagactggtggcatatccgaattaacgttaaggacgtgggttattacatgaggacttatgccggtcatacctccttgtcaccacgcaaaaacatttgtggctgcccttagtgctttaaatattttatctttttcctctagttctaggctctttcccagccagaggatcttggtggggtcaaggtcgcatactggcacttcctcgacgtcttccataggttctacgatttttttcagatctcatacgaggatccaactcatcttcttctgccaattctagctcgatatcttcacggaccatcaataccggtaagtgggccgcaacattataaaattgcctggcctcaccctgattgcccctcacggttcctactccagcctcccgggtcggggaagtttcagacacaagtgccggatggacgtaattgcaccaaagtctaccagggctagacggccaaggattgcgttataggc

SEQ ID NO: 235512 - DNA, 968 bp, Cannabis indica
tataattttaaaaaaaaaaattgggaaaatttatttttaatgcttaaaaaaattatcctctaacaaaatttagacccctaattaatttatacaattaaatattattgttttcaatttctacctaaaatactttccctttcattttccttctctctttgtctctttctcttcctctttctcgcaccacgagacacttaaacctaggcaccgagaccaccaacaccaccactgaacctcttctcttccaccaccgaacttcctcatctacccaaaacttaatccaacaacccctaaatcttacctacccaaatctttctctcttcctcctcctcggcttcgctcaactaccattgccatttgccaccgcccacctaaccctcccccaaccagaaacttattgaatttgtatttatttaaaacattagatggtggtggagggtatgatagttgagtgttgttgataagtaaatgttattcgaataaataatatttttagttttaaatatatttatattattattcaaaaaatgaataataatctatattaaataaaaataagaatataaatattagtggtggactggttccgccactaataatagtatcaatttacgaatcagacagtattattagcggcgggagtgccagttcgctgctaatactaattgttagctgtaggggattcagtcagccgccaatactaattattaggaaccaagtattatcggcagagtaataaaaatggatcctatcaatattactcttttcacaatgaactaagggattcttattaccatcggactgctctacctttaataacgataaatattgtagtaatttgatattttttataagtaatttgcggccaaactctctatacttttatgtttgttacggtttaacccccttactcgaaaaattatggctaaactttctggactcgataattgttttgctctgtagtcctt

SEQ ID NO: 235513 - DNA, 1359 bp, Cannabis indica
tttcacctcccaggcacaacaaacacgcaccaaatcaggtcgtgtacaacatctcccaagttacctaaaggattatcaatgtgattctatcacaaacaccagcacagaccatcctttactcaattacatttcatatcataaattctctcttgagtttcgagcagctattctctcactcagccttacaccagaacctacatcctacaaacaagcccccaaattcaaggtttggaacaatgcaatggatgtagaaatagatgctctcgaaaaaaatcatacatggatcgttgttccacttccacccaaccaacatgtaattgacaataaatgggtatacaaaaagaaactaaatccagatggcactcttcaacattgcaaagcacgtttagtagctaaaggttacactcaattacctggcatcgattacatcgacacctacgcccccgtggccaaattcaataccttaagacttatttttgcattagcagccattcgcaattggcatttacatcacttagacataaacaatgcgtttctacatggggatctcaatgaggaagtttacatgaaacttccccaaggttatcaaccaaaacaccccattcctgccaatgccgtttgcaaactccaaaaaagcatatacgaccttaaacaatcctctcgccaatggtatgcaaaattgagtaccacattacttcaacataacttcatccaatctccaaatgatcactctctattcattagaaaccaatctggtatattcatggctctcctcatgtatgttgatgacatagttattgccaccaacaacatccctgccatgaacactttcattaccacacttgacaccaggtttaaacttaaggacttaggccctcttcgctttttcctcggattagagattgctcgatgttcgaaaggaatatcagtttcacaaagaccctttactctacagctcttacaagattcaggctgtcttggttctaaaccggtttctacccccatggaacccaataccaaactaagtaatgattcaggggacttacttcctaatccaaccccttatcgaagtctcatagggaaactcctatacctaactattacacggcctgatcttagttttgccgtgaataaacttagtcagtatcttcaagcccctcgacttcctcatatgcaagcttccacacgaattctacattacttaaagaactcaccaggacaaggccttttctttcatgcttctccaaccgacactgttcagctcaaagcttttgccgatgcagattggggtgcatgtctcgacacaagacgttctataacaggctactgcatatttcttggccaatccctcatctcatg

SEQ ID NO: 235514 - DNA, 1040 bp, Cannabis indica
gtctgggtctaggtctgagtcccggtgttggtttaggtcgcaagtcgcaagtccaggttcgggtccaagtccaagtatcgcttctggtctgagtttgggtttaggtttgggtgttattcctttctcaggtttgggttctagttgcagacctggtccgattccgattccaggtcttagatcgcgtctggatcccagtctgggtcttggtctaggtctgggtatggatttgggttcgggtcctggtcgtcttagtttggtttttggttttggtcctgttatggtcccatgtctgggttctagtccatgtccgggtctgattctagttccgggtccgggatcaggtcggactttaacatgggagacgatcttagacccagactctgacctaaaaatggatctggatactgacctagactcgaacccaaacccatgcccagaccgggattgaaacttaggacctggattcagaccgaaacctagacccaaacctggacttgtacccaagacttggacttggagctagcgcaaaacccagacccagaccgggatccggacatggaccgagacccgaccttggacttggaccaggactcagaccccgacccagaccaggacccgaacccgaacccaaacacgaaatcgaaatcagaactggactaggacccaaacccaaacatggacccggactaagacctaggaccaaaacttggatgggggatctagacctgggcctcagaacccagacactgattgaaacccgagactcagacccgaacttggatctggactcaaactcggtactccaacccatatctagacccggaccgggatcaaaaactcgaacccaaactcggactaggacttgaaccccaaccgggacctaggactcggacctagatggggacttggacctgggacctaggctttagaactggcatcgagaccaaagacgtgaccctagacccggaccctgaactaggacccaccagcacctggacccgaagtggaactagattgggacccgagaccgggatcctgat

SEQ ID NO: 235515 - DNA, 1187 bp, Cannabis indica
acgtctattttctttagtaaaaacaccccggccagtttaaggggtgaaattaaggaggcgttgggcattgattaccctgaaggttgcattaagtatttagggttgcccctttttcgatcaaggcagaaagatgcagacttcaatttcatccttgataatctcacgtcaaagcttcagggatggaaagcaaaaactttatccaaagcagggcgagctactctaattaagtcggtgggattgtctatgcctatgtatgctatgcagaccacgaaactctcttctcgaatggttaataagattgatggtttggttagagacttttggtgggggtttgagaaagggaatcatgggatccatctgaaggcctgggataaactttgtcttcccaaatctctaggtggtctgggattccggaaaactaaagagatgaatcaagcctttctggctaaatggggatggaatatcctcaatggaagccaatctctgtgctgtcgtgtcctcatggccaaatatctcaaagggaaagacattcttagctgcaggtataaaagttcagattcttggttttggaaaagttttgtgaaggcaacatccattttacgccaaggggcttgtaagttggtagctaatggagagaacactaagatctgggaggatccctggattccgcatcgtaaaggcttttgtccgaaaccaagtgggggtacctcttctaatgctaactatgtggctgaccttatgttaagcaacgggcagtgggatcttcagaaacttcgtcacacatttcaccgagagacggtctcggacattcttaaaggtggccatccttctgggattggcaccgatagatggatttggacgctagacagcaagggttgtttctcatccaaatcggcttatctggttcaggctctggctagagctcctcactgtgaggttgctccgaaactttggaataaactatggaatagtaaatctctggagagacacaaggttctgtggtggtgcatcctttctaatgcactcccggttagagcagagataggaaagaggtttcatatagtggacaccagctgcccattgtgtggtttggggaatgaatccattgaacatctgtttttatcatgcaatgtggcctttcatttttggcgttcctctccctggggcatttaccctgtgtgtgacac

SEQ ID NO: 235516 - DNA, 812 bp, Cannabis indica
ttaaagatttcataactttaatatgatgttaactgttttattcgtagtaaagttgtcttagttttctgtacagctacaatccacagcctcatatatgaataaggaatttttggatattcaatatagattattcaataataagttaacattcatataaatattaataacataaaattcatataaatattaatacttaacattcatacatatatcaaatatttaactctttatttaataatcaaaaaaatttcttatagactttttagggcatacaccctaataatttctcactttccctaaaagctaattcggcatatcccttagtcccatattagaaatataatccataaaagatttctctagtagcgtctttgggaatggatctgccaggttatgctctaatgtgatcttcaagaccattacatcacctctctataatactccttagtggatggtgcttcctcttaatgtgcttgcctctcttgtggctctttagtttcttggagttggccaccgctccactgttgtcagagtagagtaccaatggtttttatacttctaaaactactttcaaagctatgtaaaatttctttaacaaatctcttccttaactgcttcacaagttgctatatatctagcttccatggttgaatatacaatacttgtttccttaatgcatctctagactatagctcctccaccaatgtaaatactgaatagatgtcgactttcaactatctttatctaattgaaaatgagatcagtatatctagtaggatttaattctcaaccagaatatacaagcatgagat

SEQ ID NO: 235517 - DNA, 1022 bp, Cannabis indica
ggggtggtgaggcgaccccttctaaggaaaaggcaccagtcggggaggttattgaccttttcgaggagctaactattgcaaacccctctactccaaaaatacgataagtccaaggattctctaggaggaagctcggaaaggcctgagcaatcaaaaggtggatctgagctggcgaagagtggatctcagcagatacgggttcctactccacctttgccagtgcttccaaaggctaagaaaggcaaggagatgctcgcccattacatgagccggttggttcctaaagtgagtgagcaactggccggcgctgacaacgaatcttctctggagcttctgatgggaggagtcttgaaggaattcacaagggtaagtttttcttgaccgttccctttagtccttctttacacagttcagactctaaagttttttctttgtgaaggctagtctgaagttggcttacacttactcctgagctaagtctgccgcctccaagaatgaggaccttgaggcttccgaccagcttgaggctaccattggctccctatcggcacaagtgaatagccttcaggaggaaaggggagttcttcggactgtcttctgtcggcttgaagaggagaagaagacccaggaggaggagcttacagctgagattaagaagttcaagtcgaggatggcgaaacaggaagaaaaagtgcatgccttagagacagctggtctcgagattttttatgacttttggaaggcaaagacatgtatatcgagtactgtgcttctcaagtggcttatggtgagcccgatgtgactgcttcttcctctggccagaatgttgatgtacctcccattcaaacaacagatccgccagctcctaccgacccaaaagatccgaaccgagagcctgggagtccagctgtttaactactcttttatccttctcttttttttatatatctcattcggccataagtcctttttttaagacatcgtgaccgcccaagcggtctttaaacttggaattatttttc

SEQ ID NO: 235518 - DNA, 724 bp, Cannabis indica
agaggtctttttttaaaaccaaatggctttgcaacatcacccattcccttatccgcaatgcgtttcaaaatctattttaggatcaactttagataacttcgaacgaggtttcttagtattttttgaaatttttttaccccacattatataattctaatgtgaaacaaccaaaaaacaactcaaaaacaaaaagacataaatctcattttgcaccaacctaaaataaattacaaacaacaaaaaaatacgaaaaaacaacataacatcaattctacaatatattaattcaaaaacaattacaaaacaacaaaaaataataccacactagcatctaaatacatgagtgttagaagtattaaaataactaagaaactaccacattagtatcacacaccaaagagtccaatataatcccaaagtctaacatatatcacaaactaatttaatatgcaagatataattatcttggaaaatctgaagtattcatttgtagtattttgaggcttattgtggagcaagtactagtagagtaagtgcatgagacttgatcatgtgcataataatagagtacgtgtatgagaatggtataaggaaagtttgttacaattctaccttatatgagagaaaaattcatcatgtttaattttttttagttatcgattaaaaataattttttacacttgctattcaatctggcccatataaacacagacacacacatata

SEQ ID NO: 235519 - DNA, 1197 bp, Cannabis indica
ttgatgtttgtgaattttcgtgaaaaataattgtgattatgtttctgcaattatttttattggatagtatggaaaaataatggttgcgacagattatgttcttcacaatgaagtcttgcactatctttgatgtaagggttgcgagtggttcagcttccgtccacttagtaaagtaatcaactgctaccactgcatattacagtcctcctttacctttgggtagttgtctgatcaagtaaattacccaaatggcaaagcgccacagactctgcatttgagttaactcgttagatggagctcgaggtatctttgaaaatctctggcatttgtcacatttcttaacataggcttttgaatcttcaaccattgttggccagaagtaaccttgccttagaattttcatagataagctttgcccagcggaatgatttccacaaaattcgtcgtgcacctcagataggagtcgtgtagcttcttcttgagtgacacatcaaagcaatggcattgagaatcctcttctgtacataattccctctaccatgatataccgtccagccttccttctcattttccgagcttcattccaattatctgggagtttcttagagtcgaggtaggctgctattggtgtcatccagtttggggaagtatcaatcattttgatttcttccgtgctagtgatgttaggctcttcgaggaacaggataggaaccatgtttgccttgtcacttacattggtgcttgccaatcaagctaacgcgtctgcagttgtgttttcttcttttgcctgagaccgtagcttttgaattgtgcgagcaaatcatgtatttttctcagatatgctatcatcttttctccccgagcctcatattctccggatacatgatttaccagtagctgtgaatcactacagatttcaatgtgttcggctttaatcttctgggctagttttagcccagcaattagaatactcgacttcgttattagatgctttaaatccaaacttgactacagcgtgcaggtgtttcccccaggcatgacaagggcaattcctgcattgttacttggcttaggtgtttgtaccggctcggggttactttctggtatgctttctttcttgtctgtgcattttaccacaaagtttgccaaggcttggtctttgattgctgttcggggttggaaagtaatttcatattg

SEQ ID NO: 235520 - DNA, 864 bp, Cannabis indica
atgtaaatatagctcacttaaaacatatacattggtaatatttttttaagagtgtcaaaaatttacacattacttaaaaatacattattttattttatctttcttccacattatttttaacactttttattctaaaatgatccaatagtaaacatctctaaaaattattaaaatactattatattattatataatatatatattaaataaataagttttcttactttgtgataaaataataataaagaaataagaaaaaagatatgtaaaagatgatatagcatgtcattcttttgtcgcattctttttcattctactagtaaacatcaattaaaaaatgctaaaaatatatctatgtcatcaaacatcactaatagtaaaaatttaaaaaaaaaaaaaaatacttgctaggtagataagttagagtatctccaatatgagacaatgcctatagttgccaaaagtacatacgtcatcttaaaatattactttttttttttttacctctcacccacataaaattcgacatattttcatacaaaaattactctaataattgacaacttcaaaaattgttcatcatatctcacatatcaccttttaaatagtgataaagtaaccttttttttttaaaaaaaacttaaaaaataaataagtatatgccacattctaatggtcaaatataaacaataacattgatagactaggtttgaaaatactgaccacattatatatgtggaaaagaccactccatggacaactcctgttggagatctcttagttggcataatataaaatagttagaaaattttaataatacaccaccttaaaagggatgcactgatacatctctatttgttttag

SEQ ID NO: 235521 - DNA, 544 bp, Cannabis indica
gggcacaaaacccaacagtaatagtctactctcctttatttgtattgacttaagaacaaagaatacaatgattcctctcttaaagctcttacgatgaaatctctgagtatgctctcttagatctccctcaagtaattctttcgccccctttatcagtgagaatggatcactatttataaggcatagggaaggtttcccttttgcttaaaatgtctatgattggtgagaatacagattacatatatagaatacacagattatgggatttggacagcttgccatatctatgtgatatgatcccagagttatagggattgctcttgtgtttcacgatccaattgcttgaaatgctaagtgttgatatgcggctcggattgtccactgcttggttgggaggacctcgtctgtgcaggtatatgcactgttctactcggaacatctctttcaggtaggtatggagaatcaagtccacgtgtcaccagcatgtgatgccgcgtcaaagtgtaaaaattggaataacatttgcccccaagtctgtacggga

SEQ ID NO: 235522 - DNA, 1047 bp, Cannabis indica
atataactaagtatacgtgcattggacgtaacaataacctagtgtatttatatatatatatatatgtatgtatatatataaaggaatgcataaaccaagatgatgactccaatataaatatgttagataaatataaagatttgatttgataactcaaaataataataaaaaatataattaattggacaagatcaaattatcaatcacccaaatatttttggacaaaagcgaagtgaatataaattattttatttatatttcacaagcatcacaatattttataatgatagaataaaatataagtgtaattattcagttatgttagcaaagttagttacataattttaatttttttatgcttacaaaatttgtaaattcctcactcaaattatttaaagtagcttctcatgttaattttgaagggtgaataacctgtgtcatccattctctatagtctataatatcaactcattaacctacatactcgtgagtatgttgaaaaattaagggatatacacaaaaggttattcacctcgaaataatcataatgacataggttgatagagtctcgcataaatatattcagtataacattacaaaagtatacgtgagcactttaaaaataattttatagaagtataaaaacttatatagaatttctaactctatcagtggactaaatattaagattctaaatgatgcttccactgatgatcatttcaaagcctatttgcatgtttccatatgcaagtttgggtgtcacacattcgccaaccttgcacttatattgtgatagtcaatcggccctctacattgctcaaaattctgtctttcatgagcgtaccaagcatattgaagttgattgtcattatgtgcgtgatgccattcatgatggaattatttctacgtatcatgtgtctactgatgatcagcttgcatacatcttcaccaaggcccttgcaagcgcaagtttttgtatctacttggcaagttgggcacttgtgatctttatgctccaaattgagggggtattaagattatattaga

SEQ ID NO: 235523 - DNA, 750 bp, Cannabis indica
atatgtctaactcgacgatgataacgaaatactagatgttgtgatgtacaatcagttcaccatttaaattgttgagttgacatttttcctaaataatatttcttttaaactttacaaaatacatatattgatccttttaatttttctaaaacaaaaaataaatattaaagtcatatgttgttatgatttatcacaaattattttatcacattaagaataattattatatgagtatatatatatagagattaacatactatttaatattaataacaatgtgcatatcataactatatacataattatggttcacttgcaccaagtttacttttataaaacaaatcgttcaaataataatataaaattagttaccaaaatctaaaaaaaactaaaacttaaataaaactaacatttatgtggctcaccatgtaacataacattttcttcagttggattacgcgaaatagtgactaacatccaaatttcagatttgatgaaaaatctgcaacagaatgaggtaaaaactatactacaatgtttattttataaaacttttgtgtgacaagtttatacaatcgcaaggaaaaaatcgtatgtgacaagccaaacatgcagacaggaaggattttctacaccacggtatattacaaaacatatgatgttattaaaattaagttaaaattaaaaaagatactaacaatcttattatgcattttacagtgctatagcatatgttgaacttgatgacaa

SEQ ID NO: 235524 - DNA, 1071 bp, Cannabis indica
aaaaagagacaaaggtcacctaccttagactgatcccctctcaagtttattcataaacttctcttgtggtggaggaaaaccgtgctaacagagatattttgatataaaacaaaatatctacatcaggattgaaagaactccagcaaaggataaatctaactatacagtatattaccccaatccctgcataaatctagacaaatcctcaaaatattttaacttaaaaatccaagttgctacccaaaattttcttttctcccatatttccttgtatttctattgttcatacaagtttgaggttttccattttaaaatactaataaaaaaatgcatacaaagtgtattaaaatcacaaccattttaaaaatcttggttatgaacctatatgaaaagaataactaggtccagaacaagatcaagcattaaaattcttaagagttaaaaatttaaaaagctacccaatttccctaatgacacacatacaatttttttcacaaaatttggatcattttatcaacttttatgcataaaatattctctaacaagaaagataatgctgcagccgccacaaatataaactcaaaagtaataaaattgtccaaacatcttaaggcaacacacagaaccagtttaaaaggagaagaaagaaatgaattaatcaagctaggaacattctcaaatactttgagcagaaaatcaatgaaattactccacttcaggtcatcagaaaacagttggaaaatccataaaaaaaattacgaaaaaataaaatacctgatcttgttgaatagaattcagcttagtcttgtacaagttcacatattttcgacgataacttctgaaaaatatgaagttacttattaaaataagcaaattagataaaataatgaacttgttttatgtaatgaaaaaattcaatgaacgaggacgaatcaatatatcaatataaatatatatatcataaaacagtataactgagataatacaaaatggtaaagctaattacagttaaatattccttattttacattgccaacaagttagaaaactgtaatagagagagagagagag

SEQ ID NO: 235525 - DNA, 2576 bp, Cannabis indica
attactttccggtatccctgcttaattgcctcctccgctcccttgcagatcgccattgtctctccgagaagcggatcgcagacagtgaggcggaaggtgatgcagttaatgaaggctccagcttcatttctgaacacaacagctccggctgcttgcgagttgctaatggaaacgtccgaattacacataacccagcccggaggaggggggagccacgctttcaactccacagcctgaggccttaagtcctccgagatctcgccaattcttgtatttatatgctggaggatggaaccaatgggagtagcagagcctccatgagaaaggttatttctctcgcgccatatactttcaaagattacagcagctcctcctaagaaaaggttgagatggatgtgttgtggacgatgggattccaccgagaaccaatcgagccaactttcccagcaatcaaagtggttggtggtagttcggaactgccagcagcaaacaaaccagacgactctggtgaaattgcagctccaaaagagatgcattgaagtttccatctcgccacggcaaagggagcagccaaggtctattgagggaataaaaggactcaatctatctttggtggtaagaccataggcatgaatcttagctccccaaattaatctccatttcctgtctccatgcgccatagaatccaagttcttgatcaacttataggccgatttaatggagaatcgcccattgttctccgggagccagagccatgtgtcctcacaaggtgtgttaggaagagtgatatttagtatgcgtttagcatcatcttcctggaaccattgtcggactagaggttcattccagcagccttgggtgatgaagttactaaccatgctcattcctgctgatgcgtcgaacttaggcaaaggttggagcgtgccccccggtacccaggagtcgaaccagatggaggttagattaccatctccaattttgcgacaaagccccttctccaaggttgttctagctcttaaaattgccttccaaagaatggaatccgttggtttcaaagctctgtcaaggaaactttcatttttgatatacttagcctccatgagttttcgccaaagactatccttatccgttaggactttccaagcccattttaagaggaaggctttgtttattgcaccgcttgtcttaaatccaaggcctccattgacttttgggcggcagagagtttcccatgcaattgtgtgtagtcttctgttctgttcagagtcgccccaccagaagtctcggaggagtttgtcaattttcttcgacgtagcggctggtatgacatcagatgatgccacgtaagtcgctagggaggatccaacggacttaatgaggcaagccttgctagcataagataacagcttggctttccagccttgaacccggtgaagcacacgttcagcaagaaacttggtgtcttccgtgcgcttgagggagcgaaacaatggaatccctaagtaagatgccttcttagacatccacttcatgcccagcagctgagagattgaatgcctagttgttgcagggactttcttagagaaatagaccgacgatttgttaatattgacggtttggccagatagcttacagtatttgtcgaggtagtccatgaaggaggctgcttcacgggtggaagcttgcccaaacagaatgatgtcgtcggcaaaaaggagatgacttactgcgacaccattacgtcccatgcaaaaaccttttatcaaccccttatccaccttgtcgataattaatctagataacacatccgccccgacaataaagagagccggggacagagggtctccttgcctcagccccctttcgggtttgatacgacccgccaccgaaccgttaagtaaaagtttaatctcgttaaccatgatgcaggagcttatccatttgatgaagatgttggggaagcctaaacattgtagcaccgagagaatgaagtcccactccatcttgtcatatgccttttccatgtcgagttttatcatcatgaagcctcgcttacccttcttcttagacatggagtgaacgatttcccttgcgatcatagagttttctgctatatgtcttcctttcacaaacgcagcttggttgggcgagataatcttgtcaagaatgtagcgcagtctattggcgataactttggatattaccttataggatacattgcaaagtgctatcggtctgtagtcagtaacgaggactggagattctttcttcggaactagaacaatggaggtgtcatttattactttcagtaattccgaggtcctgaagaagtgcaagaccatcgccaataaatctggttccactgtcccccaatggtgcgaataaaagcttgtgggaaggccatccgggcccggggccttatctttccccatctcgaacagggctgcagatatttcttcattcccagggaggagttgaaggcattccatatcatggtcatcaaggcttggtgttagaatttcctcaagagcttccgttgtacagtgggaatttttttggaaaagttcctcaaattt

SEQ ID NO: 235526 - DNA, 1249 bp, Cannabis indica
aatataaaaatgcacctcatcatctttatttgattttatcttatgcatgaagagctgatggataagagcacccgaaaacgctaatggctctcactcaaaaaaaaattgttgaaaggggatccctccttcaccctttccaacaactccatttccacaaatttggcttttactttggggtaataccaactaccccctcgccaagtaacacgaccagtgtaatgttcagacactggaagtaaaagtcgaggaactttggaagactgcagagaaaaaaaaaacaaatacatgttaaaaaaatatataaaaaaattatgacacaaaatttataaaaacatgttgcaaaaatataaacagaaaaaaaattaaaaacaaaattaagtgggtgggggcatcggcccatgcatcgggacctatcggaccctatcgggctcatcggacaactccaaaatgaaacacaaaaaattttaaaatcaagtaagcatcgggcaccatcgggccctacatcgggcccatcgggccaatcaaaggagaagtatgaaaaaacttgaagtagggggcatcgggctgggcatcgggcccctatcaggcccatcggccttgctccaacctttcaaaataaaaacaagcatcgggctgggcatcgggcccctatcgggcccatcgggcttggtcaaacttttcaaaataaaaataaccatcgggcccaggcatcgggcccctatcgggcttggtccgacttttcacaaaaccaaaacaaccatcggcccctatcgggcctaggcatcgggcccctatcgggccttcatcttctgcgcctaaatgacctaaccatcccgatgcatcgggcttgcatcgggcctgcatcgggccaactgaaaaatttcgaatccttcccaaaattcatcacagatctattctaaccctagatctaatcaaatcacaccttaaatctatacataaacaacattttaaccataattaataagataaaaaatcaaaaatgaaaggtggaattaccttgctcgcgtggtatgggttcggaccgtggcgtgttgggttcggtccgtggggtggcgacttccctccatgcggtggtggattcatcgtttgagtgggtggtgcgatttggtttgggggagcttcggttgtgcgagtgggttgagagaataagggacgaagagagagagagagagagtgacttttgaaatgaggggggtaaaattgggtttatgaaaatatatcccacttt

SEQ ID NO: 235527 - DNA, 896 bp, Cannabis indica
acaaaacactgagggtgttcattttggggatttagtaacttctgggaatgaaaatatcaaatgcaaccaaactaaatttatattaaatgacttgaaagtttgtatcttcaagtggatcccatttttagctctatttgaagaaaatcttgaacccttcaacactaagttccacattaccttaatctaaactcctcttacctctaatttcgccaaacttgagttccacattaccttagtctaaagtactcttaccgctctactcaccaaatccagcccccaaaccaaacaccccatatgtttaataggaaggaggggttgattatttggaaaaggaaatagtcctttacttttcttccgagtgtttggcaatgtattaagaggtgaaaatcaagcttttgtttggtaggaaggaaagtggatatatgtgaaacgataaattaatcacttgaaaagtaagcaaatctaaatccatcaaatttaaaggtattccaaatttaataagattttacagtctattacctaatcccattccatataagatccttccaccaaataaattatcctatcacaaatccttccatagctccacctccctatctttccaatcctttctatcaagcagctacattgtgcaaatagcaatgatgagctatcatcatgcaatttattaatcttactatatctttgattttaacttattattttgacctaatttcttttgacgtaaatgggaaatgtccaatatacatctaaacatgtgaaaataaaataaatcaaccaatttcatcagcattaccatgcatatcaaatctatgtctccagccagccatgccacctttggcattactattccaagcttcttcaaatccagcaagctcatctgcagtaacaaagct

SEQ ID NO: 235528 - DNA, 1119 bp, Cannabis indica
ttagctaaatgcatgtttaggtcttctgatggcaatcccctaaactgcactatggattcaactatttgaagaatggctggcttgatctcaaagttatttgctttaatggcatgtgatttttatataggactggatccctgccgaagtgggtagcacataatccctcaagcatttatcatgtggattgcgaccattgacctggtcttctacgacacccccattattgtcattattagccatggcttcttctaattcaacccttgtagaagctctttctaaccttttgtttcttctattttgcctacaggtcttctaaatttgaggatcaacaggaactcttctagtttgtccttgatggcgcataaactacctattcttgagaaaaaattaacacaaaaattagcaaaaagcagaaagagaaaacccaattagaataaaattaaaattttttaatattaacttaaagcagacaatggaacaaaaacattatgtgatttttccaacacgcaagtgtacgtatcgttttatcaggtaatactcaagtaagtaagattgttcctacgaggactgtagctaaataccaaacaattaaattcctgattctatttggaaatcaaatgtaaggattttaaaacaaaataatctaagaaaaaattaaataacaaaataaacaattagttatggtaaaattaacaatgattaaagtttagggtaattaattttaattgaatctattttaactggtttaacataatttaattctaaaagtccaatttttatgtgatagcgaatttattaagaaactaatatttgggctaggacatataaatctcaacctatatataaattttctattctcgtgataaatttaaacacataggaggcattaaacataaaaattctaaaagctacatagaccatatatgtaaagaccgcttagatttaatttggaaattagcagataattacggctttattatgaaagttaaattttaatattgaattaattatttatgatgatttatttgaattcagaatgcatttttatgtcacatatagaaatttcataattttgcatatttggtgcccggcaacattggaacgcggtgtatggctttt

SEQ ID NO: 235529 - DNA, 1346 bp, Cannabis indica
ggaagtgttacagctggatttatcggtttagagattctctggaaagggcatttatctgatctcgaaatagcaagcggctacttcgttggacagtttgtgaggctaaaggaaaatatccgtgctccccgattcgaatggcctcgtaagagtggaggagcctttgcaactggcagggtctcacaagtccttccaaacggttgcctcgttgtaatgtttcccgggaggtttgtgtttgcacttggagataaacataatagcttcttagcagacccagctgaagttgaactagtgtcctttgatacttgtcctgggttagtacagaagtatcaacatattgaggattttcactgggctgtgaggccactggcaattgcttttggtttgtttgcagccatgaaatttagcttatttctcggatgaggtgtgagcttaaaactgaggaaggagcggaaaaagccgactagatccaatgatagtcatcaggatggccaatcttccagcactgcagcttggcttctacctccagttgcaaatattctcttcaaagaaggcgttactccagctacggccaggtaattaccaaagatttcaaccatttggcattgacttcaaggtaatgtatttagttatgttgtaatgccaaaagtataagaaaatgttagcgtgtatataattaactttcactgtttataaccgtacatttgcaaatacacattatacatatgtatatgatgtgttacaattgcaaagttgattcacctggcattgtatatataaaaaaagaattttcttttagatcagctgttgcaaagctgttgtttggtcttggctaggcaatttgttaagtaagatttttacttaacaagtataatatttaagttgatgaagttaggatgatcaaattgttgtttccttgcattctaagtatttaacattgacatctttttctctcttctcatttcccatgcaattatttgtcttacttggcagctattatcatcttttgtttttgctaaaggcagctattatcttgattcttgtgtggtgcctattttcatcattaccatctagcttttttttttttttttttaactttatttttgctgattgctaccataattgtaaaatgtgacaaaactacttatggtagaactattaaatggtatttaatttacatcttaatttcattaaattttcgaaagtttttttccttaccaattttttttcagtaacaagtgtttttttttttttgttatttttttttttttttttattaaacatatgataaaggatagaaaataaattgttaatatatataatgacattactatgcagaatattacgtg

SEQ ID NO: 235530 - DNA, 1099 bp, Cannabis indica
gatcctttttcccatacatatttccgatttctctagattattgttcccccgaaagtctagagtacctttgcaaaacaagcttcatagtatcacattcactttcctttgcattgaggaacacaaagctgtcgtcggcaaagaataaatgagaaactttgactctatcttttccaaactgaactccattaagctggctagctctctcggcttcatgtataaggcatgataatccctccgaacaaagtaagaagaggtaaggagatagtgaatcaccttggcgaagaccccgggttggttggaaaaatccaagcttctccccattgataaggactgagaacgagacacttgttacacatcgcattattttttcaatccatttttcctcatacccgagccccctcatcatagtgattaagaagttccactcaactctatcgtaggctttggacatatccaatttcagagccattttcttgccattcccaaatcgttttgtcttcatgcagtgtaggctttcgaacccaattatagcattatcttggataagtcttcctcccacaaaagcactttgttcctccgatattacttgatgaagactgtttttcattcttctagctaggcacatggccactattttgtacaccacattacaaagacttattggtctgaaatccgtcatctttgtggccttagaagttttcggtataaggcaaattaaagtatcattgagttccttcactggcatgtcatcatttagaattcctaaacagacttttgttacctcgggaccgatagtagaccaatacttcctatagaacataccgggcaaaccatcacttccaggggccttttgggggtgtatatctcgcatcgccttgaatatatcctccattgtgaaaggatctaggagctgttcattggttaaccttaaaattctgtgggggacaagcctttgaaattctcttaaatcggcctcagtagcaggattggaggtgaataatcttttgaaataatcacaaggcaccctacccatatgccgattccctgtgacccattgaagttgctcattcaccagcccctttattgtgtttttttcctt

SEQ ID NO: 235531 - DNA, 809 bp, Cannabis indica
agccagagaaccaagaatggtttttgcatagaagatcttaaccaattgagcagtaattgatctttgcgtttccaggtggtaaattcgggattggtggcgccattaacaagaactcgagcggtagcaataccagtgagcagtatatcatcgagaccatgaccgatgatggtggggatgacttgcaatttccacgcaagaaaattggttcgatccaatcgaacagtgagggaagaattcagggaattctgaaaaggactccattgttgaatagctggagaagccggagagcagagtttggagcagcagtttgagcagtgggttcagggtgtcgaggatccatgaagacgttggtcaaacactatttgataccatgtaaaatctgttgaacttatctatgcaattgtaggaggacacaattgaaaaattaaatcacaagactttgcaaaagttagcaagtcttgattagagcatggtatttatagaaagctgagtacagagtttgttacagaacaaagaaacgaaaaataagcaacagaagggaacaattacataacaaccactagctgttataactaactatccctaactaactctgtagacagtttttcagaatcaaatccaaatataaaggaacaatacatataaggtgaatctcatgatattttacaactatgttatctttatgtttttcttttacttttagtttctcagtaaaaaatataaaatatttattttattttctcaagttattaacctttaaacatatatatttatatatctgatctcatgttatttgtgcccctataata

SEQ ID NO: 235532 - DNA, 1138 bp, Cannabis indica
gaacttaatttcgatataggaccactactagaaaaaacaggttttagtgacacacattgagtaactctaaaacggtttagtgacacttcaacgcgcatcactaatgagggtgactggaaagacagtttttagtgacacttcacacgtgtcactgaacccttttacattcactttttccgcgtcactatatgcgtatagagtcagattttgtcagactgaaaaagtacagccacacgctaaaagtgtcactatatctattttttctttttctttttaatttttattattatttttagggatatagtgacacaaaaaatgtcactatattaaatattttttttaaaaaataataattaattattactacataccatttaaacaaaacaaattaaaatctttttttttttttgctggaaaataaacttcattgaagaaaaaaataccaaaatagaacaaggttcacggttgcaacaggggtgcaacctccccaacatcaaacacaggacaaacattcaaggaagccgcacgcgcagcaagatgatatgccaccccattatccctacgagggatccaactaaccccaaacagcgccccaaaagagaaaccagaaaacaaagagagaaacacctgagcaagtttccagtcaggcaccatctgcttcgtaaccgcatcaacaaggacctggcagtccgaaaaacaaattaaaatctattacaacattaaacacaaatttaaactaaaatattcatcaaaaaaagtggataacaaatacagtacaaaaaatttatgtgtctaatgcatagtaagtatcctcaattttaataaaagcataacaaaaacctgtaggaagctgctgttttccttggcggcatctgcagaaaaagcataagagaactcaacttaacacttttacattcattaatatttaaaaacaaaatgaaatggaaaactgaatagttgccactataaattacttgaccaacgacattcaaattattatgtaatttataatgacataacctatcagtagttcaagcaaagaaatgttgcccacattttaagttatcaacaattacataaagaaccctatgatttaatctcccaaaaacatatttttactaaaataccacaatcaact

SEQ ID NO: 235533 - DNA, 1074 bp, Cannabis indica
ctagggctcaaaccttgcgccgccgatgtggtttctgttgtcgtcgtcgtcgccgttaatcggcgtagcagtccgtcctggcctcctcttcccaagtgacggttccaccttctccttcccatttccgttagctgccatcaaacagagaccatcattaaattcttttgtcttctcccttacaggtaaacttctcatccaccattactattgtgtagatgtcccatctgagtttaattctttcccatttctacttctcaatttttctctgcttgattacaaaggaaagccctttgctgaaatggtattaattgaaccccaacctcccgcacccccctggatgatcattaactctattgttgtagaggtcactgccatttttctaggagccactggcatctttgtaggaataatcatttgttcccctgacatggagatatcactctttgccgaaatgctcttgccagagtccctcccagtttgctcaaggctttatatatcaggacattactcgattgactttgcagcctgtctctttcagcaacctttccttttatatctctgtctaaatactggtttttccccttttgttggcctttttaatttctgccctgctttgatcatggacgacttgtccaattccttcactgctactcttaatctcactgctcttgaaacccaaatacattccttctctgaaacacctgaccaccctgaggatgatggccgtgaagaaccctctgccttcttagccgtcaagcttctgaccaatcgccattttaatcctgaggccttcaagaatcgactcaagcaaatgtggcctgaatgattttccatcaatatccttgaaaaagaacccaatttctttactgtcgaatttggatacttcggagacaggcgccgtgtactcattggccaaccttggcattttgattacaaactcatcgttatgacaccattggaagcgggttctgtggtgaccgctgaatcgctcacaaccactcctttctggatacaagtatctggaattcctttcttaaagcggtcccgtgccttggctcaacgacttggtgaagt

SEQ ID NO: 235534 - DNA, 826 bp, Cannabis indica
gtgtctcctagtagggaaaaacagtagactttttttccgaaaatggtctatcattttctacaagaaacgtgaaaccccaagtttcaacttctaaaaacccaaccgaaacttaaataattcattaaaaaacttcacagagcaatcatataacatccatacaacaatctctacgtgaaaaaagtcaaaatcatgccccaacatgaaaaataccatgagagctcaagctttgagcttaaaagctcaaacttgactctcacctcaaaacaataacaaaactatcaaaatagcatccaaaacactcctaattcaacacaaaaataaaaccaaaaccctacttatatctcaaaagccacagaaccaaattttaacttctaaacctaacgttctcatgaagaaagaaaccaaacattacctttagtttttaccccaagctcttttttctcctagcagattactaaaggtgctgaagagcttgttggatagaagaaagtaaaaaaaaaattggtttggttgcttcagttttgcttcgctcgagagaagaaggagaaggtgcaaggtaagggttttgttcacaatttcttagccattatgaaatctctaacccttgtgcatttagtcaaccccgagtactattaactacaattactacaaaaagtacaattcccgtcaatttctatatgtcatttaaagaatttacgtttatttataaaaccgacgtgtataccatagtcgcaaatagttttttattaacgttgtttttgaaatgacgcaaaaaacaattatcttcatttaaaaagtaatgtaaaacatacgcacttttgtgata

SEQ ID NO: 235535 - DNA, 668 bp, Cannabis indica
gtaagggaaggcccaatggaggcttgaagcgggaacattacaaatgatattagagtcttgacccagccaaaagtgtggttgatgaggacgtcagacccccaaaggaggtaattattttagttagagtctcgtgattcgcaggggaaaagattgagagttgtacaattctacatcgcctgggaaaggtcaagtgtgatgataattctgaaactgtgtatgtatgagactacacagttgaagaggatttaaatgaattgatttgtactatttataccaacaagattcatctactttttggtagcccatcataaaagaactctaaagttaagcgtgcttaatgtggggtaatttcaagatgactgacttcctgagaagtgttccatataagtggaccaatgagcacaaagtgcattagaaagactcgtgttggtctgcagggtcagtcgttattctatgaagtagccaagagtgatgtagccatgtataagagtcaatagtccgtgggcgaaggtcaatggagtcttgaagtggggacgttataagtaatgtgttggattctattgcactgcattaatattctttattacatactatgttttgtattgacttgtactatagcttttttaaaattatattatctttatcataaactcgatcccaactccgac

SEQ ID NO: 235536 - DNA, 998 bp, Cannabis indica
aagtgaatattagggatgctctaataggacaaacataagttttgatgtaaaacgagattatttagttatttacatagtttatgtgatttttagattctgaatttaatgcaagttatatgttaatttacttcaaagatgtaagtagataatgtatgatttaggaccttaatgatctgagaagagttaaggttaatttgataatctgtaatcaccaaaaaggagataattaataattaacattaacaattgagaaactaaactaacaggattcatattcctaaatattcatccataattaattacactttttattattattttactgcttttcaatttttagttatttaattattcaaccttattatttattctaccagatagaaacaagaattcaattgattggtacttagctacagtccccgtgggaacgatcttacttacctgagtattacttgttaaaacgatacgtatacttgtgtgtaggatttatcacaacattatgtccatagtttttatttttaagtagtgatttatctcaaaacaattatctttcttattttgtttcagagggagaaggaagtatttaaaggattaatgatgattgcacaatagggtgattaagaaactatttgtgttgtgaaggtaaagccaaatcctttgcttctatttttctcttttctttttgatttggcatcctaggctttctcctttgagtgacagagagtttagaaatttgtttcatagttagttgttgtcgtacgtaggtgatgtcaagggaatccttgaaaatttatggcaccactttttcagtctatatatttcaacttatatcctgaaaattggagctcctacatgtcttaattaatatatagtttatgtatatcttactgagtttgttggctcatcagtttgctaccatgtgtaagtaaggaaaaagcgaaagtggaggaacagtgagttgttggcttggcaatgattgtacatactgcggcaatgca

SEQ ID NO: 235537 - DNA, 624 bp, Cannabis indica
taaataaaactagcaatacgtggctcgacacgtacattcacctagtatattgttaagtaatttgtgagaattttaagcttaaagattaaagttttatgtgattaaattacgaaattaattttgtaattttgtaattttattgattatataaactaaaattaattgtgcttaaatgatttctaattgtttaataacgttccttaatattttaattaccgattctgtggaaaaatttataggtatcataataaactttctctttgaaaattttgaattacacaaattagatctaccttcagtttaagtgttttacacaaaattgataccataaactttctcttttggagttataccttctatcaagaagtcggccaaggcttggctcttgatggatgttcgaaggtggtatgttatgtcgaactgccccaattcgattgaccattttatcaatcttctagctagaagcatttagttttgataaaacttgtctcaagggttgatcggttaacagttttatgggatgcgcctggaagtacggccgtaacttacgagacacgtggactaggcacaaagcaagtttttctagagggggatatctagattctgcccctagtaacctcttac

SEQ ID NO: 235538 - DNA, 1006 bp, Cannabis indica
agagagagaggagaagaagaagttgaaatgttaaaaagttgaaaagttgcatgtaattatcaaataagtacaagttttttttttttttatttgtttaatttcaaaaaaaaaaaaaactttaaaaaagttaacttttcatttttgccaattttttatttttaaatcacatgagccaaacaaaagattattttttttttattttttacctttcacataatagtcactaatagagatgctaaaaacttatcacatagtaatcattgtgagaggtattcaacctcttagacatagttgctgaagaataaaacagagcatgaagaagaagaagaagaagaagtaagaagaggaaagatagagagaaaggaaaaagaagaaagaagtctcttattgattctgaactttacaagtatatatacacattattaaagaactgtacaataaatcacgtgcaacaataggcagttaggtagttaaccgaattaactacctacttaacaactagcctaactaactattttaacaaactgtcctaacatgtcccttcaaacttagcacatgtgtgatcaccaatggtaagttggtaatgtgatgtgtagctcagtgaatagagaatgcaaccaagtgagttcagtgacagtgttagccaggctccaaaactcagcttcagtgttgcttcgagagatagtatgttgttttttgcattgccatgcaatgatgttggggccaaaaaagattgcatacgatccaaaagtagattacctgtcatggggatcacgagcctaatctgcatcacaaaatgcaatgagctcatagatttctaattttctgagatgaatgccatagtccatggtgccacttaggtatcttaggattctcttaacagcaagtcagtgaacttggagagaattggccatgaattgacatgctttgttgacactgaatgagatttcaagtttggtgataaccagatattgtaaagctcgaactatggatctatattgctgag

SEQ ID NO: 235539 - DNA, 1145 bp, Cannabis indica
ggtgttggtttaggtcccaggtcacaggtcccggtctgggtccaagtcacggtatgggttctggtctgagtttgggtttaggtttgggtcctgttacaatcccatgtctgggttctagtctcactcctagtccaattccagttctgggtctgggatcgagtcgaacctgaacctgggactcgatcccagacctagactcaaacctagacatggatctggataagaatctgaactcgaacccagacccggacccacacccaggccgggatcgaagcttaggacctggatccgaaccgagacccagacccaaacctggacctgtacccaagacttgcactcgaacctggacaaaaacccatacaaaaccttggactcggaccaagactcagaccccgacccagacctggacaagaacccgaacccggacacggaatcaaaattaaaactgggactaggacccgaacacaaacatggactcggaatgggacctaagacccgaacctggatgggagacctggaccccggcctcgaaacccagacccggatcggaactggagactcagacctggacctggatctagacccaaacccaggactcgaacccagatctttaccatgaccgggatcaaaaacccaaacctgaactcggactaggacttgaaccccgaccaggtcctagacttggaccgggacctaggacccagacctggatgggggacctagacccggtacccgagcttcggaattgacaccgagaccgaggacctaacccgagacccagaccctgaacttggacacggaccaggacctgggacccgaagtggaactagtctgggacccgagacacggatcttgatctagactcggggcttggacctgacccgttgtcgatatttggatctgggacccatacctggactcaaactgagacccaaactcagaaccaaacccagatccagacccgaacttgtactccgtgacccgaaacttgaagcggaaccggaagcggactgggacccgagaacaagaaggggactaagacccgatctcggtcctggaactcaaatctgataaggaaccagacctagaccaagaccgggatgcggacccgaataaaaactcggattgggactcgagacgcgaac

SEQ ID NO: 235540 - DNA, 1165 bp, Cannabis indica
acaataaaactataacattttcaaacaatgctcctagctcgttgaaatacttcttcccgttgttaatggtcgtcaccaaagctaacgaatctgaataaactgcatgaatttgaagaccacacacatgagctcaattaagaccaaccaacagggttaaagtttcagcttgtaacactgaaataccacctgaaacaacatcaaaccacaaaaattgtaattagaacattcccaatctgattaaaacacttaagaaccgaaaatatttaaatatatccccctatgaagtactttaactagccaaagggaaaccatttggctagtagtaacttaactcatgtattatacttcataatcatcttagagttactattccttcctaaacctaaataattttatatgatatctagaaattacaaaatctttataattctcccatacctggactgtcaacatttcttttggaattaccacactaataaaattcgcaacaaataatattttaacgtacccactatgactaacctttgagtgatttacttaacgcagcgtggactctattatcttcagacaatacaaccgcacctaatctaactatactcgtggtgctcaatacagctgcatcgaccataagtttagagtataacctctcttcttgagcacttgtagaaattccagctgaagctcccctactccttccattagtttgggaactttttttggggccctccttcattgaaaaaatcgactcataataactaattatccactcaaccacaaactgtggttgtcttatctgttgaccatgagtaatcttattcctttcagtccataaagcccaggaacagataaggaactttgcaaaggcctctctttccacaacctcagaagcataaagtaaaacattattgaaatcaatctcttcttttacttcatgtagaaaagagaattccataagattccaaatgccttgtgcaacaggacaccagaagattgcatgagcattcgactctcctccgaacccacacagctggcaagaggtactggatgcgatatttcgtctaaacaaaccatttcgcgttggtagaatctcgtgataacccctccacgcaaaatgtaaaaaattccttggaattttcaacccccagaattgtttccaccacaatga

SEQ ID NO: 235541 - DNA, 743 bp, Cannabis indica
tttcattgagagcctatgtgatataaactcaaaaaaaaaaaaaatccctcctaaccaacaggaaatttgtccaaggttgatgatgatcgaaacaatagtagtcttcccaaagagactaatcgttgcccttggaaagaaccaatgggttcacaaaggtcacctacttcagaaacaacacgttcaagaagaagccagggtggtcatgaccaaaacccagaagctgggaatgaggaaaccaatactaatactggtggttatgtacctaggagcgaggatgcctatgatcccactaggtatataccgttagtagaattagaaaatctacaactggggcaacgtctagccaagtctaaccaacaaattgttgagttggagagagaggcagccccagccagggaaactcaaggaaacaatgcacaaaaccaacctgatcctagagtgagaaggccacgaggtagacctagaggtttgagaaccaggaggcagaagacaaatgaagaaaatccccagaacactcaagaggaacaacttggggaaactagggatgttccagaagacgaacaacggaataatcaggcaccttgtcgggaagtacttcaaagataccagggatttacgaatcaggggaatgaaaataatgacgtgcctgaatcttctcatcaaaacgagaacataaggcaactaagaactagggaacaagagatccctcgtaagaacgaaagaaatcctgggactcaacctag

SEQ ID NO: 235542 - DNA, 869 bp, Cannabis indica
aaaagtttgtcgcttagcgactatacaaaataagccttgatgtcccaaagatcgtacgctccaggcctaatcgccctaacatgtacaatctccatctgctcgctctcacagctgctcaaccttagccttgctcttacctacacatggaaatagcaactgtgagtcaacaaacacagtaagaaaagcataaataataacatagcaatagctcggattataatcaggggcccatactcccaattataatcctattcctgtgtcccacacggtgttgagtctagaacgttcatacgacaatactatcgaccttaatatcagcttatactcaatatgttagtcatactctagccagactaatgtgataccatcgatcagtatttgagccaaacatacatctatcaatatcccgtataagtctacgttactgatactgctatcaatgtactctacctggcataaatagtatgtacgctaaacatataaacacatatgcataatattatactaatcttaccttgttttcgaattcaggtgtgctagtcaaactgagtggaacaactgctcggagaattacaagcctttaaatcacatcattcgtaacacgggtgagtgacatgctaaatcacattccggggacttaggttttaaaccaaaagttttcttattgaaagttaacatggaaataccctaaataaataaggaatcaaccaaccaaagctttgaaactaacacgaatcgacaacatgaaaaatttgggaacccagctgctaattcggttaaccggttttataaggcatgtaaaactgattaatcagtttacaccaggtaacccaaaaaaattcaaagcctaaaccaattcgaatctaaac

SEQ ID NO: 235543 - DNA, 1052 bp, Cannabis indica
gaagaatagatttcggaatggtatgaagatggctttaaagttagatatgacaaaagcttatgatcgggttgaatggcattttcttcgggcaatgatgttaaggctgggatatgatgtagattgggttgatacggtgatgagatgtgtgacctcggttagcttttccttcctgattaatggtgatgttcaagggagggttattccggaaagaggattacgacaaggggaccctctttcgccatttctatttctgttttgtgcggaggctttctcaaatttgattcaacatgacgaacaagagggtaggttgagagggctgcgatttgggaggcatggcttgtcggtatcccatttattttttgctgacgatagtttgatttttatggatgctgatatgggaagttgtcagaggttcaaaggacttctagatttatattcggctgcctctggacagttggttaactttcataaatctaaagtgtgctttgggaggaatgtggataggggggttcagcaacagcttgctactttcttgggggtccatgaggttgaacatcatggtaagtatttgggtctgccttcatttgttggcagaaataagaaggaattcctggatcaaattaagaacaaagtgtgggcaaagatgaaagggtggaagagttctatgttctcaatggcgggtaaagaggttcttatcaaagcggtagttcaagctattccgacgtatgttatgtcttgttttcacttatctaagaagactatctcaagcattcatagaatggccgcacgattttggtggggctcttcggataaggagaacaagatccattggtgtaaatggacacatctgtgcaaaccgaaagagaagggtgggttgggcttccgtgatctggggttgtttaatcaagcatttctagccaaacaagtgtggagatgtattcggtatccaaataatctgtgtagtcaagtacttaaggcttcgtattttcccatgcgaaatatcttggaagcgaagagtggagcacatgtgtcctttgtgtggaggagtttga

SEQ ID NO: 235544 - DNA, 686 bp, Cannabis indica
acagttggaccaaataagggacacgatcaagggcctagctagtctaaaacctttagaccttaaactagataggtcaaggggataaccattctcgacatatattaatgacttacccttccccaagttaaagatgctggtgtaaaagatgaatatcgggcaagaagacccgctggcacacatcaaatattttaagatgcaacttaatttctagaaaattactggtgatgtgcggtgtcacatattctcggcaactttgtcgaaaacacctcagcaatggtatttctagatggtcctaggaagattcaattcctagaacaagttttctcgagacttctacacacagttctcatcctcgaggttaataccatcaccattggaagacctagtcaagtcaaacaacgacaatgagaaccttcaaaggattacatccagaggttcatgattgaggacaccaaggtcaaatgactcatagaaaaggccaatatacaacaatattggaaggaatcctgccactaagtgacttctagaaagatatttggaggatctcgaccaacaatatgaaggagttccttgacagagctgacaaatttattaagctagaggaagctgtcagacaagcccagacagggcaagtcgacaataggcaatcacagggcatcttacagccccacgacttgccagatgtg

SEQ ID NO: 235545 - DNA, 2107 bp, Cannabis indica
atggctagtgtcgatgatagaaaggaacaaaggcgaagtgagtgtgagacatcgatctaggtttggctggggtccaaggaatttgagtcgaccttagagagggaaggaggcagatgaagattatggtagggttgttgcttagggttagggttttgagtttgtaagatttccttatatataaaaatattcttttttattaatagaaacacacaggttgggttgggttcgttgggccttaaaaatcccagcccgattccgacccattctatgcgggttgataagttttccacccaatgaaatttcggcccataaaaaaacaagctgatcagcccatttttgggttgggttggccgcgttggttggcccaacacaacccatgcacagccctaaatagaaggtagctcggtactttaacaagcaagtgaaagcacagaaattctttatgggagatatggtcctcagaagggtactcttgaacactaaagacagtacggcaggtgtgctgcccgtgaaagtagaaatccaattttctctcaccacatttgacggttacacttgattgcttttgatttctaatattcgcttttgggggaaccgaggcgtctgaggtttctaaaatgattaccccttttcgttgtgttacctataaatactaccgagcatttgtttacaaactcattttcaccaaccttcattgttaagcaagtttagagcaaaaagagagatttttagcttcaagcttgttggaaaacttacacaagaactatttgttcagctttgcgtaaactgaatccagacgccaatccttgagtaagttctcgatttcttttacttttacacatttactttctaaatgcgaccttaactttgttgtagaagatatatagaaaatcctaggtttagaaactttgcgattttcctttgtaacgattcatgcgacttcagcattgataatgctttctttttgaactacacaatgtctttctttcattttgcttatccaaagcttcatgaaatttttgccctaactcacgaaaatttcaaacttctgggttttgacttttcgttgaatattttcattctttaatctgttgagtactcttggtcgacatatttgcctgtttaatttttgatatcccgaccaaacactcatctcgcatgttgtcttttgtagatgaacccatgtgagttttggggaagaaaacaccaaatcgaccaggatctacttcaactcctgtacgaggattaccctcgtctttgttctagtccaccctcttcaagcgacataaattttagttcaaatttcccgtccaaccacaggatgatggctcacactaaacagacaatgcgtaacatcaacgcgtatgaccctcacgtggcccagcacgccaccttgcccaacgccgaataggatccacccatgcaggaggagggggatcatgaaggggatgctgaggtctaagacatagaggaacaaggagatgtccgtcctgacagtccttccgaggcggaggaagaggaggaggctgcaccccaaaactttgggggatacaacaaggctggggagtcggtagacacggatggcgatgcctggttgagggcatggattacgtcactgaggagcttggtgccgcagttcctcaaaggaggcaaactgccttgggtgccaggtgggtgagccctccgccaggtactgaggcacatttacaggatcttgaccagggtagctatttgagcgagctggactgttatgttgccactcgaacaattgagcctcaatgtaacaccctaactagcataggcgtgttgacgtgattttaaacgcattgtgcagctcgttgctaatcaacgaggttaatgaaaatcgtgattaattaaaattttactatttaattaaaacttataatattacatacaacatatttcgggatcccgtttgcaaaatactttccaaaagtttactattcaatacaaaatatttgtcgccaagcgactaactacaaaagtactgttgtcccgaggatcgtacgctccaggcctaacctccccgacatgtacaatcttcatctgctcgtcctcacggttcctcagctttggccttgccctt

SEQ ID NO: 235546 - DNA, 1265 bp, Cannabis indica
agtgagccccggagaagtacaaaagcatgtcgttcctctccgagagcgagacatatgatgtaagcctcgtttacagcaactacacagaaatcaaaagggctagtgacgactccattataaagaatcacattaatcaaggaaggataaagattaatctcacctaatctgtaagataccaacagtataggttatgcatgccctattttgtactttataagaacttgtgctcatatattgctggcactcaaagacaagtgatccctttttgaatcttccctaccaatctctataaatacccctgaacaaaatgggaaaggggatcaaaaaagggagagagaaaaacttatcaagaacattctctgtataagaactctcattaataacatagactcgtggactacggctaattaatgcccgaaccacgtaaaaattatttgcattaattatccctacagctctcatcattatctcatttaattggttgccaaaaatctcagtcaacattttggtgctttcattgagagctgtgggaagcattgttggggaaacaacagtcaaagaatcagaactgcaatggtggacacttaaaacaacacacgccaacctcttccccccaggatccttagaacccagaaggtgaagaggctgcttcactggtaaacatgggctctgaggaatgagatgaaatgaaagacgaggaatatgaagaaaaattcaaagggtatgacgcttacgacgagggtagctacactgagttgctgatcctaaggcaaaaagaagttgatcatgaggccaaactagctgcccaaaaagaacaaaataagaggatgcaagagataatggtcgccatgcaaaaggctatagaaacggctagaatacatgtgcatcccaaagccatgcccgcaggactagagaaaacacaagtggaatcctcgccaagcactcaaaggcccaagactagggagccaagccctatacggtatccctccgaggaagaccttaagaaaaatcctacttcaatccctgggagaaacaagaaggcacaggattcgggaaaggtccgctctgatttcccaaaaggcaaaggtccacagaggggcaagctccctagagagagccttggccctcaggatcgagtggactgaaagagcgtatccgtacaccaagaacccggggaaagagggaggaaaattcggtggtatcctccaattgataaaaggcagaaaatcaacaagaagcatagtgacttaagaaaccatcttgag

SEQ ID NO: 235547 - DNA, 729 bp, Cannabis indica
tgggtcctcaagaaggacctcttcaacaaagctcatactctcaatgtaatgtttgagtctctggccattgaatcgaaaagtcctcccatcggttgggtcctcgacctcaacaaaactgttggggaatacttgtttcaccacatatggaccagttcaccttgatctcaacttaccagggtggagatgcaaacaagaatcgtacaaatgtactttctgattcggctcaaaatgttttcttaagatctgttcatcgtgagcaactttcagatttgctttgtagatcctagagttatcataagcatcatttctcaactcctcaatttcagataattggagtttccgattcatacctgccgcacttagatcaaagttcaaggccttaatagcccaataagctttgtgctcaagttcaacaggtaaatcacaggcttttccatagacaagccgataaggagacatcccaagaggggatttgtaagctgtgcggtatgcccaaagtgtgtcttaaagacgtgttgacaatcttttcggtcgggatttaccgtctttttaagaatgtttttgatctccctattagctagctcagcttgaccattggttcgtgaatgataggcatttgcaactttgtgaagtacaccgtacgttcgcatgagaccttcaaaagatcggttgcaaaaatgagtgccttgatcaccaataatagcgtgaggggtaccaaacctagataac

SEQ ID NO: 235548 - DNA, 787 bp, Cannabis indica
ttaaaaataaataaatagataaactgattttttttttaaaaaattacaggtcgggcccgacctctgacccgctagactgaagaaagtagtcgggtcaggtcgggccaaagtgatatcaggtcgggcttggtctatggcaggtgaggctcgattcgacccaattgacctatttttgttgggtcgcattccaatgaaaagagtagaatatgtacgagttgttcatatttgcaatcctttggtatgaattctctactagcctcataattgacataattttttccttctttccattgtccattactctttaaaagaacgagtatagattctataatctgcaattttttttatagtattttaacaatttaatatttttacaaacagacaacaattgtaaaacaacgctaaaacaaccatcgacgttgtatttttttgtttcagtattccagctatcatttgagtgtccatattttatctatttcccttaatatccaataaattgcatgtaattatcaagaacgactcttaaacaactttggatatttcaaaattctattttaatttctaatcgacatttttttcttcaaaaattatgtatattagaatgcatttacttcaatcatgcatttatataaaaataattttagaagctataaatcattttcattattgatttccagatctatgttttgagcattatttttaattttgtatttaaaagaatttagttgggtttaagttttcaacctttttgattcgttaatttctggtgttgatgaagctgtttgtt

SEQ ID NO: 235549 - DNA, 1059 bp, Cannabis indica
aggcaggtgaaggaacaagaggcccgtcagaacatgtctaaggcacagaggatgtgacaaaatatagcaaaaaatcatcatccttcccctgacaagtagaagtaagtgaagatgaaaaataagatgtattttccacaaagtaacatcaatagaaataagatatttgttaagattgggacaataaaacacataccttttttaaagacgagaataatcaagatatacacactataatgacttaagatttaatttggtgacatgtggacgaatatcttaagcaaaacaaacactcccacatacccgagggccaactagaaacaacgacttactaggaaaaagaattttaaatgaaatctcaccattaaagcactaaggatggcatgcgattgataagaaagcatgttgtggaaactgcatcgacccaaaaaggtttaggaactttcatttgaaacaagagggcacgtacaatttcaaaaagatgtttgtttttatattctgctacaccattttggaatgtagtatcaacgcaagaagtttcatgaaacatgccattagagatcatataagattgaaattgagcagatgtgtattccttagcattatcactttgcaaagtatgaacagacacttaaattgattttgaatctcagcacaaaaggcataaaatataaaaaaacaactcagagcaattattcattgaatataaccaagttacacgagaataatcatctacaaaagtaacaaaatacttgaatctagatttagacaaaattggaggaccccaaatattaaaatgaactaactcaaaaggaacgctagcatgcttgcacgtttattgactcaacgagtcaaactaacacgatgatgtttgacaaactgacatgactcacaatctaacgaaaataccttacaatattggggacaaaacttcttgaacaaaggaagggatgaatggcccaaatgacaatgagcctcaaaagcagaagcgacacttggacaagcaataggggttgagaataatggatcaagaacatacaggccgccaaatgtcggaaatta

SEQ ID NO: 235550 - DNA, 1184 bp, Cannabis indica
attaaaagaatctcattatgcaacttcaaattcaaactacaacaataccattagtgtaactcaaagaaacatcactaaaaaaatagagcatggagattaaaaatatcaatgcttaatccacgttgttacctctagctgagtgcagagtagacgacgtcattacctccagcaaatgcgaacaacgaccaaagagaaaaatggcagcggaggaagcgatgatgggcgaggcttggtggtgaactgcctgagaagaatcgaagagggaggagagagcttgtcgattggttggtggtctgatatgggttctcgtttccccctggtcaaaaatctggggattttagtttatgtatgtgtagggaagacaaagagaagcttataaataaaaggacataaaaatgctttcattcttatactgtatattttgtccttatacaaacatatatataattaattaaatagctagtgctggcatctctaataacagtacgaacaattcccaaaatatagcaggataacatacctgaattgttcttaaaagaaacgcctttccaataagtgtcattgctttgtcgccaaactccttgctagcaattgtaacatatcagactgagaatgaaatatgaagaaccttaaatgatgtactgggcttacctagatggtacatattgaactcacaaagcttagtaaaatgtatgtatttaagacatttcaaaaggaaaggaataacaagtcttgatctcacaatcttaagcatttgtcatttccccaaaaaacaaaacaccaataattacacgtggtacttttgatgttagattcattcagctatcatcttcacatgcctaaattctttcaacttcttatttctaagcgtgttatgaaatcattgaaacgagatcaaaaaatgacattataacaaaatatttaccacatttattcttctgcaccaattactttcatgttcaagttcagtaagcaacaaacatctgttgagaataaaaccatgttaagagacaaatgtttctcagcaaagacaaaaccatgtactcaagtactaagtatccacaaacacgaaacacgaaacatgaaagcatatagtgtttatgtgtgtatgtacataaaacacttggaatcagattcaacaaaaaatttaaacgccattggcataaaatccgtaaaaatgtaat

SEQ ID NO: 235551 - DNA, 1060 bp, Cannabis indica
ttattcaggtaaattttgaggaagaaaattttataaagaggggatggttataatatcccaataaccttaatggtaaataattagggtttatatttatattatgggttaatcaagtaataggtgggattatgatcctactaatctatttcagcataaattttaaatctgttataagtggataaataaacgtaatttattaattacggagatttatatggcatatgtgaatgtaatatgagctatttgtgtaataaaaataatttcaagtttggcgatcttggagactcaattgggggtcaaaaatatttaactaatagatttgacaagaatattatgataagttgatagtgtaagtattggaataattaagagtatgtggaatttgacttaatgccctaaaaatatagatttcttagttgttaagaaataataagatgactattaataataaagtttttattaatattatgttattattatattatttttattatataaacttatcaaacgataagtttatatatatatttttaagtttataaactaaacagtacaaatagaaacccttcgtcctccgtcgacaaaatccttatcaccctctatctattttctttaattttaaacctgaaacctagcaatccaagctccggtagtagcggaatagcaaaattttgaagagagaaagcttaaggtgaaaattgatttcattttaagctaaaaataattatctttagtggttttgtgaattggaatagttatggaggttctaaccttatagaattgttcttgggtagccatgaaactaacttcgatgttttcttgttgaatttgatgtgattttgagttagaaattgtgtttggaaccttttacagcttaagtctaaacattagtggtattttctatttaaggactccatattaatttctattatgtaagaatggttgtacttatggtatatgtgtaccgtgtaaagtttggagtgatttggataggtttcagtagtatttcggtgagtgcgaaatttagaaattgcaaattttattcccctgcccaatcagt

SEQ ID NO: 235552 - DNA, 959 bp, Cannabis indica
caggggaagtagtgggtcatgggaactgaaataaaaccagtagtgactttgaaacaattattgtattgttccattttgatttcagttaggtccctcattctatttatggtgtgattgcccgatcatatttgtagggctaaatcatcaggttttgtttttttattttggttggatggggatggtctggtaataaaaagatggcccttgtagtttgcaagtagagcacataatatgtagctcatacaatcaaagattccgcctctcacaaaccagactggaaaatgaaaataatcaactggatctatagtgtttgaaataaatagattgctagtatgaactgtataaagttatgctgcaaatccagaacacaaattcaaagatgggcaagaccaaaattaacaaagataatcaaagctgaaatcaaaagatcaaaacagaacacaacataactggtaaatattattttataaaaaattcgtgtatatatgtgaacgaggaaatatatttcaatcctaatttaattttgcattggtaattggacttctatgcactactcaaaaagaatttagtgttcgcacaaaaatgagcgaggagatctaggctgatactttatatttataggtgagatactttattagtatttacgccacattaattgtcagaatattttaataattaatttaggtaatcaaatcaagaaatgaatgattctgtaaatcaaagacggactatattcagaatgtctaaacttattacatattaatttgtgatcaaatacagtcggcgcgagataatgtaaaaatcaatttgaatgattttgtactattattagaaatattgtaatattttcccacttgatcaatatttagatttaccacttaaactcaatgttagcaataggtcctcattatatgatgagtaccatcttctatgtattacgatataatgattatattgtt

SEQ ID NO: 235553 - DNA, 1624 bp, Cannabis indica
ataattacaaagatatatgaattcagagaattcaaattcataatttttcatttctcatttctagctcacccagaaatgaagagttttgagtctctcatttccgcaaaatagcaaaatctccaagaattggtgacaagctttgccagaacataataatggactaagtggtgtcaaaatattatttaggcatcttaaaggacatcccttagacgttttacacttacccagcctccaggttgacattagatgtccacctcggcattgggatgtcaacttgggcgttggatatcaacgtgggcgctgggacctaaactgtcttcaatcaaaagccataactcactcaatattaatccgattaatgtgattcaacttgtgttttgaagctatttaaatgttatatcaagtcatgtctcacaacccaggcgtaattatgaagctataatcgtcaaatttcaccctcgacaaagttacaaaaataagctccaggttaccagtagcaggacccgccgggcaccaaaatttagctatcaccaccagaagctaatttttcaccattagatcatcataaccggtggaaaacaatttatttttatttttcccctatttttgttggcctccttcacttataaaaggagagacccattagcttatttttcacattcagaaaactacccacaaggtcaaagcttctctctctagattttctctctctagaatttggagcttctgacacttattctattactgtaattaccatctcgtgaaaaataaaaactcgaagtagacatagctccattattatcgtgatataggtgtgaactactatacatttgttgtgtctctcttataaatatttaactacttattcattctcgccaatctaacaagcgtgtgtggcttagaagtatagtctaaatttttgagtcaaaaaatataaaataaagaaaatactataattatagaggtttgaccccttgatgatggtaatcgcctactccactttagttgtattgacttgtgagaaaatgaacaagaaaaccttgatctccctcaaaaactcttagaataatctatgtgtacttttactcttgaatctacatttatgccttgtgtttttcctaaatgaaaatcaagtccttgaatagcgggattagttcactttttatagggattaattacatcaaattaatttcctaaaaccagcaaggaataaaatgggaaatttatttactttctataattacaataagtagaataggaaacttggtaggtttcatttctccttcaatactatgaatctattccatgaatttagggatagtgtcgtatcttgcaagcttgaggatatacaggatatatctcttaaattatctaactcgcatcccctagtcaatgtatgcgagccacctgcttgatggaagctggtcgggtgtcttcgcatgctctgctcaaatgtcccaactaatgtttatgacttcaagtatcaattctccatgcacggctcattaagagtagaatccactttctaggtgagcattatctttctcaaaatttcagtggtcatttcatatataagattgacaaaccggtcaaatctaggtacatccaccatcatagtcatatc

SEQ ID NO: 235554 - DNA, 1469 bp, Cannabis indica
aagaatctttatcaatgagtctagacggaaatatgtattatcagttatttttaaatatttttttaataaattcaaaacagaacttacactaacgaaattaaaaaaaaaattacaattttacaaatatttaatacttatactattaaaaataaattattaaatttatataacttatttttgatacctatttatcccataataatatatgtacatataaatgaaattactttggttttatgcctctggctcttagaggctaagcaaagtttgtctttttgctccagaaattacttttgtgattgtggaagtgactcccaactagatttttagatgggaaatttataataattatattcattgtaaaagaatttctcaggggttttttcaattttgttgcctataatatagtgaagtggatttttgctcacaacttaaatagtgttggagttatctagcattctgaaaattttataattaataattgagaggtctaattttcttttttatttaatgaaatctgtttttttaaacaaataaataaaaaaaatctttttcattatttccgtttcatattcatacacaagctgtattagatgatgattaataaaattcctaaacttacggtggaaaatccttaataatactcaaaatcttttttattttattatgattcaattgatttagttatgaaattacgtttgaaaaagtcaaaaaaaaataaacttagtaatgtggtattcttaattaacaacaacaactagaagaatcattaacattaaagaagaaaaaaaaaatcaccgaaagaaaaaagataaggagaaatactgaaataaataagggtgagaggtaagtttatcccgcgtggggcccatagaagcttgggctgggtcaaatgtagtgggccctttgaatacaatgagcccatgtttactcaacacacactaaagctcagagttgcctttactggatattattaattgtccaatccaccaattgatagtgggcccactccatagcatcaccttattaatacctgaaaactacccaaaatctgatatttttccagaggagggatccacacaatgttagagcagtgatttagggctagtttggcacagctgtactgtgggaaaaagtagctgtaccgtgagaaaaaatagttacagcagaattgtagaaaaaaattaagctaagcgtttaataaattataaatttcaaagtacagtgaattgttaagatttattataataataatgaatttgttataatttaatttattataatcacaaatatataaaaacttatattatataatattttattttttatatatttttaatttttttaaagataaatttatatatatttgataaaaataatttatagtatttttatattatgttttatcaaatgtaaaaaaaaaaaaaactcaagtatataagaattttttaggttgatattgtttgtta

SEQ ID NO: 235555 - DNA, 2547 bp, Cannabis indica
aggagtcattccggtggatgtatgatgggaggtgttataccaatattcagaccaaggaagccacttcacccattggttgggtttggcgcttacaaagcaacgtaaataagtctcgagacaacggttgactacctccgtttggccatcggattggggatggtaggcggtgctatgccttaaggaggtgccctgcaaccgaaataactctttccaaaacaaactgaggaagattttgtccctatccgaaacaatggagcgaggaattccatgcaacttatcaattttgcgtacgaaaacctccgccactgttggtgctgaaaagggatgccgcaggggaacaaaatgactgtatttggtgaggcgatcgaccaccacaagaatagagtcgaatcctttggaaaggggaaggccttcaataaaatccatggagatgtcctcacaaacgctctcgggaatgggtaacggttgcaggagtcccgcgggggattgagccaaatacttattctgttggcacaccgaacattccgctacaaatttctcaacatcacgacgcattccacgccaataaaagtcagccgccaaccgttgaaatgtcttaaacacccccgagtgccccccgacgttgctgctgtgatactcatgcagcagtaaagaagtgaaggaagaggaggcaggcaacaccaaacgacctcagaacttgaggcagccatgaactaaggaataccccccacaatcacggccatgtgacaattcttggagcactttagagagagctgggtcggcggcaatgtgagcttgcaagtcgggaatgtagaaaagattcggggttgtaatggcagcaagagaaactgcggattcaactcgtgacaaggcatctacagcccgattctcaaagccaggcttatagtgaatatcaaagtcatatcccaagattttagtgagccatttttgatgctccatggccaccaaacgctgttctaacaagtacttcaggctacgctggtccgtacgaaccacaaacttgcggccaagaaagtatggccgccatttttgaatcgctaacactatggccatcaattcccgctcataggctgactttgtgcgagcgcggggagacaataccttgctgtaataagctatgggacgcctagtttgcatcaacacaacccctaatcctacacccgaggcgtcggcttccaacacaaagggaatggtgaaatcagaaagtgccaagaccggaacggaactcatggccgacttcaaaagttcaaaagcagcctgagcttcttcggaccaatggaatgcatccttcttcaattgatccgtgagtggccgagcaatgctaccataaccttgaacaaacttgcggtagtagccagtgagccccaaaaaaccccgtaactctttaatagtccgaggaactggccaatttctcatggctgctactttactagggtcagcagccactccctcggccgagatcacatggccgagatactccacctgtggttgggcaaaaatacacttcttgcggttagcatatagcttgtggtcacgtgagcgctgcaaaaccattcccaagtgagttacatgagtctctaaagagggactataaacatgaatatcatcaaagaaaaccaacacacagtctcgggaaagatcacgaaatatttcattcataagagcctgaaatgtggctggtgcattcgttaacccgaatggcatgacaaggaatttgtaatgcccctcatgagtacgaaaagccgtcttctcgatatcccggggggacattcggatttggtgatacccggattttaaatccaacttggagaaaaccttggcgccatgaagttcatcgatgacggggatgggaaacttgtccgccacggtctccctattaagagcccgataatcaacacaaaaacgccaactcctatcctttttcttgactaacaacacagggcttgagaatgggctagtacttgttttaatgattcccactttgaacatatcgcgcaccatctcctcaatggcattcttctgaacatgggcatatcggtatggccgaaccgatacgggctccgtccctggcttcagagtaatcgaatgttcttttgctcgaattggtggcaaccccggtggcatctcaaagacatcatcatattgccgaagcaacgtggcaacatgcgaaggaatcggttggagggggcttcttcttccggggccatggttccaagttgaacccaatacccttcagctcctctttcaactgccaagaccatagccttcaatgatatgggagacttgcacaaactcgggtctccttgtaaagtgacccaataacctgccacttcgaacttcatgaccatggtgcgccaattgacctgcatattaccgagagtctccaaccatttaattcccagaatcacatcggctcccccaagttctaagggaaggaaatcagtcacaactctaatagcccccaaatcaagttccacttgagcacatataccttctgttcggacctttccacccgtacccaacaac

SEQ ID NO: 235556 - DNA, 755 bp, Cannabis indica
aatttgctgaatggattcagaatgagtgaggagctcggggaccgagaccctatatttataggtgagatactccatcagtatctgtgccacattaattgtcagaatattttgacaattaattcaggaaatcaaatcaggtaatgaatatagaaatctgaccatatatagaatattacataattgattttgtccagatttaatgaatataaaatattcatttatcagaaaatcaattatttatttatttccttaaatagaaaatcattttcttaattagaaaataatttccataataaaaatattctaatatgatcttcataatttatgtgttaattattggtaagatattaaatgttgctaagtaataatattttaaaaaaagtaagataggaaaataaatattgttttttatttattattattttgaattatgtgatttttgtttatagagatgtatatttgataagaaaatcacgtttttttctttaaacagtttacttcttttttatttttatttaaatgtgtaatttattattattatagagatattttcttttaaaaagcgtatagagaaaatatatagattattcataataaaattaacaataaataaaaaattagaagttttgttaagttagttaagaattaattttttctaatttttttccttgtaggctaaaatagtttattagtaagtctttgaatcattgatgttggtattttattatttatgtgataatggatttataattaat

SEQ ID NO: 235557 - DNA, 518 bp, Cannabis indica
cttcacacacagggcagagcagagatggaatctttaaaaactgcccggtttggtctcaagtaagtagttgggtgtttgttgcttgccaaaggatgcttcgtaacactcaatatgtgccaaatagaattagcataagacacttcatcagtagcaattagaaataagtagaaggtttttgatttgaatttaccaaacttgccagctttaagcagcccctctttgtcaatagcacttctaagctacaagaatttcataaaataccaactaacatcacctttgcggaatggtccaaaaatctttgcctttgaggtatatggaatcgatccatttaacccaaaagttatcttgcttgcacgaaattgtccaaatgaaccataaaagcacggttctattttcttcctttacgaaaaccaatccctctaaatttcttcgggagacaaacagtatcccaagacacaagatgaagcttgctacagtttccattagaacctcataggaagtcccgacaactattatca

SEQ ID NO: 235558 - DNA, 929 bp, Cannabis indica
ttttgagatctagatcatgataaaactaaaataaatatcgattcacatctagctctttcacatacatttccttgccaggctgccataacaaggccatcatgtgcctcatcactttaaaatcaataggtctgtgagtcaaaaaacgaccaacaatgcaccatcgctcctcaaccttttgctcctcattctcagaaaaattacatttgaactcatgctcctctttcccttcaatcacaatattggcacattcctcctccagatcacgaatagacctactactagaagccatagtcgacccccgtaatttccataactcctctgaattctcacgaccaatgtgaccacaaaatctccacaaaaacctagccttgactgccacaaaagatcttgacacaatattctaaccttggaatacacacaacacacttgaatcacacaaacactatgtatatcgctataaatacatagaaaataaatattatttctacatatttaatatcacaatatatattatgctcatcatatatataatacacacatagctcatatacatattatatatattatatatctcatatatatacataaataaatatgttataaatttaaataccatattatatatcactatatatattagtatgatataaactcatgattacatatatatatattacatatacatatacataattcacatatatattactatcatataaaataataaatcatatagtattcatcaccatgctcacacatgaatgactttcacataaaatctcttaccattgtgtgttctcacaatcttgatttatctcctcttctattgaaaagagataagctttgattgttagagattttattacaatggaaggaaattaaaatattacaactctattgtaatataatagaaggaccaacaaagagat

SEQ ID NO: 235559 - DNA, 1159 bp, Cannabis indica
aaaatctccgaaattgagaaattataactctaatatttatttctagatattggggtccaaaataattaaattcataaataataataaaatgacagaaattagtgctaattgccttttctaatccaaattactatagcggtcattacaaagatcaggttgtctttgcttgtagttactcacagatcttgtatttgagtaattctcaaattgataacttcgtgtgtttctcatgctttcttgatcagcataacgatgagacctacttccttctcgcgtttccctgcctgatcgactgtgtcctcgagatctaaagtgtcctgaacttgaacttgcctcgtctttcaccggcctcctccttcagtagaggtttgatacacgtcctctattttgatacatgtatactctttccctctcagattgagaaggacgttatgggtttctcggtggtaatctgcttgccctaggttgagtcctaggatttctctcattattaggacgaatttcatattccctaggtcagggttgccttgtgtcatcattcctgggagaagactctcgtacatcattacattcattcccctgattcataaatccagggaatctttgagggacttctcgatgttgttcttggttgttttgttgttcatccactggaagatccctagtacccccaggttgttcctcctgggtgttctgggaatttccttgatttgcttcttgcctcctggttcttgaatcctggggtctacctcgtggccttcttaccctaggatcaggttgattcagtgtattatttccttgagtcgcccttgctacaacagcctctctttctaactcagcattttgttggttagattcggctaagcgttgtcaaagttgtcgattttccaattccacaaaaggtacatacctagttggatcataagcatcctcacgcctaggtacatatcctaaagatgcattagtttcttcgttccttccctctaggttttgattatcacaatcatagtttcttctcaaatgtgtttttccagaagtatggagtctttgagaatccattggttccttcccagggcgatgtgtagttccctaaggacgacttctatcgttttgattgttatcagtcatggatagatttttgtttgtaaggagggatttt

SEQ ID NO: 235560 - DNA, 898 bp, Cannabis indica
agttaaaatggtacatgacactctccaaaaaatgccattccacatgatcaaaagttttagccatatcgagctttaaagcagcccagcccctcttgccagattttcgagaattgatagcatgaacaagctcttgggcaataaggatattatcaaaaatgactcgcccagagacaaaagcactttggaatggggagataattttatccagaactactttaagtcgattagcaataaccttagaaataattttatatattgtggaacacaaactaataggcttgaagtccttcatagtattagcatgttgttttttagggattaaaacaatcaatgtattattgatagtagagaaatcaacctgatcatttaaacactttaaaaccgcatgaaccaagtcatgacaaaaagtatcccaattcttctggtagaaaaaagcattaagaccatcaaggccaggagctttatcaccagaaaggctaaaaacagccttcttcacttcctgagcagtaaatggctgagccaaaaaatcatattcagactcctcaaggggggaccgtaaacagtttaaaatatgattagtagcctcagcatcacaaccatcagagtaaaaaagagttgagaagaaagaagagattatttcaaacatagcctcaggatcactggtggaattaccaacatcatcccttaaatacctaatggtattattctttttcctatgggaagcaaatctatgaaaaaacttggtgtttttgaagccagttaacacgagcccgttgcttccaataaatctcttctttgtaaagaagagcatcaagttgagattggagatacttaagttgaacattagactctctactatcagaagtcaaagattgaatcctaacaatctctttttgaa

SEQ ID NO: 235561 - DNA, 2989 bp, Cannabis indica
agctaacactggattcaattctcgaggtggatcatatattaataaccctgctggacgagggaatttcactgcttcagctgggggaagatttcacaccagtcaggccaaacctcagtgccaaatctgtcacaaaactggccatttagctcttgaatgcttctaccgatttgataagagctatactggggttcttcccacttctgatggcaccaaaacaatgcaagcacactcagctcaaactgcttcaggcactgacacaagatggtatcccgattcaggtgctaccaatcattgcacagctgatgtgactaatctggtgcagagcagtgattacaatggtcaggagagactctatgttgggaatggatcaggtttgaccattcaacacactggctctactttgtttaaatctccacactcagataagcctttcattctcaaaaatttactgcatataccagaaataactaagaatctgttaagtgtttcaaagtttgctatggacaataatgttttctttgaatttcaccctcttgtttgctatgttaaggatctgaggaccaaaactttactcctgactgggacactccacaatggcctatatactttgattctggtcagtttcaagtgcttccccaacctccctcaatctgtccagctgtccatctccaagatcagaaccatgcctatattgccacttctgttgattgtcacaaagagtctaccagtagcacaacttctccctgtaatgacacatctttgtctagttttgacttgtggcacaatcgattaggtcatcctagtcaaagagttgtgcattctgtcatgaactattgtaatgtttcctatagcaataaaaactctacatctgtttgtgaagcttgctgcttaggtaagattcacaaattgccctttccaaagatgtctaaaactatctacactgaaccattacaattaattgtgtctgatctttggggcccttcacacaccatttctcacaatggttacaaatactacatgagctttgttgatgcttacactaggttcacttggatctatctccttaaaaccaaatctgaagcactaagaacttttcaaaatttcaaagctgagacagaacttcaaataggcaaaaagattaaaactctacaaactgattgggggggagagtttagatccttcactgaaccattgaaacagttaggcatcttacacagacatccatgccctacaactcatgaacaaaatggcctggttgagagaaaacacaggcagattgttgaacatgggttaagccttcttgctcatgcctcactacccttaaaattttgggatgaggctttcagagctgctgtttacctgcataacagattgccctctcctattttgcaacaacagtctccaatggagatgttgttcaatatcaaacctgactacaacaatctcaggacctttgggtgcctttgatatcccaacattagaccttataataggcacaaactcgattttagatcagcaccttgtatttttgttggctatagtctcaaccataagggctataagtgcttacatgcctcgggtaggttgtacatctctcgagatgtaatctttgatgagtctaaatttccatataagacttcacatttctctatctcctctgaacagatgcacaacaatgaacctctgccctctgctacaattcccaaatccaccaccatttatactgctgagtatctatttcccactcattccacttcatcatcaatacagacccctgtcttttgtcccattgatcatgctactcagcctcctcattctcaaaatcccatcatcactactcaggtatccaatagctcacctgaatctctgcctgctgattcctcacctcaggaacctgacacacctattattcctcccagtatacctatctctgtcccaacagttcccacttcctctcatgatcctgtagtaaacaagcactcaatgaaaacaaggtccaaatctggtatattcaaacctaaggcttatatggctttgcaagctccaaccaatgtcaaaatggctatgaaacaagaaaagtggttgaatgctatgaatgatgaaatgggagcattaaaaaggaatgttacttggacttatgtccctcttcctgatggtagaacaccaattgggtgcaagtgggtttacaaaattaaattgaatgctgatgggactataaacaagctcaaagctaggttggttgccaagggatttcatcaacaaccaggtttcgatttcacagagactttcagtcctgttgtcaaacctgtaacaattcgaattgtcttgtctttggctttggcaaagggctggtgtatacaacaattagacattaataatgcctttttaaatggagatttaaaggaagaggtctatatggtacagcctcctggattcgaactacctgatgcacctcatctggtttgcaaattaaataaagctatatacggtttaaagcaggctccacgagcctggttcgagaaattgcagacctgcttactgtcatttggatttgtttcttcaaagtccgattacagcttgttcattttacacacttccaggtctatgattcttctattggtgtatgtagatgatataatcatcactgggagtgatgctgaacaagtttcttctctcattcaagctcttgacaacaaattctccctcaaaaatcttggcactttacattattttcttggtatcgaggttcaacatacagattctggtatgcatctttctcaaggaaaatacattcaggatttgttaaacaaagctcaaatgacagatgccaaaccagcccctacacctatgacaagtggcttgaaactttcagcatatcaaggagatcccattgacaatcctcagcactatagatctattgttggagctctccaataccttactattactagaccagagatttcatatagtgtaaacaaggtgtgtcaat

SEQ ID NO: 235562 - DNA, 1904 bp, Cannabis indica
agggaaaccggtcgaccggtttttaggcacctgccaaaccggttgaccggtttggccagtaggggggatttcgggttttctccttaagtccaatctgattcagggtatcttccagagtgaaattctgcgtgttttagagatgtttaagctagtttgattcaggggaaagtagggtgtgtctgattatgagaattagagtctattatcagaaatttgattaaggtttttattgagttttggttgtcatgacatagaaccgggatcgcctagcttattttccactcaggttgggacatacgcttgagttctgaactaaggaaagaaaagtgtaagcaccggatgtggctaaatattaatggttgaatggttatgacctttattattatcaagactttgattagatatttgttgagcctaggttatgacctagggttggaaacggttaataccgttacgagtaattacacgtcaaacttcggttaggtttcttacttatcttttgctttatcaggcaacgatagtgacatattcagctcgtgatcaacgagtggtaaaggggtactttataaagtactagaattgtgtataatattgagtaaatgtgtaagcaatttaatttgagattgaattgctaaatataagtggttattatttaattcacttttcttactaagtctcagtgactcacatgtgctttttgtgcaggtagggggaaagcaaaggttgagcagccatgagttcgaggtcgtagtagcaatgtatatatcacccgcattggctcggcccagtgaacaggatgctccgttttgatagtattttaagattgcaatgttcatgttgtaaaagcactgataatctagtttgtaatattttgaaaatagggggtccccgtagttctcattacttatcttttactataaagaagttttaatatgcttggctttaattataaaaaatttaattacccatatatatagtattcatataagaattttatagaaacacacacacgtgacttccttggacagggcgttacaatatggtatcagagcgccaaggtttttagatccggaagactggtttgatatgtatatcggctgcgaagactcgttcgactcatggttcagtaagcttttaattaatagataatttgttaattatcttcttgcttgagtatatgaattgtgttaatatatggaagtgtgtgggaatgattatgacatatgaaatacttatcagtattgttattacctggaatgtgaacgcatgtgtatagattatgcacctgaggcggactagtaggggtaactgagaggtagctgggctcggggtcgctggtgagggcaagaaccctccaccaccacgaaaattggaagagttatatgctgcgatgcaagacactatccggcagcagggtgaacaaattagaggattaagggagcagcgagctcagcctactttaaaccctaatcttgatccttcggcacctctggtagtgccaccagatgcaaggaatcatttggaatcgttgtatgagcgcttcaggaagcagaacccgccactgtttgagggtggtgctgatccactcaaggcggagcagtggatgagtatgattgttgggaatattgtaccaagatctagatttactaatctctttctctccttcgggtttggttaccactgtcttactcactatgattaagtacttgacttgctatgtgtaggcatggcactcactcactataggccgaagtaagaagaacaatgaaggaggtgagaaaaccctaaaaaggaactctctcatcaaggtttgcttgaataaccaggttgacattaattggatgagtgagagtatcatgttccttttatagtgttttaactaaggcttagggttgaattatatg

SEQ ID NO: 235563 - DNA, 1610 bp, Cannabis indica
agtccagaaattcaatttcaatagacaaaaatccattttgtcgcaaagtaattcaagtggtcagaatgaccaatttgcccctagggccatataacacacataagcattcaagggcacttaagtcatttccatcacatatcgttattttaaataattttcttaataattcaaataacaataaaatgccaatataaaatctcgaaagtttatttcggccccgaacccggttcagcccgaaatacccgattgtgactataccgcacctacttgtcagaaaacacctgcaacagacaacacaagtatactatataataatatagtcccataagcacgcaattaaattaaattcacagttttacccttcttgggtcaaaattacgaaaatacccctggctcaccaacggggtcttaacatgtcaaatatcaaactaattcacatataatagattatctaataatataatttcataatcatactcatttaactagttagggtttgctaatctattttcttaatcttacactatgtttggtaggagggagaggtgtgtggatggagaggagaggagggagagaaatgggaagagacaacaaatccacttgtttggcaagagggattgggggagggaatggatagttggatggagagtaaatccttccaaatccttaatttaaaatccttctataaatggaaggattcacactcttcctctttgattatttaaaattacatatataccctcaaaatatattattaaaaaattacatttaaggacaatataataatttcataaataaatactctccatccttctatcatttcatcccttccaccaaacaacttaaaaggattgctactctcctctccctccctcttattctacatcctccaccaactctccatcctccctattctctatccttattacatttataactgtaactgtaactgtaatattatatgtatgcatatgtctacatccatcttatatatttaattgattctgtcacttatataaattttcataaactattttatcttgtttttggtattagtcacagtcaatgttatattatttaagtttttagttattactggtattctctttcagattatgaccgaattattgtatagttatcagtttaatacatgttttagtcagtaaagttagatagatcttaagttttggtggtctggggtcgtggcggcggtcttcggaggaagaggtgagtcttgctcgtcccatcttattaattacttttaattataataattacctttttatattaattaatgatccttatatataaataaaataaaatttaatatatattatatattacttggagaataattattatatattacttttagaatattatttatttgaatccaactatttactgtaatgttatattttcttttaccttatttaatgacctatttcatttgaaatttataatagagatataggttttgttattgtatctattgtatgtgtctttttcataacaattgatatacaactggcgattcttatgagcgttgtgaggagatagtgtttgagtatttagagtatattatgagttatttatggtaatatgttatt

SEQ ID NO: 235564 - DNA, 1894 bp, Cannabis indica
aaaaaaaagacgagattatggttacaagaaagggaaaactaacctgaacgcctggtggtttgaggtccagggaaatcccctccaaaatcatcgtcctaaatatcacaatggggaacaagaaaaaccctaaaaacgtgaaattttaatgttaaaacacaagagaagtaggtaaaggatagaaggacttacgtcatccaaatggttgtgggaagccattgattgaagtggaagcggaaatgggttaggatttaggtccgccggagactgtagagtaagaaagtgtagcagagaaaagaaataggcaaaagagttcaaaggaacacagacgacctcctttggggaatcacctgtatccgttaccatgctctcatttcctatttatatttattatgggcctcattaactaacagtatgcttgggtagagcaaatgaaaatatttgtgaagggaaaggaaaagtaaaataaccaaataataagaaaagtcataaaattgttttggaagaaaatattcttgtcataggtctcgttcctcatcaaaaatatagtgacatcaccttttctattcttttcccgaaccccgctactaagaaagacgttcatttcttaaaatatcacatatatataggcgggaatagaggaaggggttagatttatcccgacggaggcaagagtaacaataatgtttataacgctacagcggcgacgggaacagatgatgcaccgatacattctctatctattttattatccaagagattttttaattttaaatttttttcatagtcgtgtatgttgtaattatttaaaatattttgcaaaattttaaaaaaatttaacacaccgaaaataggctttaaacagtttattacactcgcgactctttaattttatacgagtgtgaaataaattgtattatctcaaaaatcaccttaatgatgtggcataagatgatgtgacatgtggcaggtatagaagaagtctaatggaagtgagacccttgataaggttctctagaagatgttggtcgacagtatagaccagataaagtcgtccaacatcaggcatgtgctagacggagtatactggccagcattctgagcaaccaaagagccatctcacagacaagatgcccgactagagagttcgtagagaggtaaatgttcagattcatcttaacaacttatttcttggaaaataggtcaatcaacacactcctcactcacttaaggttctccatgaagtaggaaccacataatcactcattccaaacaggtcacctttgacaaaacaatatttcttcctccaacccctcttgttgctagcaaccaactctgttaccaagcttttttgtttgctctaagaatgaatagatatcgacctttatctgtatcgtgttgtttaagataataacttgacttgaaatctacaaagtcaaccctcttccccttcactctaactatgacttctatacccaacaataacctccaagcatttggcatgagttggctaggagctaccccataatagtccaacacttcttgtacaaatagagggaaagggaatcaaaagccaatcctaaaaggaaattcatacatacaaacccaatcgccactatcccaatcgggacactcagcgatagttggaagtcgctttgaaatggaataatgaatctcatattgatgtcgcatgcgtaggatatcacccttaatcataatggaccttgggttgtcccttaaaaagtgaagggaccgctcgacatactcattcttgtcgccctcatgatcatgtatcattgtcgcatattcaagagttcgaggctcttcatcaatcttgtaaagtcctttttttggcaagttagttgacaaaataatttttctatttatggtaagattg

SEQ ID NO: 235565 - DNA, 909 bp, Cannabis indica
tattaaaaaaaaataaacttatataatttttaaaaattactgttaatatatttttttaaatttttctcatattattttatattaattttaatagttattttaattttattttcataatttttctaactcatgaatatatattttttcaaagaaaatttcatataattttttattataatatttaaaaaaataatttaattttagttgatagatatattttttaagattgtgaattggaagaaaaatgttaaaaaaacttagtccaattaaagatataaattttatataaaataaaattattaaactatgatacaatttttgagatataaataaaatttcctaataataataaaagatattaattttttgttaaaaagaaaaaagatattaattccttaaaaagaataaagatattaatatttgataaacgtgtacagttgtagaagtactgttggataagaaataggatataggttctctagagagagaggatctgcttcctatatatattccaacaaataaatgaactgtttttcgattctcctggagttttcactagtcttcttcatcgtccccaccatatccctcatcctcttcattactcatccaaaatgaaaaccctaacaccaattataagcctataactatacttaattacaacaacaaaccccatctcatcattaattataaatatagatataagcatgagattcaagttgttcaagtccaagccacgtacccctcgagagctcattcaccactttagagattcttcttttgcttcttcatgggaagagagagaaccgagtacacaaacgtcaagaaaaggttaatttatataatatatatttatgtacattgtttatttatttaaatataattacatttacttataaattcaattggatc

SEQ ID NO: 235566 - DNA, 1075 bp, Cannabis indica
ataccaatataaatcgaaatagcaattataatattgtccataaattctaacttgagtcggtcaaagaccattagccaagtccccttcaatcataattggcacttgggtatgacctgtacatttttcttctttaacattaatatttcttaactgtgggaagagttttttttttctcaggtgacccactaccccacaaaaaaaaagatctagctctacattggctcaaatggtgcctttttgcatcttgaacactcaggataaggtcattatttcttatactcactttgaccgaatcatggtaaccctagaacctttcgttttgtcccataattagtggttcatttagtttttccttcctgatctactagtaagttggcttcatatattccacaacatctagtagtacaatcggaagtgttggtaatataagaatagacacagcgcctcccacctctctctttcttctatctcgttggcagcatccaacaacaacccttatttacacattaaaaaaaattcccttattttttatacagaaatctcaaataccttcctcagttcctctttattcttcccagattttgagtgtcttgtagttcatcttctatttcctagtgttaactgaaaacactttccattgccattgctacagaacatagcaaaagggttctctgctctcttccttgaccatatggtttgaaatgaagatctgaatggtgccaatacaaaacacaagctcttgaaacggtttcatcgtcatcgtcatcatcgaaccattaacgtcgtcgttttgacgatcatcatcatcataatcttcagttaagatcgcatttaaccgattgaaaatggaatcgaagaggccatcgatgctcttgtgctccaacgagtaagcggacgccacattcttcacatgaacatccaaagccattctgtgtgtgtgtgtgtatgcaggtggacgaaaaaagtttagggtgatctagaccgtcgatggggcttcgcatttaagggtgatttagaattgggctcttgttcgatctagactattcatgtttagaaaatgagctatttttttttt

SEQ ID NO: 235567 - DNA, 785 bp, Cannabis indica
tatttacactattcttgtttcatttttttacggctgttattattagtttttttactgttttattttggttgcaatactgttgtttgatccaggttaagtcatttgatgagttggtaacccaagatgatgatgatgaggatgatgacaagggattacctgatccagagaatattaatttcgattctgatgatggtgatgagttgggtaaagatggtggtgatgttgctggagttgataaggttgttagtgatgttcctgctgctgatgtgaatcaatctgaggttgttgcaggtagtgaagagagggctaaggatgttgagaatgttaatgccaaagagtttagtttaaagggagatggttttttcgatggtttaagccagcttgaaattgatgatgagcaagttgtgttggctggtttagaggctgttggtaaaatcaatgtaagtgtagtttatattctttgttggtaaaatatgttttattttagttgcttgacacttttatgtttgttttgcaacttttgctttttctgattttcaaattttatttttcaggctccaaaatccaatccaagtgttgttgttgaaaagacagctgccattcattctgatgaagaagctgatgacaatgttacttatactcctcttttggataagagaaagcgtgcaccggtattgaaatcgtcttttgttgattttgggtcggttgatgtgagcagcactctaatagatcgaggtaatgtcatcaggttttcaatctggaggagatgagagggattttaagat

SEQ ID NO: 235568 - DNA, 795 bp, Cannabis indica
agatcctggtaaaataaattccaacagaaagagcagacgtccagaagaagttattcttgaaaaacactttatttgggaagtctacaataattttagcctcgctggggtgagtactgagatagaaaaagcccactgcaccgttcttcctcgatgaaacggccttaactgagtaaagatactcaatctctactggagtgggacactcccagttcataattttgtacaagactttcagactagcaagaatcctataggagatgggagtcagctggaatggggcaacttcgatgtggtttatatagtctttgaagtagtccccaagaggaagggtggcccctgcactgatatgctcaaggcttcaagcacccatgctagttgaaccgttggtactggtctcactactagtccccaggttattgctggcaaagcgtgcagggggtagcaactgaattcaccctctcgtactgatctaacttggcatgattgcccaagttcaatttcacacgttttcaacatctcgcctgtgtagcctgagatagatcacaccttcgattctatcaactcaggctcgaaaaagacgctgggatcctgaggagttttagacgtacgtggcttgggaggcataattccaaaatccaagtgacctggttcaaaagcaattgttacgttgggtaaaaacgaaggcttttccacaggaataaaggacatgctgggtggttccggccaggctacttcgcacaagaatcaccgtctgccttcagatatttcttataagaagcgcctgtagcgactaga

SEQ ID NO: 235569 - DNA, 763 bp, Cannabis indica
aataataataatagtaatagtaaaaacaccttatagtataaattaaaatcaaaagggctttataacatacaaagagtataatcttacccaatacaataagtagatatatatacatatacatatattgaaacataaaccatgctaataattagtgacaactaagaaaattctcatataaatattgcataacttccttaagtaatttttccttattttttttctttgaataatttttatttataaaatttataacacacaaataaaaatcatcaagaaatatatttatgagattgtgaacgaaattaaaaatctaaaaaagaaaaaataaataaatagagagtaactaaggaatatgaaaatataattttaaagtttaggttattattactttatataaaaagaataataaggatactgatggagatagatttgttattcatgtcaccgtcttattcctcataaaactcattatatgattttaagatgttgtgatcactgtatctcacttatagtcactattacattcaaagttgttgtcctcactgtatctcacttgtgcatccaatcaaacataatctacaaacttgtgcatccaaataaaattttcactttcaataattcttattcgtttaagttttttttctcaaagtcaaaataatatatttttaagaaattagagtaggtttataaatttacactctataccatgtagatctgcataatctttcactaaagttaattaggctttaataaataaatataa

SEQ ID NO: 235570 - DNA, 2457 bp, Cannabis indica
taatggcttaagggaaaagatgatggatctcattccctcagtaaaaatttgaagcctcatctcactaccctagccacgaaacctactctctctctctcttcctctcttctaaactgaaacctatactgaaagagtgagtgttcatatacatcaagtggtactcaatcatagtgtgtaaggttgtgaagaatccagtttcaggagaagaggattcagactgagatcttggtgatactttgctacagaaaggatacaagggttagagatcggagtggaaggagacattatattccgctgcaaccattgtaaggttcctaatactttatatgtgtttatttcatatcgttttagaagttcatatttaggatgttaataacgtacatgttagtaaatctagatcctggtaaaataattccaacatatattgcatcagctaatcagacaagcccgtacgtacacctggtactcatcttaagtcattgactcccgtacctacgcctgatacgttgctaggaaaaaccccataatgtttcgatctatgccataaccaggcatttcatatcactgatgcccgtatctaggcacgatacgtcgccaggaaaattgcatcccctaatcaggtgagcccatttatgctcggtagtcatcatatgtcactgacgtatgtacctacacccgatatgtcgctaggtatatcgcatcacctgatcaggtgagcccatatattatgtccacagtatcatcacattatcattttttaactaattaatcttttcattatataacaatattaatcatattttgatctgaatattaacccattcataacaatattaattatattacaatacaatgtcctatgtagtacaatatacttttcttacctcaagtaccgatttaggtatattggcctacatacttagagtacgatcgatgatccccggtcgtatgccataacaataataaaccaataagtgtttatcccaaaatattgctcaatagttccaatggacaacctagggtatcctaccaaaccccgtaattcaaatacactaaaataaaacttatattttactctaaaacattcagaatatggtaaagtacgttgccaacataaaaaatggtatataaaatgtacaaaacaaacatccgagagaaaagttatgacaaaaatacgattccaaatctccctggaatttctagaaatgacaggcaaaacgccagactgcttttgggagcaaaaatctaatatttcgcactccctaaacaccctcaaaacttatccaaatcactccaaacttcacagggcacatatataccatctatatcagaactagtcctatgactacccaagaacaattttataaggacagaacctccataactattataactcacaaaacccctatacgaaacaaattattttaaaatttaaattgaattaaaccttgcctttagctttttcgctcaaagaaatcactatctcactactaccagagcttatatcgctaggtttaggattgaaaatcgaaaaaaatgaaatataaagggagagcgttttgtcgaacggaaaagacgagagttcgtatcatactatttttaaactaagaacatattatatatataaacttatgataagttttataataatattaataaaaaaattattattaataattatcttaccatttcttagcccctaaaaatgtctattcctagggcgttaagtcaaatctcacatactcctaattaccccaatacctacattattatcttatcacaagattcccatcaatttcttatattacattcacatatgctatataaatctctgtaattcataaatcacgcttatttatccacttatagcaaatttaaaatttatgttgaactagattagtaggatcataatcgcacttattacctaattaacccaaaatataatataaactctaattatttactattaggcttattgggatattacagtgttccggtcccacttgtgtttctttcgtaatattcgccgcacgagctaagatgttgatacatccatcccataacaaatctcttacttcaaacgacgagattaatagaattcgagacccttcaaccttgcccccgaacaggaatgggtcctcaactttcgattcaaaagtaccatctttctctcattatcaatggttgtgttataccttgcaaaccagtccaacccttctacaacatcaaaatcctctatgtttagttcaactaaaataactaacaattcccttccctccacaaacaccgaaagggacctagcccacctgctggaaaataacaagttctcaagtaggcagtaaggtactagaacaccttggtaacacatcactaattttatgcaaattttcaatcacccttctcaaaatgtaggaatgtgttgcaccggaatcagttaaaatagtcaacaaagtacca

SEQ ID NO: 235571 - DNA, 709 bp, Cannabis indica
tggggaatgaatttactaaaatgtgggctttggaggtccattggagatggaacacaagttaggactttcaaggacctatggctcccgcgtctgaggttttttttagccaatcatgaggaagattaataatgactgtcaggggagtgaatttatccttccatctagtgcttgggatgtgaggaagcttcaacaggtttttttgccaatggatgtgaacatattttatctattccattaacgaggcatgatgtagaagatggttggtgctgacactatgatagggacggggtttataatgtcaagagtagctactcattagcgtggtcgctctaggttgaggagagagtcacagattcatccaggttaactcattggtgaagtggagtgtggaatcttaatatgccatcaaaggtgaaagtttttgtttggcatatgttctatttggctttaccagtagcaacacaacttatctcttagaaagtttaggtacctctttgttgttcacgatgcagagaagaatctaaaacacctgagcatgccttattttcctgttctggtttgattccaatgtggcatcggttaagggtgtggtcggtgctccattgatgtgtatatggaccaatgtaggaaattctcctatttctctttgacaggctatcccgtgaggcttttgaattaatgatgaaaaccctttggtggttgtggtatg

SEQ ID NO: 235572 - DNA, 718 bp, Cannabis indica
aacaattaatacaaaatcaaaaataattaatctaaaatattaactaaattctaagtaattttagataaaaaataaattaggtacaaaacaaaaactaaaaaccctaaatgtatcgaactagtcggggagagagaaaaaggtggcggctagacatttttctccgaccacgagcagcgtccggcaaaaccttcttctccgaccacgggacgagccattagcgtcggggagagagaaagtgttgggcgagacgttcttctcctaccacagcaaccagccatcgttgatcattccgagccatgagatttgaaagggttctcaggagaaattgtggtgtggggctaaaaggttttgtatttgttctttcaattttagagagagaaagcgccgacttgatagagagagagagagagaggagactgttagtgtactgtagttgagtgtggtgacagttgggccattcggaccaagatattttgttgaatcaaattttgggatggctttagtggttgaaatttgaatgaatgatttcatagagcagggctacctggtcaaaattcttagccatgaaggttaagaccttaataagagaaagagaagggccaatcagaattgaggaagaggtaaactttggatttcggatagaggcatctttaattagttaattaatttgttcaaacttatcttgtctcaacttcttaatcaattgggtgttgtcctc

SEQ ID NO: 235573 - DNA, 1304 bp, Cannabis indica
aaatatataattaataaacaccagatattttacttagttttgtagttaaagtctacatacttcacgagttcttattattaaggatatgttttgagtacatgatacaatatcaatatttaaataacaatattttctctctcaaatttgtcgtctctttttttctatggattctgctcctatttataggaatatacgttggcagttattctttttggggattggttcattcataactgtttatgaaatgtggataatccccacatttcatttaatcacacatgggataatatttaataactacccaactctctttatttttatcctctagacggttattgctgacttggaaagttgtgtctcatcatatatgagttctcttcttatccatattagtaggaaaatatcgctaagtgttggaaaataatgctgtattcctttattggtattagcaatgcaaggtgatcttctcgctatgtgtaacgcgaggcgattttatgttgctacatttaatctgctcgtaccggagagtatcctcttcttgtgtatgtaaatgagcttatcccgaggaaaatatgtgtctcatcaatactagtttaatagttattattcttgtctcgcataagactaagcagcccacgagtttgaatattatctatcaaacttatatttaatatggacgagttattttaaattgcatttaatgatacatcattattatattatcagaattgattcatattccttctataggacagtgtcagcctctggtataaagccaaattttaggtataacattattatttaataaaaataattaattatttttgttggaatatttatttttcaaattaatttgattcaaaatgaatattaaagttactagtttgaaatttaaatttaagttaacaactatcttaattatttaataaaagtttttattataattaagacaaaatgatataattttatggtatattttaattttgaattaaataaatataacttagtcatagatttcaaattcaaattcaaaacctataaatattaagacaaaagttattttaaccctaattaaaataataaatgttattattttaacacaaaactaatatgatatcttaaccacaattaaaataataaagatgtcttaaataaaatgtttatttaagaataaattaatttaaattattttaatcaatttaatgagtttaaaagatgtctttaataaaaggcatgtttaagattaattaattaaataaagtgatgtaaatggctcattaacaaggttctctctctctctctct

SEQ ID NO: 235574 - DNA, 2355 bp, Cannabis indica
aactttaatacaataatgcgagtcagtaatgttacaaatgacttacgttgtatcttgttccccacctcgctaactggggcagcgagcagctgcttcaacaaattcacccatcactctatcacctcttgggaccagctgtctaaagacttcaagaaacagttccaggcagcaagagacaggcgacctgaagcatcttcctttactaacataaagcagtaactgggcgagacgcttaggcttacttaagtcttttcagcacacctgctgcaagagttagaaacttgaacgacagtatacatcttactacacttcaagcggggattacaactgatctctcaacagctggaggcgagctgtggaatgacttgcagggtcaccctgtaaaaaatattaatgagttcaatgaaagagctcaagtgtttgtacgaaaggaggaagcaaggaaagagatgaagtttttaaagactggctcgggaggtaaacccagcactgtctcgacaagcaccgtctcgacaaaggctgacaatctaggaggctctagtacaaagaggaaagatgactctaaggaatcagccaaagataagaaaaaaagaaggagcacaacaagtacgtgccaatctgcactatttataccgagcttaatgaaacttacaaaaatatctatcctgcacgtgagcacagggtcgcatttcgcaaacctgagcccatgagacatgcaagatacaaaagggatgcaacgaaattttgtaaattccacaaggacataaggaatacgacagaagaatgttgtcaattgaaagatgagatagagggccttatctcgtgtggttactttcaacaatatgtgaaatgacaaggcaatggacaaaaccagtcgaatccgcccaataacccaagcaaccagggattacaacctcctcctcttgtaggagagggcattctggttatctcgagagggccacatcttgcgggagaaagtaacaatgcccaaaagaaatatgacaaagaagttaagaacgagcaatcagctttcgctctagaatcctctaagagaaccaaggctgacaaacctccaattgtgtttttagtggataatgtgaggtatcctcacgttggtggataatggaagtttagtgaatatcctttataaggacagagtaaagaaaatgggactggaaagagcaaagttacaaccttgcatggtaaatctatgtagatttacgggcgatagtgtcgccagtcaaggaataattgagctcccattaacagtaggtgagacacctttatccactatcataatgcaagacttccttattgccgacctaccatcagcctacaatatattgctgggtcgacccacactgattggactaggggcagttagttcaattaaacacctatcactgaagtttcaaacaccgataggtgtaggggtagtgcgaggtgaccaactactgactcgggaatgctattgcatagaactgcaaaataaaagagttggtcatcagctaatggcagtcacaactgaggaaggcgagaagcaagacgaggatctggatcctcagttcaagaggaacagaacctgctgaaaccaatcgaggcattggaggaagttattttagatccaaaaaatcccacaaagtgtgtactcattgggaaaaacctggatgaaagactaaaatagcaactaataagttttctgagggcaaaccaggatcaattcgccttggctcattcagatttgataggaattgaccctaaaattatctatcaccacttgaatatcgacccaaattactcagccaagagacaaaagatgcgacccttagattctgaaagacaacgggcacttaagcaggaagtggataagttgttgattaacgactttatacgcgaggaattttatccctcgtggatatccaaccctgtccttatcccaaaataaaatggaactttgagaacttgtatcgacttctcgaatttgaacaaggcgtgtccaaaggattgcttcccactaccaaggatcgaccagttagtggatgctactgctgggcatgagcttatgatgttcatggacgcatattctggatataactagattaaaatgcatgtccctgatcaagagcatacaagcttcgtaaccaacatgggactttattattataaagtcatgccttttggtttaaagaatgttagggcaacgtatcaacgactagtaaacgaaatgtttgcgaaacagataggaagaaacatggatgtctacgtcgatgatatgttagtgaagtcaatgaaaagtggagatcacacaaaacacctcgtggagtgctttgaaatattgaaaaagtacaatatgaa

SEQ ID NO: 235575 - DNA, 1681 bp, Cannabis indica
ttctggtcttttgagagctcaggaaattttttagtgaaaagtatgtattggcatttgcaacaaagaaagtaagatgatttgcagctggtgggatctgatttttgggataaattatggcgtcttaaagttcctccgaaggtgaaagatctattgtggagagttgcctcgaattgtctaccaactaaggtacaactgcggcatagacatgtcaacattgactccatttgccctgtgtgttcctcggatagtgagacaatattgcatcgactggtggagtgttcttttcctcgggcttgctgggtcaatacgggactcgaagttacaatggactatgctggaactttcagaggatggcttgacacttgttttaaagtttttgaggaggaacaaagaaagatcatagacatcacttgttgggctatatggaaagtaagaaatatttgtatttggaaggaaaaaagtgtaaatgtggctgctgtcaatcttttggctacaagcatgttggaacaatggagcaaggcgtaagataagtctaaagttttcacagctgcattttttacagcagctgatggtgcagatttgtggaaaaaaccagcagcaggggaagttaaaatcaacatagatgcatctctttttttttatgctaacaggtatagctttgcttgtatttctagggatgcatcgggccatgctttggaagccatttcctgctgcaaaccaggcaccgtgactccagaaatagcagaggctatgggtgtgagagaggctttaagctggctaaagaagaaaggttggaatcgggttaccatcgaaaccgattatcttactgtggttcaagctattcgtagtccacttcctatgttttcctattttggaagtgtaatttcagactgtaagacgttgttgaaagatgttaatgatatgtctattttacatgttaaacgatctgccaatagtattgctcatacaattactcgagtttcatcttgtgccgttaatcgtgtcattaggagtaatgagtttactcctgatatccgtgatataatcgtgaaagaagtttattaataaagtttccttagttatttttaaaagcctaacaaatcaaaaagagatataagacttcattatgaaataagcaacaaaagaatattagttttttttattattattattatttaccacattaacttattttttaaaatctaataaatcaaaaaaattagaataacttaaataaatttaaaataaaaaaatcaaaagaagaaaattcaatccattttatgaatcttcatttacccttacgtatttaattttttttttttttgagaaaattatatggtatacctattttactttacttattttaatttttactttcatttttatatcctttaagatatacttatcctagacttaaatagaaagtgaaaatatattgagcaatccagtaaaaaaaaatatattttaataaaatataatatgagaatatttttaattagtaagtacaaaaaagtagtatttttcaacgtatcttatttttttagccaaaaatctcaatccctctccgttgctttcatatattttttttgggaaatttacactctttactaacttttccccatgtattacaaaaatactgtgacacgcccaaatttacgttaatactgtttttttttttttt

SEQ ID NO: 235576 - DNA, 1079 bp, Cannabis indica
ctggttaatacaaagaggaaaaggagggggctgtgaaatttggtgatggaaacaagggaaagattgctggtaaaggtgatgtaaacctaaatggtgtggctcagttatcagatgtcctgtatgtaaaagggctcaaggccaatctcatcagcattggtcaactgtgtgagaacaactcctttgtaagtttttctaaaactcagtgtttagtttcaactaatgggtgtgttgtcttgataggaaacatgactgtagattcatgctatgcagtatgcaatatcatcgtgtgcaatcgaaccttcctggataaactggacttgtggcactacaggctggggcacctaaattacagagacctccaaagactgatgaagtttcaagcagtaaaaggaattctagagatgaaagtatccagggatagaatttgtggaccatgtcagcaagggaaacagactaagatatctcacccttctatcaacagactattaatcccgagtatgttggaactaatgcatgtggacttgatgggacccatgcaaaatgaaagtctcagtggaaagagatatgtaatggtccttgttgatgattattcacggtacacctgggttgagtttcttagagaaaaaatctgagacctttggactattctcagctctaatattgaactattgtaatctctcattgaagatcagttaataaagattctctaaggccattattgtggctattttttggtcaaggatgtaggcaaggtgattcaccattaccttgtttgaacctcgttaagttagtgtgttctctatttacatttgatgttcttgttactggttttatgtttgctgcaacacagtgattgtcttgaataggttttcattgattcttattttgtttaatgtgttcttgctgagttgttgtttcacaacaattggtatcacagctcaggtttcttaaagcaaaaacagaatcaagaaagtgatccatggcttctacacgctttgaagtagacaagttcaatggagccaatgactttggactatagaggaataaaatgaaagaatttctggttcatcaaggagtgt

SEQ ID NO: 235577 - DNA, 531 bp, Cannabis indica
aaatattaatttcaaataatatagtactcttgagtgaaataggaatcaaattttatttaatttttttttacaagttaatctctatatagcattttcttttttcaaatatatttgatgaaataaataaaattgttgatgcgatttttgtcattttttctaagaaaatcgtaagaaacaagaggattatgaaaaatttattttgctaaataaaacaccataaatgaaaagggcaccagtgatttatagttgttcaccatcaagtcacgttgcgtctactttatttttatcaatttaattcgacacaacagagttatattctcaaaagtgtgtggataatagtacaaaaagaaatttctaagccaaatcaatatctaagcttatgggtaaaaggctcataggagacccaataccataaaccatataataatagtcgtagtaatgttcttaggaacaacacacaaatgggagcaagaaaagagaatgatctcttattcctgatagctatgtatatatcaatagtgtttgagtaat

SEQ ID NO: 235578 - DNA, 878 bp, Cannabis indica
agcggttaaagctttacttgggaggtcatattgaccaagccaagtccgtcatgattttgccacctctttgcatgaaacaatcaacgaccggccatatgaagataaagacagcgctcttgggaggcaacccaagttttaatggtgtttttagtcgaacattcctaattgtttttcttttttttttttgttagttttagttcattgaatttgtaaactgaatttttagtttattatttttcattcctttcgagaaaaaaaaaaggaaagaaaaaaaaaattctgggcactgcccagtggccacagcaaggcagagtattcaccgcgacagatttatttatggccaaggcgaaatactcttggcagagaaaggattttgcacacactatctcgccgcatcgaggccatttttggccgcggcgagaatgcccatatgtgcataaatagagcattttgaattttcaatcccaaaacacccattctacaaccctaacatttccattccgatttctccatccccattgccataaatcttcaatctcatatcacaaaaaccacttttcttcaattatttcttaatcattcagccctaatcacttcaaaaccctatttctctcatcaatccatcttttcctttaaaaaccacactcaaatccctaattttcactcaattttaaaaatccactattcatcaccttctacctcaagaacttacaatgtcttcatcaatggaggtagattgaaggagattctcatcaatgtaaataatttcttatgattatctatgaaatttttttagattattttgaatttttgagaatcttgtgaaaagtttgtgtgtttttgctattgtttggcatattgttgtggaaaaattgttt

SEQ ID NO: 235579 - DNA, 706 bp, Cannabis indica
tgttcaatggcggttttaaccataaggggttttttcggttttcgattttgccagtttcggttccagtggtattcggtaggtcaatttgaacgatttttttagttttatagatttcatgctcagccctaccaaaatgtacacttcatcttcaaatattattttttttagtttctctctcatttacatcaaatttgatatactttcttacaaaaattactgctatagtgggtaacttcaaaaattatccacaatagtcccacatattacttttaattaaattttatagttatatatgttcttttaaaaaaattagttggtgataaagtaacgtttttttttaaaaaaacaaaataatatctttttttttttttttttagtgtagggtaattgtatttacaatgaattaatagtttaatagcttaaaagtttttggttcaaacccatgatctctccttttttcccatcactcccttcccactaatttagccttagtagcttaactaaataatattagtcatttagacaatgatatttataaagttgattcaaaattagaggtagcgaaacgactttcgacacgatacacgaacatgacacgaattttacaacttagaatcaagacaattagaggcggatcgacacgacttgacacaaaataaaaacgggtcaaacacggcacgacacacttaacacgaatttgacacgt

SEQ ID NO: 235580 - DNA, 1386 bp, Cannabis indica
tgaaagaaattgtttcacttcacgtagcgaccctttatcattggatgaaagaagaatagcgtccacatataaaacaagaaaaaaaatcttactcccactttctttctattgtgataaatccaatatgtaagtatacgtatcgttttaacaagtaatactctggtaagtgagatcactcccatgaggactgtagttaaataccaatccattaaattcttttttctatttggcaatcgaataaataaattttaaactaaataaactaagcaaaattaaataaaacaaacaaataaaaggttcaacaatggatgtgaaatcaaggatatgatttcaattgctttgattatccaattattaatactaattaacaatttttctttctcctatgtgatgatagattataaattaacctaaactcttttcaaatcataaaggtcttaaattgcatgccaactactgcatctctgagatagaataacatacaatttgcattaagcaataattttaaagtcacataagctatgtgaatactctcgttccacatcaaaacctatgtctattcatttagagcattctcaatactcactttttagattttgtattgagatcatagatcatgcataaggtgatcaatcaaacacatgtaataattacaaaaataaattaatcaccataatagaaaatgaaagaacaatcaaataacattaatccatagaataatctcagtcaatatccatcaaatccctaaatagaaagtttagctcataatcaaatccgtaattaaactaaacacaaataaaaacataagaaatcaagagaagagaaggaaactagatgaaagattgtcgcagatcgcccatgctcgctccaagagccttcttcttgtgtttctagggttctattttatctctcctctattattcgcgaccctctttcattaaatagagttcttttcagtccaaaaacaagaaaagacgaagttatccttgacctgtacggagccggtgccatcgcggccaatagcctcaccgcagtagctgtagaaaagtgaaaaacgggctttccgtagccactgaacccattttttttctggttcgaactcttttagtaaaatatgcataactttaacatacaaactctaaatgagctgattcaagatgcgttagaaatttaaaaaagtgatctaaaacttttatgttttgctttttcaaaaatatgaccataacatagtcaaattcaggtttgaagtttcagatttattttcttacaaaattttctctattttatagatcaccgttttctaaaattttactaatttatacattcaaagtgtcctcctacttttgctaattggttttgagataagacctcattcatcttatctcc

SEQ ID NO: 235581 - DNA, 1218 bp, Cannabis indica
tgtattgttttatgtgtttattattttttttcagtttttaatttttgggaatgtcctattacagtcgttatgctgccgaaattttactagaattaggataaatttcactaaaatgcataaaattcaataaaatatgtatgtgtgtggtaattaacttaactgattatttactacacatttaaacaaataactgaattttttttttttttttgaaattttcgaaatggatagaattttgatgagtgcgaatagattatcagcagagtatagtgaaggtgttgatttcttggacttttgttagtttaatgccaaaaattccaaattggttctttgtccttgtcttaaatgtggtaacatggagcgtgtggacattgctaagataaaggagcatttatttaggaacggaatagacaagagttataaggtttgggtttaccacggggaaaagaatagagttccgggcgagggaacgtctaagtctaacaaggttaagggtgttaatttggagtatgaggatgatcacattccagaaatgattggagatgcacaatatgaattaaatgtcgatcctttgaaatttcaaagttttgtagaggatgccgagaagcctatttaccctaattgtaataggtttactaagttgtcgacacttattagattatacaacataaaagccaaacacgggtggagtgataagagcttttcggatttactagctttcctagtagagttattaccggaaggtaatgtggtgccttcatctttttatgaggcgaagaagacactttcttcgttaggcatgcaatatgaaaaaatacatgcatgtcctaacgattgcatcctataccgtaagatgtttgtggatgcaatatggtgtcccacttgtggtgagtctaggtggcaaaaaaaaaagaattctgacgaggtaaaggttggtgtccctgcaaaagtattatggtacttacccccaatacctcgtttggttcggttttttcaaaatgccaatcatgcaaaaaatttaatttggcatgccagcgatagaaaggtagatggtaagatgagacatccagctgactcacccgcttggaaatcaatcgatgctaggtggcctgaatttggcaatgaacctaggaatatccgtcttggtctttctgccgacggaatcaatccacataccagccttagcagtaagtatagttgctggccagttttgcttgt

SEQ ID NO: 235582 - DNA, 901 bp, Cannabis indica
tatttaaattatttaatatttaagtattattaaaacaaataaatatattataagtttaattatttaaatatttttatgagaattatcaaaataagttaaaataaaagttaaaaatatttgataaaatgacataaaattacccttagttcaacatgtacataaaattataaaaaattttgtcacacaaacaaattttattataatttattcaatgaaattttttttgtagatgacaatcgataagacttggataaccatgagaaatcgtaaggatacagcgtactgggaaggtctccaagtctttatgggactcgcgtctgaacacaaagattttgatagaagatttttttttccttgtgttaaatgtaagaatactagactgcatcctttgaatattgtggatgcacatatctttacaaagggttttgaaagcagttatgagaggtggatttaccatggggagccgaatgaacctgtcgaggctaacattgttgatgcggatgagatggttgatgtcattgtagattaattttttccctcctataaatgatgacgaaagagttgttaatgatggaatttagaggggtcaatattatgatgagatgtttgaggagatcgaggttgagttgtacctctgttgcgattagatgtcctccctcaactttatagcaaagttgatgcacttgaaaaatttatgaaaaataccaaattaaatttttgatgaattgttgaagttgttaaagtttgaattttcgaagaagaataaaatttctgtaacacactataaggtgaagaagaaactaggaaagtcaagattagggtacgaaccaatccatgtgtgtaaaaataattgttgcttattttacaatgagcatgcatcgaaagatttttgcccgatgtg

SEQ ID NO: 235583 - DNA, 1279 bp, Cannabis indica
ttaaacttgaaactaaaagtttccatatcgatggataacataggaaataccctaaatattgcaaaaacggaaaaactagggttctgaaaaactgccccgactggcagaccgactcccaaacctgaagtcttgtttggtggggttcccgaggaccaaccgaaattctggttcttacaggtcccactaaattggtcaactggttcagtgcaagaaacacccaaaaccacctacacacctcaatttgatcccaaaacttacaataacttccaaaacacctatttgtaccataataaacataatccacacaataaaaccagccaacgacatccatatcaaaattcaccattaaagagaaaatatttagttcataaactcaaatcttgctcaatcaccaccatagccaacaaaaacaacttagaatggcttaaataacctcaatataacattaaaacacaaaatcaagtaactcttaaaaccacagaaccctaaatcacaaaaacatgcaatagaacctatcttgaacttaggaaaacaaaggaaagagagctaaggggtttaccttgagttgatacactaaaaattcagctataaatctctgaattaaaactgaaaaagaccaaaattcttgctgccttaaagaggattcgagagagagccaaagagagaaaaggcaagttatgtgatttctaatttttgataaatgagatattaacttaatgtttagtttatctaactagaataggagagtaataatcagatttacttaacataaataactcactaagggacaaaaacccaaatggcaaaaagactattttgcccttgtctaaaccataaggcatccttactatctaggggtagatttgtcatttctaaaacctcaaatattcttgacattctcaatgtttaactatattgctccgctattactaaaatactaaaatgtaattttattggtcaaacgtcgtgttccaatattgccgagcacaaaacatgaaaaacgtaaattttcatatattgcataaataatacaccctaatttcaaataaatctccatatattcataaatcataattagtaatctagtttcataattaagccctaattatctgctaattcccatattaaaattaagtggtctttacacgtagactacttggccagttcttgttcaatatttttctccttgtactttcccctaacttcttttttcttactattgcttgcacctgcatccgctattttacacatacacactacaaataattaattaatcaac

SEQ ID NO: 235584 - DNA, 3028 bp, Cannabis indica
ttaataacggtagttttttaacagatgtcgtaattgattttaggaggaaaaaataatttttttttaaaattttcacctgcattagtattcacgatatatatataaatatatattgtagtgcaatattgtctaataaaatgcatattattaatttattttaaggagggtagaatgtaacactaactttaatttttcaataattatgtgtgacaatattaatttgatagtaattgcttataattattttacttgtgggatgaaaaggaaatgattggataatttagaaagtttacatatttttagactgatcaatattatggtattattcaaagttcatagtagatatatcatcaagaacttaaatataatgtacagtgatgaatgaatggagtttgaccaaatgtaatttagtcttatataattaagattacatagtaattaagtaatggttataaatattgtttgcgtgttataactaattgattgaagataagtattgatctttttattcttgctatttttgttgtggagatcgatgtgtagagagagaaaatagggatattggttggagataataggtcaaatactttttaaatttaagttgaagatatttagagtagtatagttttatattttagtagttatgatatcttgatataagccacttcaaaaaaaaatcatcttatattgaaacctccatattcacacgcaccacaaagatcagaagttgtcacacccaatcatagttcaaaaaaaaaaaaaagaatcttagagcaattaatcgttcaagaagtaacttcagtagagtttcgactaaaggtgttctggtttaagattgtttaatcacgtattaatttaaagtcgtgttattataagtaaggtgtagtttagaacatttcaagaaggcttggtgcaattattctcatcttcggtctctgtttccatgcttaaccattaaggtaaggaaccccctaatactcttttattggtctaaaatccataatcttgatctttcattattttttttttctaaactgttagtcacattaaaactatcttatctctctgaatactgttttcattttttaacgatcttagcattgttggaaagcttattcaattatccatgttttctataaagaaatatccattgttcttccttgatatatacaaataccacccaggaatgttggaggttgcaacttgacaaacctttcaaaaacttaatccctatgcggttgcagagttagtctagtgttagctaccactagagcaagagatggaagaatcacttgctctactagagcagcccgaaccaattgcctaattcgatgcaacttttcttcttgatgaagtatgatagttcgcatttcaataaacatctactaccattcggtaggaggattactattactcactcttgcattatccctaagattttatgaaggcattggtaatgtcagtggaatggtttgattagcatcatgttgtacatgtttgccctgtgatctagttaatttactagggcccattctttcaaataccctgaaatcaaaaatcctagcgagtcaggcaccaattccacacttacacattttatgccaaaatcctaagttaacacatacaatttattttgacatatgacaatacttattcacaaataataatcatgcttttcattaaataacattatcttctagatgctcatatgttgcccattaccaaaagtagtaaacatttaatcacatatgcagataagtatttactctcaacacttattgcaccatgagtcgagcttgtctttgacgatgattctacatgttcagtcggtcttcaggaagtttaaaaaccttggtgctttgataccaaattatgacaccctaattaaagggatattgggtttgtgccttaaataaaacctatttcaatataattagactttactaattaataaaaaatcagaaattatttaatgttgtatggttcacatgatttatttcataattacatgtttaatatataaattctattaagtccagaacatatatttattcatgatcatagtgttgtcaacacagtggaatacaatcatgattatatgtttaaaagtttaagtcccatgatttgtcaatacactagatttagattgacatgataatcagaaataaggtatacttacaccttggataagtgttatgtcctttctagggcattggaaaagtatgccagtatcagatgtatggagtatacatcggattggaccgatattgaacttggataaaatatcctaaacttattgttatatctttctaagtcaatatcattggttgatcttaggtctatagatcttaatcctgagatggtagtttgatcttaattgtattatttatggtctttgagtcgttcgttaaagctcaatcgactgaatacatacattgtgggaacatgatagcgcaattaagtgggagcactaatcatagatatggaatctataacttctataagtatttagaagtgaaacgataatttctttgagcttggcttaatagagataaatgattgaggcctcatttcagtaattatattagtttattgaaatatcatttataggtagctaagtgttttaaggataaaacacattgaagggcagaacgttaaatttgtccttattcgatgtagatcatctatagaagatctttgactatttagattgtaacaatggataattcacaacgtatctatatcttggtacatatagagctttctatataattaagagtgcaattctgaatctatagtggcgcaagaaggaattaataagttagagatttttcttggtaaattctaaatctacttattggaagcttgattatataggcctatggtccctacactagttgagataatactgtttgcagactcagttaattggttttgattaatcaattataattctaaaattagactatgtcttatttatgaactaagcaagggcttaattgtgaagaaaagaggttttggagtttat

SEQ ID NO: 235585 - DNA, 1034 bp, Cannabis indica
atatattggatgttaaattttaccatcagatctgacccaattaatttcagtcatccaattgatccagcatccaatggatgttggattagatcgattatatccaacaaatgtatttcatgtatatttattggtttgaattggatttatttaatattttataactagtatttattgaattggattgaatctatttaatattattttagatccaatatctattggattgaattagattcatccaataaaaaaaataatattaattttcatctatacatgtatttttttttcatataacaacataaaatctaaccactcattcaaactaaatgaaaaatattatttagttagattggatgtattagatttttggacacctcatcaaacatcagatccgatccaattggatattcaaaaaataacattcaatcccatccgatcagaattggatgtccaatatttggggttagttgtcattgggttggattgatttatgcacacctctaatcgaaagggtaatgtcaacagggagattgtagcattttggcataagttttgggaattaaaacttcctctaaaggtaaaaaattagtgtgtggagggcggttagtaggtgtcgttcctacgagagttcatttgaagactaaatatgtggatgtttatttgttgtgttcggtttgccatggggcaggtggatcaattttgtactgtttagttgtctgtgattttgcgcaaaattgttggcaggtagcgagtttggctatgattttaattgatgcaaggtcgttgggggactggtttctttacttgttctcatgactgggtgagaaacaaagtgttaaggcagtaatgttggtttgggcgatttggttcgcacgaaatcaactcttgtgaagggtaaaaaaagtcgtgtggagttcgttgtcaatttggctcgtatcactcttcaccagtggagaaaagctcaagaaagaagtttgtttccttcgtttaatacttggtatctttcaaatagggttgagctatggtctaaacca

SEQ ID NO: 235586 - DNA, 974 bp, Cannabis indica
ggataaggaaaagttcgtagtttactgtgatgcatctagttggggtgtgtattgatgcaggctgatcggctcatcgcctatgcctactgtcagttaaaggaatatgaacacggataccagactaacgatttagaacttttcgcggtagtgtttgctttgaagattttgcagcattatctctacggagaaaaatgtgagatttacaccgaccataagagcctcaaatatttttttacccagaatgttttgaatatgagacagaggagtttgttgtagttggttaaggatgaaacctgttaaatcctttaccgtacagggaaggacaatgtagtggctgatgccctgagtaggaagggtcccgggcaggtaactagtatgattaagatttcatctcagctagcagatgacatggtcagatcaggtatcaagtttgttgtacgcaaacttcataatttaacattacaatctgatctgttggaatgaattaaagctgaccagttaactgatctagaattagtgaagattcgagaagacattttggctgttcaagctaaaaatgttacggtgttagataatgggatgttgttttataagatcggggtttgtgttccaagtagtgtggaactttgaaatgacattctcgaggaagctcataccactccttattcaatacatacaggcactaccaagatgtaccaagatctaagaccctactactggtggtgcgggataaggaaaggtgtggtggaatttgcatcctggtgcttaacttgttagcaattcaagactgaacatcaaagatagggaggattattgcagccactgacacttcttgagtggaagtgggaggatatcactatggactttgtggttggattacctagaaccacgagaatgtacgattcaatttgggttgtggtggatcgatttacgaagtctacacatattctaccgatcaaaacaacctttacagt

SEQ ID NO: 235587 - DNA, 853 bp, Cannabis indica
gagacactaagggaggctcatttaatgagttggatggaggttctggatttttttaggataacaatgccatgatcttttaacactgcactgaagacaaaccaacaataaggtcttgatctctaccagaactatctccattactcccatcattggtcttagaattaactgaaaaatttattgcagaaggttttcttgaggtattattgcttcgattatcatttctattagggaatttaccctacaatttgtgaccaggaagatagccatagattctaaaacacttagacattgtgtgacatgtgatgccacagtgagtacatactatttttgggcaatgtggttgaacatttccagcaaattgtccataattagaactagatccaaatcctgatttgtcatccttggtagaaacatttgacaaacacctttggctctcttcttgtataatagaagcataggtcttgttgatgttaggagaggatcttgcatcaagatctgagatcgagtgctgctatatgactcattcaatctaactagaaatttaagaacacgatcttcttcctggtattcttggattgtcttcatggcaccacaggtacatgtaggttgtgggcgatactcttgaatcatatcccataaggacttgagttgagtaaagtaattagtaacagttttagaaccttgagctagagattgcttcgtacgtatagcttcaaacacacaaggagcatttttctagttgaatctttcctcaagattggtcctgatgtgtgtagcattgtccatataaatcacactttcagcaatttcacttgaaattgcgtgaaaaatccacaaaatcacaatgtttatt

SEQ ID NO: 235588 - DNA, 691 bp, Cannabis indica
aaaatattcatgacatatgattgtactttatgcaggttagtcaagcttttgctgaaatgatgttcaaacatgggtttgttcattgtgacccacatgcagcaaacctactgattcgcccgatgccttctagcagaaagagcattctaggtagagttctgctttattgttgttctattagttttggtgctagtttaatgcataacttgtgactagcattagtactagtccagcctgtaaatgtctgccaccaaagttttcgagtcctagttgcaacctgtcattagttacatgtgtgtttgtaattgtgccaactactcacactagtagaaacaacgtataacaattattccaagtggtagtgagtgtttgtagcctttgttttgggaatttatttgacagaggaagtttgtcaggaacttctattctaaatcttctttagtagtagaaattttgtcataacttgtttctattgaaaatgtagtaaattttagagcacaccccattctccatcaattttttttgatagatttcaatcagtcacatagcatttatccaattaacaaaatcctatcatgggggtttccccatcaaaataaaataaaaaaatagtaataaagaaaaagtagttaatatctagagcttattcttgtaaactcaaataacatgtccagtatgaattttctgatcttct

SEQ ID NO: 235589 - DNA, 1647 bp, Cannabis indica
ttttctttaatttttaattatattattttttttaaataaagtaaaaaatacctaacataaaattagtatacgtgcctcgcacgtaactttttactagtcttactataaatttactataaatgtatattgtaatggtatttcttaggttttaacagaattattatataaatgtctattgtaatggtatattttaggttttaacagaatttgttgtgcatgttaacagaatatgcttttcttatgatggaaactaatgtttttatatctaacatacctatttgaaaagttagcaatgcttgtaatgaaattgaaaaggcatgaaagttagatcattcttaacaatttttttaaactgtgcattgattcatcaactaatctttttaatacaaaaaagtgaaccagatgaaaacgtgcaaatctgcaaaccttgaagtataaacatatgaaatttgtaattgtttataaaaatattactgctccatttgtagttgtcttttaccatctcttgatgtttttgtatttcatcaattagcatttttatttcaacagtatagagcttacatgtaaaagcaaacctttattatttttttttctttttcatcacaataggttgtctgaaacaaaaatcctaattaattcattatgaaaaaccgaagttaaatactaaacagaccacactaaggtcaccaggtgctaccaacaacacctagaataggaaacaagaaacaatgttgagccatcccacggcaaaggcaaatcaccgatacatccattaaaaaaaaaaccttcaaaaaactaaataaaaaaatatattcaaaccagacacaatagctacaaaatacttgatgaaacttacatataagtctaaataaaataaaatgataaaatttaaaaatatagactaaaaattaagagaaaaatcaaccgaaaaattgaactgaaaataaaatgaagtaatctcaatatcgtgactgtgaagattgaaaaatgatatcctggacttataatatgcattcggcttttgcttctttaggtaccaaaataaattacgattttttttttaaattaaaaaaagaaggaaatacgggtcgggcttgacccgcaatgctgaataaagaagtcggaccgggccgggccaggccaaaacatatcgagtcgggccggtctatggcgggccgggccgggccgggccgggcccgattgccattcccaactggcatctgtcatgaataaacatcagtctaaagatattttgtaatataaactattataccattaatagaaatcatattcattaaataatatattatatatattacctcataaaggaaccatcttgattacatcacattgcctaatcaggcaagtcgataatttaatctagtaatctaatattgcattgtttaatcaggcaagcccgttccatagcctgacacccatatatcgcataaccgcatcacctaatcaggtgagcccgtgccgaaacctggcacccatgtattgcatcacctgatcaaataagcccgtaccctttcttggcaccaacatatcacatcacctaatcaggtgagtctgtgcctaaatttggcacttacatgtcactacccctcatccctaatcaagaatcgccgataggaagaaacctaa

SEQ ID NO: 235590 - DNA, 750 bp, Cannabis indica
aaggaaaaaaactaatactattagatttcttaagtctaaggatggggagattgttaatagtttggagggtattagtagtattatttcttcttactttgccaacctttttcaaactcaaggttgtgattttggttctgttgaccagattctttctgctttaggtccccctttgaataattttgagatttactatttaagggagccttttcgggctgaagaagtgaagaaagctgttttccagctttctggggataaagcacctgggttagatggcctgaatgctttcttttatcaaaaaaattggtcaactctaggccaagatcttgttaaggctgtgttggattgtcttaataatgatagggatttttcctatattaatcagactttgataactttaatccctaagaaacaacatgctcatttcattcaggattttaggcctatcagtttatgtaacactttttacaaaattatttctaaggttttagctaatcgtttaaaagttatcttaagtaagattgtttcccctgctcaaagtgcttttgtttctggaagagttatctttgataatattcttctggctcaagaggttgtgcatgctattaacattaggaaacagggtaaattaggttgggctgcatttaagcttgatatggctaaggcttttgatagggttgaatggcattttttgcatagtattatgtctcattttaattttccccaaaattttgtgtctctcattatgaggtg

SEQ ID NO: 235591 - DNA, 612 bp, Cannabis indica
gtcgtggactacgtgtcaaagtgggtgggagcaacaacaacacattctaatgatggcaaaatagttttaacttttctaaaaaagcacattcttactcggtttggtactcctagagccatcatcagtgacgaagggagtaacttttgtaacaagcaattcaaggaattacttgggaggtatggattctatcataggatagcactaatgtatcatccacaaagtaatggccaagatgagatttctaactaggaaatcaagttgattttggagaaaatagggcaacgttccagaaaggattaggcaaagaaattagatgatgctttatgggcttataggaccgcttttaaaacccctattggtatgtcaccatataggttagttttggggaaatcatgtcatcttctagtggagttcgagcacaaagcattctgggccatgaagaccttgaatatggatctagcagcagccggtgaaaagagattgttccaattgaatgagttggaagaattttggaatgaggcttatgaaaattctaagatttgcaaagaaagaacaaagaaatggcatgatagaaatctagttcagaaggagtttcaaccaggttaacaagtt

SEQ ID NO: 235592 - DNA, 1541 bp, Cannabis indica
tttaaacttccaaagttattatgtataattttcagaattttaagtaacgatcgaggagatataataccgtttttttttatatagattaatcacaccaaacatagatattcaaagaaaaaaaaaaaaagacaacaaacataggcatttatttattaattaccaaactctatcttaaggcttggtagcaaatagctactaagtattgttcattgcttttaaaatcttgattaattattagcaataacaaaaagactatcttcaacttcttcctacaaatacaaatacaaaagaaaaaaaaaaaaaaccgaattaattcttaataaattaatagactacactttttaaatcatcatgttgtgtctatatattttgttcctatatttatataaaattgtataattaagcggcggatcataatttaaaattgtagatagctatagctagccatttaatattacataaacacatgtatggtatatgcatcggacaaagatcaacatgatcttcaaataattatattagcttgctaaaagattgttctaaatctaagaaatatattaagatatatgtgtgtgtgaaatttgatgatatataattggtacagttttaacttatatgaaaggggattagaaaaatccaaagtataaaatttattttaattaatgacttaattaagatggcattattgttatctctttgtacttaattggatttccatgttgcttgcttattttgtaggaggaaaatgtgaaacctagatcttgatgatagacatgaaaatatacattaatattgaagttaacaatatataaaacgataattatttttaattccatgtgatatgaatcacattataaggataatcttaacacacacatatgtaaatgtttttaatataaagagcgtgtgatatattgaatataatatctcgaatcggagaaaacgaggaatcgaacaaatcagaggtcaattgttatatatatatatttgaaatggaaatatatatatatttttatatataatttggtcaacccacaattatttaacatatgaccatctaacagtactgcattgaaagaggttgttaattttctaatttttaagtgttcaagcattcacacgaaccacagttttttttttaattttattttacattgcatataatataaaatgacccccaattgttgagcatcgtcaatggtgctagttttctttattacattatttaaataatactttacctaattaaatttataaatataattgtactgttgtgttttaaatattaattttttttacgtacaggaaaaggagatttagttacttgctccagaatcaaagaaccagaactattttattcagttcttggaggtttaggccaatttgggattattacccgggcaagaattcccctaaccaaagcaccaaataaggtactaaaaagttaaaattgattaattaaagaaataaacttatattaagttattaattttgcatattgattaacttaattattgttcaggttaagtggttaagactgt

SEQ ID NO: 235593 - DNA, 1153 bp, Cannabis indica
aaaccgcaatcgagatagtaaaaaatgcgaaaaacatacagaataacataaataaatatcttcgaagggatatatgttgttcgaaatacaaaagacaataaggataaatttgtctaagtacaaattgcgagtacccatgtaccgctttaaaaaaaaaacaagtttggcaaattaaggtaataataaagtaaataattcaagcatctggagcagtaggggcagtgggagtagtggatccatgtgcgaccttgctagcagcctcgtcagcgacctcttcagtattcgcagcttcaacgtcctcaggaaaaatattttccccacctccttgggtttgcgtaggcgacatagctcgaaaagcctcagccatttcagccgcctctgctccaaggatcgaaaagtcgaagtctggaatcttggaaagagtcgtgtatatgtagtcggagacttcttggtcgtactgcttatttccactctccttctcggtctccaactcgtgagacatttcctcgatcttcgtctgagagagtttggcttcaagttccaccttctccttagaattttggaggtcctcgagttttttgtctttggcattcgtgtcctgcttcagtttcttgttgttttcctgaagttggacgatttgtttcttcagaagatcaacttccttggaacctgcgacgaatgccctcgaaaacacgatcatgaattgcatggctaactccacccctagcgacatcatttccacagtagggatcgcttccaccttcgacacgcactcatcactcacgaactttccctacagagtcacaaagtcacgggccttaacagccgggtcaattacaactttcttccccttgtcctgcgagggcttcaccagcttcttagatgaatcagcggctggagtaaccacgacgtcactcttcctcttttggagaacgacaggagaggtcgtcgctgttccagtcttcagcttgcgattgagcataggagcttccttcaggaaagtcatctctgcgaggacaagaaaagataagttaaaataaataactcatatatatagcttatacgcataatgtgttacctgacgttggtcgggaggtctgtttagaaagacgcttgtctatcttctctttttgcttctcagatggctccttgt

SEQ ID NO: 235594 - DNA, 979 bp, Cannabis indica
agatattcatatttaggatgttcatgaaacatacatgttagtaaatctagatcctagtaaaatattcccaacagatatcccaatcacaattgacgggtaaaaatatattaaggaagtagcaaacatattgttccttccttgacctaaatacctaattgtaacactcgaggtaacttttgttataaattaattatcaatgattagtagagtttgaatatcttaaatattcaaccatagtgaagtatgttctgtgaatacatgtgctgcaatcggatggatgaataaacaactgttttatctattttatttgttattaggaatatttaaagtttttgggagcattcaattacagtcgttatgctgccaaaaattcggtagcattaggatcaaacttgatatattatatagtattttgtataaggtccactagctcaaccaccatcaacacgtgatgtgttgaaagggaaaggtcttatgccttctcaaaaaggtggtgctaatcaagaaggtaaattattcacactagagatcatggccttaatctacgactcactaaaatggatggtttatgaatttctaagagtcgaagataaacgtgatataatcacaattcaggtacctcgaagattcatagcacctcgtatccaaatcacattatgtggagagaatttgcagcaggcggcgttgtgtgacttcatcaacaactggggaatactgtttggaatgatgtatactcttctttaatctaattaaccttatatatatcagattctagtgaaattattataaaatactaatatttaacaatttaatgcaagtacatgtgggagagcataaatgatttgagaagaattttcaacttttacgacccagagcttcttgcagtgaatggtatcaatgatgaagagaagaatgagtcttttgagaatgtgtcaaaacaattggccctttggtatcatcgatgaataacaaccaccaa

SEQ ID NO: 235595 - DNA, 549 bp, Cannabis indica
ggggtttatatactgccataaacaacaatgttttgattgagggaaagcctcttgaatccgcacaagaggaaggtcatatttgaccttggttttataactgttggggtgttggtgtaggggcattttcggaatgcattaatttcctacaggtttcaaatacagatggtcactatgagcattcttgaccattttaaatagttgctagccttattttcatcaattttaaagggtcgcctatcaataaagatccttcaaaactgacattataatgaataaaataataaataaaagatttccaaatctcatttaccattttagattttgaacctaaagaaacaagctagcacaaagagagatcagatttaaaataagaaaactaaataaacaacaaaatatatacatgtcaagtgtaaataatttccaaatctgattacaataagacttttaataatctccaaatattattatttaatcatttactgttgatgctgaaaagttgtcaatagtaactcgctagattggcgatagaataatgaacgtaaatatata

SEQ ID NO: 235596 - DNA, 1064 bp, Cannabis indica
ccatcacgaaagaactccacagttaagcatgcttgacctgggataatttaaggataagtgacctcctgggaagttttctcaggaagcgtgcgagtgaggaaaaagcatgctgaaaatactcgtgttggtctgtaggatcagtcatcagtctataaagcatccagagtgacgtactcgtgtataagagtcatcattccgtaggtgtaagggcacaatggaagcttgaagcgaggacgttacaaatagtacacttcttaaaagaatatttcgctagatatgggtagacccacataaaggtgaagggcagtcgtctccgtaaaatatttaagaaaaaatatgcataagtattttgattagttataacatatatataattaaatgtgataaatataaacattttggcatgatggttaagttatcttacatatattatagagattaatggttcaaatcctaataaaaatatatttatttttaatatttagtttactttttgtcctcctaaaaaaaagtatgccctctgtgtatgttataagtatttaagactctaaatttttagaaaaatttgaatagttgatcatgccgaaaaataaagttcaaacaattacttatcacacgtataacaaaaaatagtcgcacgtgtaacaaaatatttaaattttattttcagattataagatattcagaattttctgaaaaatttataagtagccctaaataattataacgtacacgataaaaaaaaaactaaaaaagctcttctaaatgccgaaacagataggaggtctgccgaaacaccccattaatggtgtactatagacttaatctatcattttaaagctacttaagaatttttctctcaaattttgataagtactaaattatttcctaaacttttcagatcgttaacatttttatttttactaatgaatgcccgacatatagataaaaatttaagtagtatgatttagtacgtgaataatcactacatctgtttttacattaaatgaaattagacaaacgtctttaaatatacaaatttcaataatttaaaaaaaaattaa

SEQ ID NO: 235597 - DNA, 2093 bp, Cannabis indica
agtgaaagctgtccgtagtgggaataagatgtgctcttcttttgatctcttaattgatgattgtaaatatcttttggcttcccttaacaatgttgctttattttttgtcgagtcgtttgtaatttgagctgcgcactttgttgctagattttcttcttttttcttatttgctagctgatcatatgttttcagagtcttttgctccgtctgagttattatcaattttagagagcaatcgattgctcttactaatgaagatacaagatttgattaaaaaaaatcatatatataaaggactaagaaaatatcttcgtactaacaaaatatgtgtaccaattattcaatataaataatgattccagttctatcttattcctgtttattttttcattaaattattccaattttaattatgtttaacaacgtaccttccaaaactaattattctcgtggttaataatgagatagaagagtataaacgaaaaaaaaacaactcgtgttgcttttccacatcaattcatataatcacaaaacatggaacaaacctaagattaggtgtaagcacttttacagtacgataggttgttctccttctagctcagatatcacaattagagaatccgtcatttggagggagagaggttctgacttgggaattggattaataacctgttcagcaaccataacttgttaatttaagtcagaacaatttgtagtacgaaaactcttttatatctaaattagaaaatggtgtgcaaccttcttgttgtttttcacatagccaatggcgacttctcgtcgtaaaaacgctcgttcagtaagctcggagaatgatggtgtctctccttctttcatgtagaggcttatatcctgttagaagaagtgaacaggcaaataactcctttggttggcataagtgaattgaaattggaatagtcattacagtaattctaagactccactacttaagaaagtgactgatagtgctttcattttctgattagactcagatcttgatataagcgggtcagtcatgtgtgtagattctccccaaacccgggaccttaactttttaaaaaatatattttattttaatacaaaaaagcttcagaagttagaaggaaaaaaaaatatcatactgtatgtaagagaggaggaaagcagagagttaaaagacaagtgtttttgtattattgaatgaattacactaattgagagcttagctttatatacagagctaaggaaagagttagttacaccaacaaaacagttagtgacaacatacagctagcaactaacagattacaacagaaacactgtaactaactctgcctaagaatattagagaaaaaaaaaagaaaataatatttaggtattgggacacagatgatgacaaaatatttagtttgtaagcaaacacaaagactcatatctcatcaagtttggtaacacaaccttttttttttataccgtttataagaaaatgtagaaaacaacaggtgtgattacctttacatatatttcatctccatctgcatctagaatatctttccagacctcatttagttcactgctctcagcaactgatacacgaagaataactatttatcagtacaaagtagaaacacgtggaaattatacatatacataagaaaataatcaatacaatatatattataacaaaaagtcgagacccttgagcggttacaagactcattacttcttctgccgcaatgtaagtcaaagctggctttattcttgaaatctgcaagacattgtgcatatgactaatttatgtggcaaaatgctcagacaaataataggcatttcaaaacagaaaagggatgcttacttgtttgcccaatttcgagttaacaatctctgcaactagattttgaacctgaagtgaacaaatccatttattttaccttgctttcttctttaatgaagatataagaagctcaaaatggacagatatatggaatgtaaaaacttgccttcactccaagtttgctgcatatattttcagcaaggagaagagaatatgcagcgtgcttgtctgccttggatggatctgaagaaagctagttaat

SEQ ID NO: 235598 - DNA, 3588 bp, Cannabis indica
aataaaacagtagcaaaataataggaataatatatcgaatgtatgaatccaattacaaagtatcagactcttaggcccttctgatacaaatagagattcactcaatacattacattaccctatctattcacttactcacctatatatactattctacttaccactcaattctcctcaatgcacttagccacatctcttttatttgctatactcaacctcaccatactaatactggggtctatcaagaaaaaaacaaaagaataaaggcgaaaacattttcaagtgcaaagtttcgttacgccttaatattagtctcattagtataacccggaataaaagaattctattagactttcccgagccaaaatttgaaatgtaaagttatggtctaagttttttcttttttttaaagatacatggatccttcctttcttcaaacggaataaacagagatagaatcagactgattccctaaatgccttagtattccttaagctaatcattaagcatgaaacacattcaaactagtcatagaggaattgttatactaaccttccatcctacttaccatccttctaaaagaacatggtgtaagattggagcatcaccaatagtccccgcaagagcaaacaccgttcttaaagtggtgaaagcggtttgaatcccttacaacaatatatctttcttcaatcaaagatattaacttgataacattgtgacaatctccacatactctaaggtttttaacaatctggataggagttcccggaggtgtagcaattaagccaaaagcgatcgctagcctttcactgtgttgagaaagaatggctgctttgtgttcctcttcaacatcatgaagtacataattcgtgtcaggctggtaacccatatcctttaaccgaatactaagttcttcaagctttgaatagatttgctctgccataggatgtgagagatcaccagccacgaacgagtaggttttgtttctcacttcaatccaactatacccggcttctttctttacttttctttcatccatcaatttccttactacagctctctcttgccagtttcctgatgctgcataaatgttggacatcagtacataagcagctgagtcttcaggttgaagcgaaatgagcttttctgcagcaatttttcctagctctaaattgcgtcgaacatggcaagcagacaagagcgttcgccacacagttgcacctgcagggaatggcatttcgtttatgatatccatcgccttttcaagcattcctgctcggctgtatagatcaaccatacaagagaagtgctccattgttggattaatgtgatgatctctaatcatcatgtcaaagtatctttgaccttcatccactaagcctgcatgagtacaagccgatatcacgccaatgaatgttataccatccatttcgagtttctgttttcgcatatcctcgaatatctgaagagctttcttcccttggccatgttgtgcaaatccagatatcatcgagttccaagaaatcaagtctctatcacgttgccttgtgaaaacttcattagcgctctcgatatttcctctctttgcatacatggtaacgagagcactacttacacataaagcattattcaatcttgatttgattgtcaatccatgaaattgtttaccttgttctacagatgctaaagttccggcacaagcatgaatcacactagaaaaagtgaactcgttcggtctaatcccttccttcaccaactgaagaaaaatttgtacagctccatccatttcacccatttgagcatacccagttagcattgctgaccatgtcacaatgtccttttcatcaattagctcaaaaactttggcagcttctttaacattccccattttaacataagcatctaacaaagaagttccaacagttgatgatatctcatagtttgttttcacaacttgtccatgaacttgtagtataaacatcggataatgagccataaggattgtagaataagtgaaatggttcggcctcacaccgtccctactcattcgacaaaataaatccactgctcgctctgttacaccgttctgcaagtaaccacttatcaaagcagtccaagttaccacattctgaacacctttcatcgtcgagaaaatcttaaaggcatcatccatttcactgcatttactataagccaccataagggctgttttaatattatgatcaaatcccaatccagttttcgaaacccaacaatgaagttgcttagcaaaacccaattccttaagtttagcacaagacttaattacagaagcgaatgccggttgtgtgaacttctcacctacaacactcatccaatgaaacattttaaaagcttcaagatcaagcccatttgtaacataccctgcaatcatactattccaagtaaccgcctccttattctccacactatcgaaaacaactctagcatcatttatcaaacccgatttcgaatacatattaatcaaagagttacatacaaatgtacttgactcatagccattctttactaccaatgtatgaaattgacttccctcctcaaccaaacctcgattcgccacagccccaataacagtagctaatgtcaaaggattaggctttaccccactagcaaacatttgacaaaacgaatcaggtataagatcattcaatccatttttgacataaccagtgaacaaagcaatccaagactcaaaatttctaaaccccatttcaccaaaaactctccttccatcaccaacacactcagttttcatatacatatcaataagtgaattcccaacacttaaatttgcctcaaaaccagattttatagactcacaatgaacctgtttaccaccaacttgatcaaacaagcaatgacaaacttttaatacacaagaaagagtggactcatctattggaaaatcacaactatgaagaccaacaaagagattaagtgcttccttgttccgattaccgcgggaataatcgaaaagcaagtgattgtaatctgaaaggtctcttcttggacttttatcaaacaggtggtggacactttgagaatggtggcaaatttctttaagagaagagaaatgtctgatatttaaggattgggaatgagaacccaataaggacttatggagcagagtttggtttaagagaattgttcgagagaaattcatggtgtttttggtatcttcttctccaactcaaggcctttggaccaagtgtcatatatgatatttatatcaatgaattggtgggaaaatatgtatttattatgatattttttttaaacaataaataattagtttatattttgattgaacaaataattagtttattaaatgatagttataatattatatataatataatttaaatggatattatatattttattaatttcttttggacaaaatatattatcaattttagtattttacatttaataaaattaaagataattgttcaaagtttttatttagagaattaatatgttagggttcgttttacatgatgttgtattatatagtattatattaaattatattttatgtaatatttt

SEQ ID NO: 235599 - DNA, 1917 bp, Cannabis indica
atagacaaatggttgagaaaaaaatggcaaaagtctaactagtgttgggcccactaatggccgaccactaggtgatatttttggtccatttttttattataaataaatcaaccctaaccctaagagaagtagtataaaaagaaaagaaaatctcattatccaactaatgcttcaaaggcaataaacatagctttctttctctctaggtttttgagatttcttcttcttcttttcttctcttatattttgactccttagtgttcttcacaaaacaaaaattcagccattagtaattgagtgtgtgcccacccataacaagttagtcctcaatcatagtatataagactgtgaagaatccaaacaactgaaggagtttcgggcttagatcttggtgatactctgcgacagaaaggatacaagggttagagatctgagcggttggagtcatttaatttcgctgcaaccaatgtaaggtttctcataccttttatgtgtttattttcatcgttttataaattcatatttaggatgttaaaaacataatactggtaaaatatattccaacagatttggaatagtcgaaactctttcatttttaggaattctcaggagcaactagcttagatataccaagaagtaaaagactttctgaatgtttttaaagaagctcaacaaaagcaaatctcgacagtacgtgattgaactacacctcaatctcatacatgaacaggatgccaaaacatgtgttgaaggaacagtgtctatcaggaaagaaagatcaagtttaggagctcatttggctcgaaactctaaaggagaggttatagcagcatttgcaaagagctacctaggaatgatgccttcaaggactacaaaggcttgggcactactgcatgctttaacttggtgtaaggaccatcaaattaaaattcacgaagtaaaagctgattgcttgaatttagcttgagacattcaagcttgcaccataaccttttctgaatatggtgtgattgtggactcactacgtgaggtgctatatgttaaaagtcactattaaatttagaatatgctagaatgttttacaatgttctaagaaatttgtaagagaaaccaagaacacgctacaaaattttagagaaaacttagaattactagaactaagattagatagttctagagttgttttaaaaatagtaagaagtaattaaatagttagtaataagatagcttccaaggatttgagaacgatcttttcctgaaaacgctctgatagggttcttcgactccggtcttgaatcggagcaatggcaggtcggggtcgtcccaagaaaagtgtttctcagggaacgagcaaggcggggaagttgattgctgggagtaaagggaaacggaagttggctgggaatataaggaagaaaaggggaccaatgatgtcggatgtggtgctcaaaacaaaatcaatggcagaggtgattggggtttcggagctccagctatccgaatcagaggaggacgaaccagaggtgcatactccacaaaccattgaagacgtcgcacaagttctctcccccagagcttcactggagtttttacaaagagatcaggaggtcagatcagattttgtgagttttttggaggcaacaaagagatgtgaggcttgttggaaatatattttaccaggatcttagatctactcacaagtatgttgatttaacaacctaatattgaacttctaaaacgatgaactaaacacataaaagttaagaataacttacagtgatggcagcggaattaaatgtctccttccactcagatctctaacccttgattcctgtcagtagcagagtataatcaagatctgagcccgaaagtccttcagttggatgtgatccttcacagtcttccaaactatgatga

SEQ ID NO: 235600 - DNA, 3222 bp, Cannabis indica
aagaacgttctcgacaaagtatgactaactgcgaatccagcctatactcaatactctagtcgtactgatgtggtattagataactcgtactatctaatagcctatcatatatctgttggaatcttggtgcaactctatgtacacctcgctgatgccctgctatactaatctgatggctatagatttaccttacatatatctgttggtatctcggtgcaactctatgtacacctcaccgataccctaatatgtttttttgacggaaacaaacatgtacgctaaatatgtaatcacttatgcatatcattatactaatcttaccttgttttccgaattcaggtgtgccggccaacttgagtggaacaactgctcgacgaattataggctcctaaatcacatcgttcataacatggataagtgacacgctaaatcacaaccggagacttaagttttaaaccaaaagcttacctactgaaagttaacatggaaataccctaaactaacagggaattaaccgaccaaagctctaaactaacatgaatcgaaaacacaaaagtgtaggaaatcagtttctgatccgattaaccagtttttacaccaggtaacctaaaaatttcgaaaacctaaccaattcgactccaaaccttaccaaaccttctagacctgcatattataccctaataaacataacccaagcaatagaacaacataacatgctcaatagaaaatttcaccattgaagagccaagcttgagttcttaaactcaaagcttgctcaaatcttataacagcccctaaaaccacttcaaatcagcataactaaacttaaataaactccagaaaacaatttcaaacaaccctaactactacaacacctaaacacacaaatcatgcaacaactcaactaaaaaccataaggcaataaaagatagaagtgctaaagctattaccttggattaaatcacctaataacctgctggaaatccctgagttgcagaaaaattatcaaaccctagctggtttctagggttcatgagagagagagagactagagagaaagagtttaagttttttcttcaatattctaatttttgcaaaaaggggtaatgatattatctaataaaatggattataaattcagattacttagcttaataaattttcactaaaggacaacaatctcaaatggtaaaaagaccataatggccccactaaagccaaaaagtcataaaatcacttaggtgtatttttatcaattctaaaatctcgtctattcccgacattttgaatgtctaactatattgccccgctatactgaaaatactaggatgtgattctaatagccaaacacctcgttccaatattgccggacacaaaacatgcaaaaatatgaaattctatatataaaatataaaatataaaatacattctgaatttaaataaatcaccgtaaaataataattaataactaacatgaagtttcataattaaatcctaattatttgctaatttccaaattaaaattaagcggtctttacaattcatatggatgattacaggtattttggagagttttggaaagtatgggtagctttgagttaaaaggaggctcgttctttttctgcagtgaatgacaggaagacatttctgcagaaacaacctaccgtttttattggtgcagacccagaaaatgccctgttgtttttcagacagttttcctatttctttgtttttctcatgtttcctcaatatttagggctttgtcatgctatttattaatagggaaacttttagttttgagtttagatcccgaaaaaggttttagaaagttgtttaccattttacgtgattatgacttagggcctccgttcagcgcatggatttcaattcaagtcaactgacacacttgaatttggaaacgaggtaagactagtgtagaatatatttatatttaaatatgaatatgtgtatgtgtaatatatgcatgctaattgtgattcatatactactaatactagtacggtagcaatacttagtgcattggtatagtatatgatgttcaaagggtacgatccggtgttacaaacactagtacggtacatacatactgcatgtggtgcaacactcagtagtacttggggtacggtttagccctaccaacactagtacgagatgagtacttagtgcatgttgtacaaaggtcgtacttttattaagaatattcttactcatcttataagccttctaattaggtgtatgggcacctaaatacaagttagtaatatattgtaagttatatgcttttcttactgagtctgttgactcacacatattgttttcgtccataggtaaaggaaaggccaaagctgaacaacaatgagttctgagcttgggaatgattgtacatatcaagaagatgcatcttggagagttcggtcccgagacgacttgggcttcattttgtagtcgttatgcgacatgtctgtaaaagctatttggaatgtaaagtttaaaaaaatggtatccgagttttgggtataaatatatgtatatgtttgtaagagtttcaagttaaataaaatttttgatttatcacaattttcgagaaaactctttgattagtaaaggtgtgcactgtaattacaaagtcactgtagcgtgcctaagcattagggcattagagtacatgtcaaggtcataagaagatagctaggattaaagaccgcctggttgattgcacaatctatgataaaaagtaacaggaccaaataatagtaatattcaaaaatagagggcctataggccaaaagtacgaacatgaaggccttgaggctaaaaataagtagtgttcaaaaagtaaaaggccacaggccatacagaacatgaaaatactgtctatactataaaatcataatgctgaaaactaataaattgaatctacatgtgtgtaggggcaggtggagctgaattaggaagctgcaagatctagatcgccaaagtgtggactaaccatagcctccataggctggctggccacctagtcaaggccctggccggccacctcctaagcgggtgggtggccatctcctcatcatagtgccccgaggatgacccctatggctggatagcagttcggtctgctctcaactggctttcgtacaatgctttcccttgagcaaatgtgctatccaaaaaggcctcatgttggattttatgccctaa

SEQ ID NO: 235601 - DNA, 1044 bp, Cannabis indica
aaaaataaagtttataataaattttttaatatataaaaatatttaactacataaaaattaaaatattacacattaattattattcattaatctaattattatccaaaacacaacttaaaattcataaaaaaagatactaatatactaaaaaagatataaacataaattataaattataacatattactagaaatataagataaaatactaaacgggtcctcgtcggggcagggagtgtcatccccatccccacattgtttaacatgcaggaacaaaagtaatccctgtccccgtctccttccccatttagacgggaaatccccgccccattaggggcggatgctcgcggggccccatccccactggggaaaatgtgcatccctaatcctgaccctaaacctatattcagacttgaaccgaaccccggacccggacccgaaccctgaacactggacctcgaccccgaaccccagcgtgatccagatcaggttcaagttcgggcctagatctgggttcaggccggggtccgagttcgagtctaggtttgggtgttggctcagttcatgtcatggtatgttataagaatattgatttttttttagtaaaaaaaatctaaaaataattttaaaaaatctgagccaagcaccattaaatttttaatatgataaaaaaactattttttgttctcacttttgaaactacaattctaaaaattaaatactgaaaacacagccaaattagtttctttggcaaaatcaaaaacaacactctctctttaatttctttcatccaactaatagaagatgaaattgaagaaacctgttgcatatccaaaaagctaagttcttgcttttccaaacatggtagacacttgctgcaagagccataaaaaagacttgcttacgaaaagaggatagatgagatctagagatccatttcaataatctgtcaatgttcctactataatctgaccaaccaagccaaatatgtcaaggataaagaagctgagttgtacaataatagttagaacagttagaatattgt

SEQ ID NO: 235602 - DNA, 810 bp, Cannabis indica
tttccaaacaaaacatggattgtattaatatatagagtgatgaagcatgatgttaagttcagattcttaagagttttaccaaagaaattgtcaaaagttgatattgtatggtttgaaagcttatgaaaggaatatatgtatagtatagtagtctgtcagatatttgtttggggtactattaagatgtacacgatgaattgatgcaatatagagtaatttgtggcattacatctataagtgcttagtttattgaaactaacctccaattctaaaattttggtgataaaacctctaaaactcgtgttttgttagtagtttaatattttcatctatttttaggtgttaagttccatgttggaatattcacatgcatacagcgtacatgtggcataatttgattggcccacataaataaatatataaaattaaaataaagaaaaatattttaaaaattcaaagtaaaatattttttttcattccaacaaaatttttttcttcattattttcattttccttcttcttcatgttcttcatatgatcgacatttaccaccaccaacccaccgaaaccaccactacctaccaactaccgtaccatccacaaccaccacccaacactactcaacaacgccactaccatgccatattttgaatacctaaatcacacatacacacaaaaaggaacaaaacaaacaaaataataaactaaatttgagaaccccagatccgaaaacattatcacattcatccaacccagatctgaagccttctcgcgtaatgcctccactgctccttctcttgctggaaaaca

SEQ ID NO: 235603 - DNA, 3358 bp, Cannabis indica
agaggtttatcaatattcaacttcacccgaacccgcaaaaaatccctccaaacaccaacaaagttattaggatcggatttaacgaacgtacctacatgattcgccacatttctcacagtagactcagtcatgaatcccgactccagattatgtagctgaacccagaagtcgagtcgattcagcggcaccatccttgggttctctccctgtttcagcctttcgaagattagcggagcgcgatcaaatgtccacgggctgccatcgataaccctttctatgtcaatctcatggtaaaattgaaataggaaatggttaggattcaactccttcacatacatgcctctccccggttgccatagagatgcgattttatgttgcattgcctgaaaatcgacattccgtttcgtaagaaaacgccctactagacaccaccgatcgtctattcccgataaatccccttcatcatcatcaagcagaagcatgtcttcatcatcattatcgcccctatcattcacatatctatccaccatctccatatctaaagaacttcccgctgccatcgataaaacaccagaaaaaagcacaccagaaaaagccaccccaatgaaacagtagccaataaaacagtagccaataaaacagttgaacgcaaacaaaacacgacacaaactcagacttccaaacaatctcaaaccatgtcacaagacaagacaagattttttttaatttaattttaatcgttggtttccagaattgtgaatggatgattcttaaatcatataatagagtaataatatagatgcttgtttctaggcttctagccaaattccattttattaggcttataaataaaagttagagacttcgtttaaatttttaatttcactctctgcaatttaataataatttgtcaatataaatatcgtaatgaaaaattctttaatagactgcctcgaaagatacataccaatatttctactataattcagtttaattggtgaaacatcatatatatatatatatatatttttaaaaaattaatagtgtagaccttagtgtattcaaccaaaatttggtttgatttggtcaaaatgagatgcactattattacacaccttaaatgacattgtgagagcattaattgatgtaagacatgtttttacaataaagaggaatttaatgtcataactttgtagactcttttttctcatcgtcattagaaaagatattatttagtatagtagataactctactatacctctaatattgttgacaaaaacctataactttgtacactctactagtatgcaaaaaatagtaaaattactattttttttttctgaaggaacaaaagttcattaaacagagaaaacgatgagaaccgcaggggaaattccctccccttggaaaatttcagcaatttcactagatatcctagcttttttgccaatccatcaacaaaagataagctacgccgattgatataagagaaaatacaaacattaaaaaccttaattaaatctaaagtacataagaaaatatttaaaagcttccaattagaaatgtttttcctctgctggaaagcctgaacagtagtaatcgaatcagacaacacacacacttgattccacttacattgcacaacccaggataaagccatatgaatagcttttacctctgcttctaatggagatgttgcaactgatttttgcatcatgtaagcccagtaaccactcctcagatccaccttcactgcagcaagacatgctgttccattctgccaagaagcgtccgtcatcagcaccacatgggtttcattacgaatgaagcaatccgagaccgagttgacaccatcaacctccaaacttgaaatagaggactgagacacttcagagatttcaatccacttagaaagaatctgattcttaagcaaagccatatcaatggcagaacctttaaaaatgatcttatttcttagattccaaatctcctgacatagacacctcatgaagcaaagcaaagggattctatccacggtagacacaacaagcattagattttcaacaaattccaaaaaagaatcaccaggaatgttatcacaccgaataggaaaaggacctggaaaccacattgctttcgatactgggcagtctttaaaaacatggagactggtttcaaaatcttcgccacacaacagacaattcttctcattgcagaaggggagtttacttcttaaggggatggcctcatttaagattctccacaatagaatcccaatcctagggtgtatcttagaactccacaaccatttccacagaagtctcctctgcccaaaccgatgctcttgatcaagacgataagcacttttttaacagaaaaaacatcattctcattacctttccacacaacttggtcagaatgatgaaggggaatctttctagaattctccttccattctcagcaccaaagatatcgatcacagcctcactgttccatcttccattcgttgaaatatcagcaacagtagtgattgagagcctgctcctatctaggcttcccaaaagctgagcaaaactggttggatcaagccaaggaatccaaggttgtgcccagaaatcaatggactttccctcagcagcaagagtaaccgagccttttaggacaatattgcgagttgccaggatactcttccaaagaaaagaatccccattctttggctcaactgcccagaaggagtctttgctacaatacttactcaggaggcaagtaacccaaggtgtctccttcttttgagccagactccaagccagtttagaaaccaaggctctattcatatcctcgaaccgccgtaaaccaagaccacccactaactttggttgacagattttatcccatgccttaaaggccatgaatctattcttctcagcgttacctatccaccaaaatttcctgataattgcatcaagctcacaacaagtcgagattagtggtaaagagttaaaagaagcataatttctataaattagttggaaaacaattttgtatagaatcgggtttggcctaagcacctagggtctacccagttgcgccccctaatttttttttcttattaaaattatacatatattttttaataattttaaaagactacatattcttttaataagggcataataatatttttttttctaaagcccaccaaattttaaagcaagtgaattgggaaggtagacagaagtcataaatgaccatcatttagagttaaaaaaatagaataattacatgaaacacttatttttataaaaaattatatttttatgtttaattttttatatatattttacggtattttataaa

SEQ ID NO: 235604 - DNA, 686 bp, Cannabis indica
aaaatagaaggaaaaataatattattcaaatgtataagtaggcaaattaaaaatacaaacacaataattaagaaaagaagaagaagaagaagaagaagattaaattacaagagaaagtacctactaaacaagaaaagcttgaataacttttaagaattttgtccaaaaactttatttgccgcactatagtttggatcactttttaatattattactctcatgagtctagctcatagaaatgatgagtttacatactgaagaatccaataaaagaaaagaatgtaagagatgctcactaacattgtctgtgaggtcactctcttaattaaaacttcacttaaataaattcaattgaaaaatgatctcagcaaacttgtaacatttttggagaattaaattaacacgatataaaaaaaacagccatcgacgcagtccacctacgttgcaccatgtgttgcacaacgagagccacagcactgagtgacggacccagaatttttgatcagttggggcttaattattataaaaatatttattatttactttacattaaaattataattattttgtgagggctttttcctatttttctgtataactatttaattaaataaaagatatttaattttttttaacactaattttttttagtgggggctataaccccacactttctttactgcgtc

SEQ ID NO: 235605 - DNA, 929 bp, Cannabis indica
ttttcattttttctgtgtgaaattatcactgtgagactcaaattttggttaacgaaaatctacgttaacaacattcaaaccaggtagtgtttgggaattccctgaatcgagataagtaacatccactatataatttacaaatatacttggtaagatcagcaagatccccttgcttcttgttcgttaaaatcccttcaacaaagctctagatttgaataccttcagatcttctcgccgagatgcagctgaactccctttagctcacactactcgacttcaggtcttgcattgaaattttgaatcgccactcatggagcttcacacatgtacctggaagaatcaaagaataacagagagaaaagagtaaaatacgatctcaatctctgatgtaagagggttagtcgcaactgaatcaagaagatgatatttatgcctagctatcaagattagttagaagttgttttgagttagttggttttcagttaggagttggttatgctgagctgtcttttctttatttgtttttgctgtatttttgcttccagctactggtataagtagcttgttcttgtgtattgcaagaactgatcattcattcaatacatcctctgtttttctctgtttgtttttgtctggtttagctcatcagagttgttatggtatcagagcaggttttctgtgctcttcttgttcttcatcttgttcttcttctttgatctgtgttttgtgctggtttctgcgatggctcgaggaggttgaacacaaggtcgaggtaatggagcacacactcgatcgaatcgtgaaggtgaagacaactctcttaactcgaatatgtattctgttcttggagaaaattcgagatcgactactgcaaacgatttgtcgaatccctactttctttcaaatggagataatccaggtgttgtcct

SEQ ID NO: 235606 - DNA, 726 bp, Cannabis indica
gtgatcaatttcactttgcaaattgccattttgggtgtttccgcccgctttaggtccttgtcggttaaagattgacctctgggcacctcgctccctttggggaggaagtgctatcctttggccggtcaagggcgcttttgctggtggctagccaaccataggttgtacaatggggggtgttgctaagctagagatccttggctggcgtcccatgccgctggttgctgagatctgtttattcttgccattagacctttgaggaaaggtctgtcctccctctggcaagggaagatttgtcccagctcctgaggaatcgggttagtcagcttgtcgatagaccctccctaatctattaatgagtcttccatgaagtggatctttgatgagatcttgtcctctcccgtcggttctctggttgaaccgtcttattagatcattggcctctcagttgcgacgatccaattctgcttggtgagatcgaaggatgtactctttgtcatctatcgatcttaggaatttgcgtctctgttgagaaaatacatcacaattagcagtgcgtgaatcttcagttaggcttgcttggcctatggcttctttaagtctggccaactactcgagatcctctcctaagtccacatggggctcgccaactcctggtcctgtttctccagcataatattggagacgagatccagttgttcccgagggctattgcccacgagtcct

SEQ ID NO: 235607 - DNA, 1056 bp, Cannabis indica
ttaattgtgattgtaaaatcttttattggcctatttgatacaatagacgaagataatatttgtggtattttttaaattgttcttatgtgtttattcattattttcaaaaaatatggattccttttcttgtgcgaaaaggcttttcaaaatcagatcttattcctatttgactttggtggattaaatatttgttttccttttatataatatttgattttgttctttgctttctaacaaaactcttattcatattttattccttttgatctgatttcttgaccaagaaaccgtgtacaactatgggatttaatgttgtcaaagttgccttatttatttaaggaaactttgctgaaaatgaattgactgactgtctgtttaaatagaatttgactttcctttttgggaatattttcatttaacgacctgattgtttcatggttgcttgaccacgacctagggagtttctaaactgtatatattcatccttaggtcgatggttttggttagctctcttggtgtatcagttctatattactttttacagttatagagtgttttctttattgtgtgaagaacttgggtccaacaagctcttagtattttattattatgctactctgtattgtttcttgttgaaattgtgcaggttgaacaccttagatattgttaatcgagctttggaagaagtcttgttcatgagtcaccttttcgagaggaaaaggttgatgtgagtcactctttgggagaagtattgcaagttagtcactcttggggaggttgattgcaagttagtcactctttgggagagagaatggaagtaagtgactcttcgggaggaagattgcaagtttgacactcttgaggaggaagattgcatgtgagacactattcgggatgaaatgtgcaagtgctgcaaattgaagagagttcaaggtctcggcacttctaaaattcaattagacgaatagatcacaacagttgcggcaaattcaaaggagtctttatttgtataagttaattttgttttgtaaaaacttgttattcatctaataaatt

SEQ ID NO: 235608 - DNA, 1482 bp, Cannabis indica
aatttgtggaaaaggcttccttcgagatctgtctatgactcgaaggagttgtaatcaatcttttagaaatagttaattgctacaaggtattatgacatggaggttagatcccgaaccagcctcaacaacaagcaggcaagagtctaaagaactttattcaaagaataatggaggcagcaaccaaaaccaaagttagcgatgacatgaaactcatttccctccagtctgcattgactgtaggctccttcctgtggagaaaaatacaaataaaaaagggtctagacactatccaagtttatgtccaaggcccaatgaatcattaacctagaagatacatatgttcaggcctttggagtcgcttcggcacctactccaccaaccactaattcgacttatactttgcaagtttcaatttcgacagtcacacttctcaaaatctagtacacaattcccactttctacgaacccatttcctctaggcacacgcctacacagactaatttctctaggtttggagccatacagactggatgtagtgtcgctcgcagataagcaaagaaacaaacaaaagttataaaattgaatatgagccattcctataacaaaataagtgggaaaggaaaaaactcaaacgaggctccaaagaaaggaaggattagtatgagcaaaaatacactgaatacaccatattgattgacactcaagaaaatgtctataaggcgacatgcaacatggttcattacaagaagcctcccaggatgtataatggagggaagtagaaaagggaacaaagaaaaagatgtgagtaccatgaggaggtgggtcccaccaacgagtgtgaccatttgaaggatgatatagaaacattggccagagtaggacacctcggccagtgggtggagattcccatcatctatcccagacgagtatcgcacacagacaacttatcattcccggataacaagcagccataaatcctccctagggagtaggtttccctcaagctcccaaaataggacctccaactttacctgctccgccagtgcagaccatggtagtagtactattgcctagacttgggaatccctaaccacctagattggccccaccacctgttgacggctacatctcaactatatccaaagggccacacatcattggaagcactcacaatgcgtaggaaagatatttgaacgagttagatcacgagggggaagtatgtgtcttagtacagtccctagcctagcatccccgaatgatggaccttcccatcactttcataaaataggatgacagccaagtaaaatttcttaatattgactcgctagtcattgaagctcagatcacaaataagaggatgtccagagtacgtagtggacgaacgaaagctttgtcaaaatattgttcaagttcaccttccaagtgattgggttgactgagctaacctgatgtcctacccaattcaacttcaaggctttaatc

SEQ ID NO: 235609 - DNA, 3783 bp, Cannabis indica
aatcagtccaaacaaacttcagaattttatattttttttatcaaacttatgtttaattgtaacgagttatttaattgtatgtaatgatacaacattattattatattctttgagttgaagtttaggtacatagctgaagttcaggtataataatttcaaacacatccagaaatatatatacctcaagtagattccctgttttattgacaaatcttgtgtatgaactaccataccaacttatagtgactctctcgttgatggtactgatttatcaatatctaagactctcgtattcttttcctgtcattactcctaaggttttactccctagttcatatgctattgttgctcccttgcaatcatcattgtcttcatacttgcttaaccactctaaaactgattttacactcaattatatagttcgtttagtaataaataacctactttgtgatccaacattcaccaaccacttgaatacatgcccattaaattgtatctcagtttataagcttttcccattctaggtgagaatacctttcatcattgcttaataagaaatttttttctctaaatttcaattgtcacctcgtataccagattgaccaccaagtaaaatataaaagtattctccatcattaccatatcaccatcagtaattcaggtaatcttctttaccttagtgatatcactactctccctgacgttctgttatatgttatcatgctgataccatttgtaacgttctcatttcaagcctccattgggccttcccccacggactaatggctcttatacgcaggtacgccactctggctgcttcttgagttggtgactaaccttttaggccaactcgagtgttcctaacatgatttgttttgactcaaacacttgtgaaaacatcgtaaaatgaaatcaccccaggtcaaggacacttaatcgtggagttctttcgtgatgggctaccaaaaaacaagatgaaccttgttaatataggtagtcccaactaatccattcaagtcccctacaattatgtagtcccatacctacatagtcttagaatcatcacatacgaccctcccctaggctatatgggattgcatagcttctggtctttttctttcggatcgcggggctctgactgtcatagcttgactcatgccccctttgatctcattttccccctggtagtgattagatcaacccacataatcgtcaaatccaccgtgccacacatattagggatacctatgacctaactcggaaccacactctccttcaagaattttcagatttaattgaagaacttcgagagcactcataggtccaactctagatgtttcaaaataaaattgccaggaatttcaactctaaagtcaagagcagaaaaatcaaaattggtgatcttgttttaagaagaatgttccctgcctctcagaagcacggagtgggggtcttaggaccaaactggaaaggcctgtatgaagttatagataaattggtgatggaacttattgtttgaaaagactagatggaaccaaaattctaagagcatggaatgatgaccacctgtgccgatactacaagtaaactgggggtggtcaggttcctttttgtttttctttactttgttgttaatctccatgtatgcctcaaagcaagaattatttgaataaaagaagaagttttcatttcatatttggtcttttaaagtgctatcatgtaaaagtctcaattattaatcacatgggggtagcatatatgatattgtcataaaataattttatctctttttcactagaaaatagctaagttaaattctcaaatataagagtaggaagtactgcctgaaactggaatcttagggaaccggaagtaagacactaccttattatatttgaaatcaatttaatacttaaccaaatataagagtagaaagtactgcctgaaactggaacctaagggaaccggaagtaagcctctgccttgttatacttgggattaattatcgcacattaaatagttaattcaagttaacataaaataaaagttcaggcttcatggttaacccaagttaacacaaccacactattcagattacttaaattaattgattcaggtcaactaaaaagttaagttcgataaaatcctaaaaataagtgataaatgccaagaaagggttcaattctcaaataattaattagctcaagttaattagttactcgagggtccaaaaggaaaacctttctgttagaatattttcacaaaaaaaatatttaagtcaagcatttaatcgaaaaaattagaggttcaggccttttgaaccaaaacctcacgaggatagaaatattaaaacatagccaattatataatataaaatgtaaaaatccgaggaattaataaaatagaaccaagtacttaaaaaccctacggtaagggtataaactattgtctccgcatatgtaaaaggggggacccttgtcccccaaaaagaagaaaaagaaaaggagcaaaaataaagataatgttgtttgagataagcaagggtaatcaaggctgagcgggattattcaatgatgaaaaatcttgagttttaacattagatggggcttccggcatcatagactcagttgagacaggcacttcagatctataagagcagagtcatccacattcttacaaacatgaatggtagttccaggattgacctctccagattcctcaaatgcacccttagctttctctgcctcctccagtaccaaaagcttgggcaagagatcttccttatcttcaaaattaaggagatcgatcatcgatatattgtgctgccagagggtatatactgaatagacaaaggcctgttccaaagccttgtcatgctgagtttcttgctcttgaagacatcctttcaaatttgaactttcactctcgacttcagtgattcttttttaggattcctcgagagtcttcatagctgcaaccagtttactcttagcctcctcagccctcttgatagcctctgcctcaactacctcttccttctgctgtatgttaagatgaagcttcacctttttctctagagtagtctcattgatgaatttatctttcataatcttagcttgcttatcgtacttttaagacaaggtggtaatcttctgctccttctcttggacgtctagcttggcctactttaggtcagtttctaagtctttgatttgtgtaagggccttggaatgcaagtctttatacttgtctccatgctccctttccgtttttgtcaccttcctttcacgggtcaaagccctctttgcctcttcccttctctgctcagtattggcatgctccgccctcagtacctccagatcataagccagttcaatgattatggaacacttcctctccaccatcaagccaatctatgaaagaaagacataagtgaatcaaaataatggaaagacatgaagcatttattcatttcagagaagttttaaacttacagcattagcctaggtcctcacagcgtcggccacatacatcggatccctactttccatcatggcaaacctatcagccccaagcctacagcttgtagtagcactctgttctaataggtctgccaaaaatggtgacacatcagtcccaatgcaaggacaaagcttctatgtcaactcaattctgttcatgagaggagggcgagatttgttccacctgtcatagtcagcaagacattacgcctgaaggagatactagtggacaacttcttcatctcctcaaattcactaccat

SEQ ID NO: 235610 - DNA, 870 bp, Cannabis indica
tattatagatttagattcaattggtcgcactcctaaaactaacactataagggaactaatattcaatccattaggttagcttggattccattattgtacatcatgttcccaaccactcatgctattagatttcctaacagaagttgtaagaatcatcttctctaagaaatattaacgggtgaattaaaaaacttaatgaacacaaacatgagttcatgaatactcaggattcagagagacctaccaatgaccatcaatgtgatatgaataattatttttttggtaaataacatgttaatgaaagatattattacatatcagtctagtcatctataattaaattatacacgacacctttactacatgccatccacatatgtgattcaaatcaaaaccacacacagtagagtataatatttagtaaaccataattagtagttccatattaaggatccctttactttaatacactactgacttattttattcatattgtataatcttaattctcttgtatgaccttacaaggttctaccatctctaaatgaataatttttttttgatatttattaattatacttctataattaatatattcatttatcatacaactacatttcatatattctataatatattatccattaattacttgcttatatggcataaatcccaacaccaataagccacaagagaagcaaacatattgagagaaagtaccatctactaagagatataatagagagaggtgatatgacggtcttgaagattatgtcagagcataacctggtagatctattcacaaagatgctaccagtgaaatattttatgggtcatataactaatatgggattaagatagatgcccaat

SEQ ID NO: 235611 - DNA, 988 bp, Cannabis indica
gtttaagaactcaaagttcactcaagtttggtgattttgtttatttaatatatttctgagttttggatgtttggatataatgtttttatggtatgagactgttctgtttgggcaggtttggacgagtgttggtttggttttggagtaaaaacccgagtttccatttttctgcagcagggaaactggttaaccgatttcacaggcatagtgaaaccagtcaaccggttttgccagcagtggggaaagctctaatttttggcttcgaaatcgattttgcttggggtgtttttcagagcttagaataagatattttagtgatgtttaagttattttgaataaaggggagagttagaatttgtccggttatggaatcagggtttgtttggaatatgaataagttgtttatcggattttgttgtcgtgacataggacccgggagtgtctagctttgtctccactcaggtcagccctcacaattgatttttggactgaggtaagaaaagtgttttgtaccatttatggttaacaaatatagttgtaatagtctcgattataatcgagatcccattatatatttattatgacttgattatgatcaaagtaatattaagcaacaattattatcgtttaggactcgattatgatcgaggtaatattaagcaacgattattatcgtttatgactcgattatgatcgaggtaatattaagggacgattattattatttatgactccattatgatcgagataataatatggaacgattattatcgtttgagactcgataatcgagtaaaagatacgatcattaccgttatgagtaactactcgttgaaaccgcaaataagtttcttacttatcgtttgctttatcgggcaacgatagtgacatacataactcgtggataacgagtggtaaaaaggggtactttattaagtaccaggactgtgtaatgtttaaaggaatgcttattaaattgtatagtgag

SEQ ID NO: 235612 - DNA, 807 bp, Cannabis indica
aaattagttatgttaatacaggaccaaaaagtgcatgataaagtcttatcagctgaattaattgtcgattagtctttggttatttttggagtccttaccaaaaagctaatacagcaaaccaaaccaggtggctcatcaatgtgttaatggtgcggtgaattcaattatattactgtaaaaatgaaatattgaatttcaaacattcttattgttacaaagtcactttaaataggcttgctgaagtggtagatttattgccaagtttaaataattgaaccttgaaggtgatgaaattgaagatgtttcattttcttcctgtaggtatatatggtagataatgaaatcgtgattacatatatgctcagctgctaatagttgcttttgtatttaagttcaactgaactgactttatccatttaatttttctttcataccaccatctcttttcatttacttcttctctctttactatcttcttttcagcaaataaaagattgatctatgatgaggttaagaaagctgttgaaagagacaactcaatggttaaggtctcaaaattgtcgaagcatggactaatggaaattacaagaaagagggtatagttttagagtgcaattttcacgatcatttttgctttatttagttccttgggtttcacttatagagcaacttaaattatagaaaaagaaatgtactgatccttgtccttcagttgtaccatatctaaactatttaggaccaactcaatttcagatagtccacaagtgaggcaacatgaaattcatctggttagcataatgcttgatt

SEQ ID NO: 235613 - DNA, 1252 bp, Cannabis indica
gtgaaccatgcaacataaaaatgttatttctgatctttattaattttttgcagatgatctgttaattttttgcaagggtaacgagaacttagttcagctagtgaaaaaggcttttctctagttcagcgatgctacaggtctagttgccaacaaagctaagtcttcagtgtactttgggggcatctcaaatacttgcgagaggagacttatgaatgttattcaaagggaggagggttcttttccgttgaaatatcttggtgtgaagcttagaccaaccaaatggcgaactgatgactgtggtgtgatcatagacaagcttcataaacaccttcacacttgggctagtataaatctttcctttgcgggaagggtcagctaattcactcggttcttcttggtatcaggaattattggatgagcttgtttatgcttcctcagaaaatcacggcggcaatagacaaatgttgcagggacttcctttggggctccaatgggaacagaagaaagttgcatatcccttcttgggagaaattttgtctccccaaaaactctggtggtctgggttttcgagaagggaagaaatggaacatagccctcatggagaaatatatttgggctatatcgaacaaacaagataacctttgggttaagtggattgacgcgatctacttgagaggtatgagcttttggacaattgagttcaagcaagatgctagttggtattttaaaaaactccttcgtcttcgttcaactgtcaatgagactaatcttatagctgccacggtgagaagtaagttcagtaccaaatctttttatttctcttatgtccaagctcaaccggttgagtatgccaggaatatttggagtagaatggtccttcccaaacataggttcataggttggcaaatggtgaacaaccaactgctaaccagagataaccttagcaagtttttgccgatctcctcccccttgtgcctggtctgttgcagcgaaaacgagtcgcaccagcacttgttcagtcactgcagctttacccgtaccctggtctgcgagattactaattggtgtggccattttgactggcgagttgacttcaatagatggttttgcgaggcagctaacacattgcagaaaagaattatcaacactgttattttggctaccatttacacagtttgggcaaacagaaataaatgtatttttgatctgagttgtaggacagccagtagtttgagtaaagagattaaagctt

SEQ ID NO: 235614 - DNA, 1322 bp, Cannabis indica
ataaaatagattacattgaaatggagttttatgtagggcataaaacctaacacatagcgctttaattcttttcgagtggtccccccgatatggggcccaccagagatcatagccattcttccgttagtcttggtggcaggccaggggtctattgagggattgatgctcctgagggtgcagctggtgccaacgctccgggcgtacgccctggtgtccctttgggcaatggaccccttgccggaaccgggttgagatggggtagccggttcttaatctactcatacagatgacccaatgtgatcaagttttcaatctcatctttcagatttttgcactcattggtactgtgtccaatgacgttgtggtatttgcatcttttgcagggatcccttcgcaaactatctctatacagaggaggcggcctcttgtaatgcgtattttgcctcgtggcacaatacacacgctcttgtatgttcatcaactctgtgtacagggtatattggggagtataccctcttttttggcgcttgtcctcagtccggttgctgcctttcgaggacctcttgctctgggagcctttagaaggtccggttaggcttacaacagaagcggagtgagaagggacttgtccgcttacccccggggggttcccgtaaatgcaaagatgcgggagccaaagcttggctctgattgtatcctggagtagcggagaactgtatatcgctcatttgtggagtagccggaggtagggttcccgagagttgaactccgggtacatatcctgccactccggttgggtaatatcctccgtaggccactattttaggcttcttccaagttgatatacttttggactctcttttggaaatcttggaggttagcagctccttcttgttgtaacgcattccagaacggggttcctgtaccgatctcgtcttgaagaagtgcaagttgttgtctgtcgtcaactttcttggtttttgaggcttcttccttgaacctctttataaaatttttcaacgtttctgcgggtagttggttgatgttagtcagggcgctaacctcgagattaatctttctcgcggcgacgaactgtctcaggaagctaacttgcaatttgttccagcagtccacagatcttggttctaactttttgaaccactcctctgtggaaccacttaacgttagtggaaaacataagcacttggcatcattactgactctcaaaaccgtcattactcagttaaactgggacaaatgattagcaaaaagtagctcggtattttaatctcggacttgaatgcttttgttattcaatgaat

SEQ ID NO: 235615 - DNA, 1068 bp, Cannabis indica
ccgtagaggtatatatatgatagtatcgttttgcttagattagttcagatcgaccataaatcctcttaccggagttattccatgttcctctaacacaactcttatttttttatatataaaaatatttccacattcaaatgtaataatatgtgtatataattgacttgtgaattattattcttattttttacactatttggtttggtttgtagtttttttttttttttcaaaatatctatctacttgtgcgtatttgaaataaaaagataagtcaatgtcaagttcggattcctgtgaaggagggaaaaaaatactttttttttttaaacaaaaaaaaaccaagaaaaaaaagtgtaaagtaaaaatacttttgtgatacctatttaatactttttcgtgattaaattcatgtgaagtgtaaggtaaaaataaattttcaataaagaggaaaaaaagtgtaaagtaaaattacttgtgatacctaatgacctacttaacaatttttcgtgattaaatttatagcttgtaagccttgtatgtaaacaccgaaagtacaaaagccttgtatgttatagttatcttgcaatcgggttcgacttctgactaaataaaaacgataggacatatataattttctacaataattgttaaaactgaaaaaatacagaatccaatattaaaatttaaaattacattaataaagtacaagacttttaagtggtgttaggcacaaaaatgccccttagcaagaaaaaaatatcttatatcatgcaaccctatcaaatgtattgtaatatctatacaaaagggctatactgataaaaaaggctgaatatttgattcggatttggtccgaactcggctcggtacaattcggttattgaaaaaaacatgtatagaacgcggctgggtcgtaggagtgtttattggatcacatattcacatccaatgaatttggactcatccgatccaatccaattatttattggatattagattttgctatccgatctaatccaattgaattgagtcatccgatccgatccgatccaatggatgtattggatt

SEQ ID NO: 235616 - DNA, 837 bp, Cannabis indica
ttgtggaggaagaacattatttacaaaaatttttcattgaattccatatcttcttcactaattgagtggcaaaatatttggttttcattaatcattctttcattctccagactagcaaacaatgttgaactatgttcctcaaaagatttgctattgctaaattgagacgaatggcaaaacttataagctttttcaacaaaattccaatcaatttgtgcattgtagttgtactcagacttccaactacagtcaaaaagaaatttcaagttatgattaccattcttattatgaactacgtcatagtcaaaataaggttcaacataaacttcatatgtatcctcatagttagctttcaaaacatccaattttctagttaataaatttatttgagcttgaagtttctcagttgaaatacaccattaaaattattagtgtcatatttgttgatcttgagaatggtaagaacttaataaaataaagacaaaattgttctttttttttttttttaaagaaagtttcactattattataaattaacagtgatttacaacaaaaataggatatggaatttacaaaagtggaaatttaaaaatttcattaggaaaatgagagaagtgttctcttctttttctcctaaatttatgctgacccataaagttttccttttattaaattaaggtaaacaaaaaaaaaaattactaccttacatttcattcctaacctgattaaaggaagctaacggtcataaattgaatgaactcagatgatggttttcaaaggagccatacagtttttttgtttttttcgcggcgactcccattttttttttcttcccat

SEQ ID NO: 235617 - DNA, 819 bp, Cannabis indica
aataataataaaaataattacaataaaaaataaaataagcaaattttattttgttttcttttgttttgttttttatgtgtatttttttaattaatttatttattttggtgattaatccacgtaaagcaaaggtcactttcttggtgacatattaattaccaattaatttgaaattaccaaactacccttattcattttattttatttctttttgtgttcctttattttataataaagaaatttgaccttttaactaatcaccactatttaactagcattaaactattttactactattagttaatttattataatatcttctaatactttttgtgttttagataatatcttgttaaatagcattatgttattagttaatttaaagaattattttatatactatttttaaaatttacggtttagattgctcaaatagtttttatgtaagttgttatataaatttttattgcgatttaagttgtttcgttagttgctatgtgtgttgttgtgtaaatttgtataaaatacaacaaaactgttttgaagtataagaattaaaaaacccctctccataaattttttcatactttttttgatatttttttttttaattttaacttttaattatttaagttaattttgtacaaaaaaacaaaagaataaatgataatgatttttttaaataaaaatatcattggaaatcatttttagtatcattaatcattatataagatggaaatgatacaattgttaatttttggaggttagcactaaaccattttaattaattaatagaaattaaagtaagaagataagagt

SEQ ID NO: 235618 - DNA, 585 bp, Cannabis indica
ccactaaaatgtccaccacatccaaagtctgtgccaaggttcaggtggggtcgggttcgtgtcaatgtgtggaatgttgaagttttttttagtaaaaaacaatctaaaaataatttttagacaacattagctgaacgcattttgtattttgaaaactagaaaaaaaatattttttgttctcatttctgagaacacaatttgtcttgtattttgaaaactaaaaaaattgtttttgttctcatttctaaaaacaaaatttaaaaagagaaaacagaaaataatggcaaacaccccatcatgctcacacaatttcttgcctacataaggataactattaagggctcgtttggtacgccgtattgtgttgtatttgtattaaattgtattgtattgtattagtattagtactatttaatacaatactacgtttggtattaacttgtattaataggttgtgtaaatttataatatatttttaatagatctgaccccaccaccaactctgggtccaagtttcgagtctgggtctcgggtcccaatctagatatcgggtctcggtctcgatcccaatctgggtccgagtct

SEQ ID NO: 235619 - DNA, 846 bp, Cannabis indica
cagcctatcaacctcgaggtctctgagactgagactcaggaacaaactcctcctccggtacaacacaagaccagcgagcctcctcccaacacaattcacgcctctggttcctcgtgcaaggccattgaaacattgtctgccgcgacagtgaagactggctcagagttttcccaggagtttggaactgcttgctggcgccagctcatggctctccttccccatgattgggatttaatcaatcgtggggatccggaagaaatggttacaaagggcttgtatcataccctcttggtaagtttattgtcttaatccatatatttcttttcttgtttccccttgtttcttatacatctttgtttgtaaatcttcaggcttctttcatctcttttgccgcccagcggcaaatcatagagaagataaaatacctggagagcgaggtccaaaaatcactagcccaacgtgaggtcgtggtcaagcaatggaacaatgctcaacaggaaattaatcatctcacaaaagaagtctagaggtcgaagaaaattcttgaagaggccgagaagacaacaaagatcaagtccgatgaatgcgagaagctcaaaggggtacttgaagggaaagaggctgaaaccaaagatcaatgcgataaggttggtcttcgtacaatttatcgagccctaatggcgaatccagacatggacaggagcttcttggaggaagatgaggaggaaatccacgctttttgtgagaagaccaggaaggaggaggaagaggctgaggtggtaaaagaagaagatccatccaagtctcctacaatgttggttttgtttttatttatcttttattttt

SEQ ID NO: 235620 - DNA, 3037 bp, Cannabis indica
agggtctctgtccggatctaggtctcgagttttgatctcggtctgggcttgagtccaggtttgtattcggatacctatctaggtccaagtttgggtttgggatcgtgtcccaaatctaagtccacgtccgggttcaggtctcggtcccggtctgggtgcatgaccgtgtctgggctcgagttccggtctcggtttgtgtttggggctagatctgagttcgtttctaggaatgggtatgggtcctcttcacggtcctagtcttgttcaagggtcctagtctggcggttcttgttcaggttccagtttcgggtctcaggtttagatcagggtccaggttttagtcatggtctgagtcccagatctggatccctgtcacttgtcccgttctggttccgattcaggtcatgggacccagttcaaagtttggcttcgggaccgagactggggtgcagttctaggtcccgaccccaattctgtgtcccgagtcaggttccatgtttgggtcttagttcgggtccaggttcggcaccgagtcgaggtatgtttggttacagttcgaggtccaagtccttgttctggtcccgctcccgggtctcgatctacttgtggtttcaattccaattttgggtcacagtgtacgagttcgggtccatgttagtgtctaggaatgggtttgggtccgggtgtgagtttggttcctactctgggtctggggttgggtcctagatcctaacaccgactacgggttcagtccaagccccgggtcaagatctagatcccgatcttgggtctcggtctggttccatttcgtgttccgggtcacgagctcggtcctatgttcaagttcgggtccggggtcggctcttggatcccggtcctagttttgttgcctaggtctctatcccgattcagggtccacgtctcggttctggtcttggtttgggtccaaatctaggttttggtctgggtcctaattgcggtttgggttttggtctcgttatgtgtacttttggttttgggtctggtccatgtcctggtcctagtcctagttcggttccaattccaattgtgattccaagttcgagtttgggttcgagttcgggttggcgttcgagttctggtcggggttcgagtcctggtccgagtttgggttcgggttcggatcttggtctaggtccggatcgggctccaggtgtgggttagggtcctgggtgtgggttagggtcctgggtgtgggttagggtcctgggtctgggtcctggttatggttcaggtctcaggttttggatctcgaactgagttagggtttagttctgggtctaagtcctaggtttcgatcacagtttgggttcgtgttcgggtccaggtgcaggtctaggtttgggtttgattctgggtctcggtttgagttcgggtctcgagttcaggttcaatttttaattcgagtccaggttcgggcagggtatgggttcgtgtccaggttcctttcctggtttgggtccggggaaggtttcgggtctaggtctaggtccaacttcagattcccgggtctaggtcaggtcctacttcgagtttgaatctcggtttagatctgggtccccatccaagtccagttcctagctcctggtctaggtcgagactcgtgttcaggtcccgagtcttggttttagtctaggtcctagtccgggttcgggtccatgtctcggtcttagccttggtatgggttcatgtttgggtccttatctgtttggatcctggtctgaagtcgcgggtctcaggtcccggggagggttaaggacaaggtcaagtccaggtcctagtacgggtctcggtctaggttcctgtcccaagtctcaggtcccagtcctagtcaagttctcggtccaggttttggtataagtttgggttatgctttgggttcggttctagtctcaggttcgggtcctagtcacagttccagttttgattttagttctgggttttgttccgggtccgggtctaggtccaaattggggtcagggtccgagtctcagtcctattccgggtaagagtttttcgaatccctatctgggtccaagtgtgagtccggatctaggttcgagtattgggtctggtcccaggtttgggtttgcgtatgcgtctgggtttgcatttgagttcatgtccatgtccaggtccaaatcccaatttaggtcaggggcttgatttgggtctgggatcgagtcccgagtttaggtttaggttctagtctaagtcctattctgggtccgagactgggtctgagcacgagttctggggctgggttctggtctagttcttggtcccagtctaggtgtgggtcctggtcacgttcccggtcttgttctagggtcctagtcatgttctcattcatctttcagtttcgggtccaaggtctgggtataggtccaggtcctaggccagcttcgggtcctaattcggttacagttttgggtctgcgtccaggtcttgttcctaggtctcgatccgcttctagtttcggttctagtttcaagtcgcgggttacgggttcgactcgagttttggtccgagtctgggttaagacattatttgggtctagagctaggtttaagtgtgagttttggtctcggttagggtccaagggtgggtccagtttcgggttcgagtctggctccaggtcccggtcccgttccaagatccctttccggttacagttcaagtttcagttttggttcccaagtgtgggtttgggtcttggtatgtttcccgatcctggtatgagttcgagtgtgggttcaggttcttatctaagtcctagatccaaataccgactacgggtccggtccaaacatcgagtcatgtatcttaaatcccgaggtgggtcctaggtctaggtttgggtctggggccgagtcccggatcgcgatccaagttctgacgtccaagttctggtcctagttcaggggcacaatttccaagtctgggtcccccctcgatgttcgggtcctatgtcccggtccgtgtccaagttcgtgtt

SEQ ID NO: 235621 - DNA, 702 bp, Cannabis indica
ttatagagctagggttctagtttgtaaacattatccattaatggagtaaatacacataacatatagactttgagcccatttgatgaagcctggcccataaagcattttctgttgacgtggatgccacgtcatgttgatagttgtctaaatgtgtcctactttggtagataataaagacacacaaatacttgactaataattactttatttacttatttagaatatttgattctcggacatgatcctcgaaataaagtcttgatattgtgggtagggaggcacacggtgcggggaattagtggggagtgttctccccgtccccatccccgtaaaggattttaatctccatccccgcttattccccatcggagatggggcagggaatcccctaatggggcggggaatggggacagggtggggaatcccctagtaaaaataaagtttattttaaaaatttaaatgtataaaattattaaattacctaaaaagataaaatattacatattatttactattaaatatagtaattattatacaaaaatataacttcaaaactgtaaaaattatattaatatacttaaaaaacatacaaacgcatatataaaatatataatattaataaaaataattaataaattaaacggtacccgtcgggcggggagtgtcatcccgtccccgcattgtttaacattcggggataaa

SEQ ID NO: 235622 - DNA, 2301 bp, Cannabis indica
gcggacccacatggagaaaggagtggctgaaattaaaccataaaaaaagagaattatatattggtatttttagttaattatggtatgtgttttaaattaaagagtaatttacaacataattacttaagttttatgtggggtaacagataaatatttaagtcgtattttttgcggataaaaatacattttgtcacactcttggaacttccgtaagtaccttttcgttttcttccatataaatgtccatgtatcacccttttattagtcaacatcatttaaattctatctcttatttaaaaattcatttaagcattttaaaattaaaaaaaaaatacataataaaattaataaaatatctcataaaattaaaaatttatttttcccttttctcttctcaatctcatccacgatcttcttctctctcttctcttcttcttcttcttctcttttctttatcatccctctcgttttctttttctatttccatcaatctcattctcaatccctctattgcaaattataacttggtttttctatctattagtaaaattaaaaatccaaaatcataaccccaccatacctccacacattaacttgtgggaagcttttcgacaatcaaaaacgaaagttatacaaatgattagagaaatacaccattaacgattgaggattgggcaaattgaggttgctgaatcggatgagttctctcggcaaacaggtaattaatttctaggttttcttctactttgaataaaaagttcgatatttacttttggatctgtttgaatggatcgtttaaggaatggaagagaagatcgaatgaaagagatagatctggtgggaaagtaatttggagatgtgcaactctgagaatcgatatctatatattttgtttcattctttgatattataatatgtgttgtgtatatgttagggaaaaccatttcaatatgtacaaatctaagtttgtggaacaagaacatgaaacaatttattaattttttagggtttttttcttggggttttttttcttcttgaatctggttttggatatgttgagataatgaacaatagttttggatatgttgaggatgatgagtatgatgactgaggatgatgagtacagtgatgtatttttttttattttatgtaaaatgatatttttttaaaaaaaaataaggataatagaatatatttttattttttatacattttaaatatatatttttattttaaaatgatttttaaataagtttaaatgaattttaaaatataaaattaatgatgtggactaataaataacacgtggacacttacttgaagaaaacggaagtacctacagaagttccaggagtgtgacggaaagtatttttaccgccaaaaatacgatttagatacttatctgctacctaacataaaacttgggtatttatgccgcaaattactctaaattaaaataagttactagatttttgatgtagtggttgtctaaatttagatttatgtcaagagcaagggtttaagttcgtcatttttttttaaaatatatgcaatttaattttttttaaaaaaaaatacatttaatgctttttgtagagtaatctaaattacaaaagaaaaaattacacccgcttagtttaaatcctggatccatcactaacagaaagacttcccaccaacaagctaattgtactagtcaaaaggtatacaaagtcagaatataaatcgttacaaaataaaacgatttttataagacgaaattacttcgaaaatttagacaaaacaacttgaccacccaaaaaagtatctgaataaaattaacaatttaaacaaacctacaaaataaataaataaagtagaaagttaattagtacactaaagaaacaaaatattaagaaattttatataagaaaaaatgcttattagttaattttccttttttggcaagaaataaaatttaataaaaaaaattatctttgaaaacttattaaataaaatagtgtcattttttaccgaatctaatatgtttagtctaatttttgaatctctcttctaaggcagataatattaaataatgaaatgtctagaaccacaacaatgttaatataaagtcaaaaatagcacactataattgataatgataaagttcaaaatatttagcaataaaacaatagctcaaatttttagtaaattatacttatctttgacgactttgtgacttatactaacttttaataaaaaaaattataaggatatgattttgtcccgtcattgtactttcacggattgtaatccgtgatg

SEQ ID NO: 235623 - DNA, 1014 bp, Cannabis indica
cgttcgagactcagtaccgtgtggggacacgggggattaggggttatgggtcagggggtatgggcgtctgatcataatccgggatatgtatgttatatgatttatgcttttcttactgagtctgtcgactcacagtgctatgtttatgtgtaggtaagggcaaggctaaggccgaggaaccgtgaggacgagaagatgacgattgtacatgttggggcggttaggcctagagcgtacgatcttcgggacatcagggcttttgttgttagtcgctgggcgacaaatattttgtaaatgaatagcaaacttttgtaaaatattttgtaaacgggatcccaaaatattttgtatataatattataagttttaattaaataagaaaattttatttaatcacgtttttcatcaacatcgttgattagcaacgagctgcacaacaagtttaaaatcacgttaacacgcctaggctagttagggtgttacaactaccaaccatacacactaaacactacattttgtcatccacttttattttgttctcatccatgtcctcactcatatactataaaaaacaatgtatattctaatcatcaagatcaactacgtaaggctcctgcaaaaaattaaaaacaaagaaaattattaataataaaaactaataattgatttaataaatcacaaaaatttaactaattactattgttggatcaacatcattatcttcatcattcactgttagtgtaaaaaaataaaacaaaaattaattctactatataaatgaaaatatatatagataaatatatatatacagttattaaatgatatctaccttttttttcagtcatcaacaaattttgtgtacatactaatgcttctaatgtagaaggatgaagcctcgatcgatgtgaactcatgtgtctaccaccagtgttgaatatagattttgaagcaacaatgctgacaggcacaacaaatacatcattggaaatcatactcaacaaaggatatttgagg

SEQ ID NO: 235624 - DNA, 914 bp, Cannabis indica
ttacatgattcgtgaaagcccacgtagaaatattgtgggccgcaaaattacaaagtctgaaaataaacaaaaaatatcaacttaacaaaagagcagagagttgtttacacatttgaatataattaccaataccctaagtggattgaactccctttagagcattgataaccttctcaaaatcaccatcaactagaacaaaaaggtgcttcatcaaaattgatgtctccaaagctagagtacacgccgcaacttctccaaaaagcggatccgagaaattgagcatgttaaccactacccacaaaatagaccctatatgatcccttactaaggccaccgtacacatggagctactaccaactttaacatcacaattgattttaatccaatcagcaggaagggggaccaaataggaggcacagctaatgtcgagacaaacaagcaagatgcataatctttataacaaatagagatagaatcaataaaatgtttaatgttacccatggaattattatgaaccttgtcgtttcaagccctccaaatagcatccaccacaattgacgcatagaggaataacttatcagtatcaaccccttttgactataaattccatataaaagtcacccagtccgaaacacgagtgatagattcagaaacaggcataaagccccaaggagaagagacctcctcaaccttgattcttttactgaggatggcccggataggcagagcgctggagagaatgcaccaccagaggaccttatgacgctctagaattttggagttccagagcttgttccaccgagcagggaccacaacgcatgcgagagctctttctaaagcttggacaagataggcagactttgtcgagaataatccacttggctcatttgcccacacccacctatctctgcctt

SEQ ID NO: 235625 - DNA, 1703 bp, Cannabis indica
accttgtttttgaatttaggtgtctcggccaacgcgagtggaacaactactcggcaaattacaggcctctaaatcacatcgttaataacatggataagtgacacactaaatcacaaccagggactttggttttaaacaaaaaatctacctactgaaagttaacatggaaaaaccttaaactaatagggaattaaccaaccaaagctctaaaacttacacaaatcaacaatacaaaaattttagggaacccagcagctgatctggttcaccagttttgcagggcctgtaaaaccggtgaactggtttgcaccaataaaccgaaaaaattcaaaaacctaaccaaatcgattccaaaccttccagacctacatattataccccaatacacatatcccaagcaacagaacaacatagcatgcttaaaatcaaaaattacaattaaagagccaagcttcagttctaaaaatcaaagcttgctcaatcagccctatggcaactaaaaccaactcaaaaaaacatatctaactataatttaacttcagaaaacatcaccaactaacggcaacaactacagaactcaaaaacacaaatcatgcaaaaatctcttacttaaagttcaagaaaactaagaagaatgatgctaggaacttactttgagttgagatcacaaagacttgctgcaaattcttttttaattgaagaagaacacaccaaaccctagctgccctagggaattcaaaagagagagagtttttctttttttttttcttattttttgattttttttaaatagtgagaaataaaaatggttttatctaataaaacctcagccataagaatcagaatataaaatccaatttaaagtccactaaaggacaaaaccacttaggtaaaaattactatttttcccaaactaaaaaaaaatcgaaaaatcacttaggggtattttggtcacttcttaaatctcgactattcccgacatttccaaccgctatactcaaaaaaactgagatgtgattctaatatccaaacattgcgttccaacgttaccgggtacaaaacatgcaaaaatttgaattttcatatataacatataaaatgcattttgaattcaaataaatctccataaaataataattcataaccaatatgcaagtttcataatcaaacctaactacctgctaatttttaagttaaagttaagcggtctttacatttcctctgtttggcgctgcccgtgctgaatgctaactctggcgaacccacaatatacgcttctatttctctctttagttttagtgtctctttgcaaaccccatcttgtttcttagggaagaacaccagagctaatgacaatggtggagactaagatcaatatttgttgcgctgttggagaagaactggtacagatctgtctctctcatatatttgtatgctatgttcgactggtatggatcttggattagttctttatcaaatctatcaatgtgtatttttttattctttttgtcttcaatgtctaagcattgagctgttggagcttgttctctgtttgtttttgggtttttgttgaaatgttgttagtatttttaaattggcttctaaatctcatgtactgttaaattcaaatatgagattaatttgaagttttatgttgttttttttttgagtatttatataaatatatgtatatataaattgat

SEQ ID NO: 235626 - DNA, 567 bp, Cannabis indica
tcaccccgcaacgtaccttccttttcattcaccggaatcgataacgggtcgattgggctttcgacaaccgccaccgcatcaacaccgctagacgtgccctccgatctttccagtaaagcctcctggtgtatgacactgttcaccagcccaggctcaaaaccttccatattcctccgttctgggcggtcacccaactcttctagtggctcagggcccctctgagggagaatttcgaactctctagccgcctcttctgcctggacccttttcgaagcaatgttttatccgggacccaaatctcatccacgggccatacatgggaaccgtatgattaaagtcgtcagatatgagtctccttcgccttctgcagaacatctcctcgtggcctatcattccacatttgaaacaacaacatgggagattctcaaatttaaaataacaccaaagagataccccttcctccattggaatatgcaggccaaccagcaggggttttttcagattcaaagtaaccatcagacgaagatattcctcagtcgaaaatccattacgccacatcctgtctat

SEQ ID NO: 235627 - DNA, 890 bp, Cannabis indica
tcattacatattcagcatgcatacgtactttaatgtctatacaaacacaatcattacacattataagaaaatcatagcaactcataatcaacaatttcatcatttcactaaatagatattcattcaatacataatcacatagtttcagtgcttcaaaaatcactcttaccactcgttatccatgagctatgtatgccactatcattgcccaataaagcgaacgataagtaagaaacctaactgcggtttcaacgagtaattactcataatagtaatgaccgtttccaaccctccccaattgttatccacgagctacgtatgtcactatcgttgcctgatatagcgaatgataagtaagaaacctaaccacagtttctggagtaatcactcataacggtaatgaccatttcccaccctcggtcataaccgaggcataacaaacacataaacaagatctcaatcataatcaagactataacaatcataatcgttcatcatttaatcataagtggtgcgtaatacttttcttacctcagtccaatagttaggtgtgtgggccaacctgagtggaactacgctcgacaatcctgggtcctatgttacgaaaataaagctcgataaacaacttactcaaaactccagaataaccctaactttgtaaccggacatatctaactccccactggttcaaaataacttaaacatcactaaaataccctaacctaggctctgaaaaacaccctgaacaaaatcggttttaaggcttaaaactagagtttttcccctgctggcaaaacaagttgatcggtttcacagcacttgtaaaaccggttaatcggtttccctgcttgcggaatcgggaactccggtttttcacaccaaaaacaacc

SEQ ID NO: 235628 - DNA, 1305 bp, Cannabis indica
ttgttttagtgttgttttacgattgttttctataatttatttttttaacgtcgatttcactgttcttgcttcatctcgctggaattaatgattattttctaggtgttcttaaggtgttgtggtggttctatccgtgggtgcggaaaatggaggctataaaatacatttcttcttccttctctatggttattttgtagtttttattattcttgttctcctaatatagttgattaattatcattatatctcctttattacttttcttgctgagttcttgtgactcatgggtactctgtggtgcaggtaagggcaaagaaaagtttgagcagccatgaagagaaggtcttctccaacgaatgtacatattgaccatttcggcctgtgtggtcgagttgccaggagttgttttgggctgtatctactgtgtattttaacttactactgtatatagtccttttgtaagacttttgtaacagggatccctggaacaaatttttagtgtcgttatgttgttcattactagggttttgttttagtgaagtttttttttttttttaaatattatcatagattttaatgactgattaatctattattactaaactagtttataaaaacacacatgtggcgtctttatagattagggtgttataacttggtatcaaagcagccatggttttaaaaggtcttaaagactggtcgggtttgtacattttccataaagacaggttgactcatggtataataagtatttgtattaattgctattgaattacatgcctagattattataaagcatgttggaaaagatataacgatgattgtgataggaatatgtatgcaacatatgcatattgatattgatatctattgaattctgaatggttggaagttttgaattgtaggtgcattagattatgcagtggcggtctgaccacttgaaccgcgagctggggctcggggtaggtggtgaggaagagcatcctccaccacctcagaactgggaaaaaaaattcctgccatgcaaaagacaattaggtagcaaggagagcagattcacgacctaaaagagcaacatgctcatcctgcacctatactagcacctaaagtagtacaacagaatatgagggattgtatggaaccgatttatgataagtttaagaaacaaaatccccgtgtgtttgagggtggtccagacccactgaaagtagaacaatggataagtatacctctatctttgactttatgcaagtggaggataatgacggggtacaatgtgctatatacatgttacgtgatgatgcc

SEQ ID NO: 235629 - DNA, 1841 bp, Cannabis indica
tcaatccaacaccaatctcaaatccctgcacacaataaactagaagtgcagcacaaacacaagaacaatacattcaacacaattcgaacccaattataaatgtttcctccaacaatggttggagagtctattcctctcttctgaaacaatggattcaaattcttgcactatcacattcaagactgaagttacaaaatcaggcaactaaaccagtcccttgagaaattttctgttttctgtacagacataactatacaactcccaaatctgcagtagacactccctctgtttctctctctactgctctttctcttactacaatctagagtcctagaactcttctcttttttcttccttggcttgcttttatatataggctaactagttttacgtgttaagactcaactaacaataacattacagaacaactaaaaaactaagaaaccaagaacccaaaactttacagccacacttaactaaaatgatatggcctcaacaaaaatacatgataaaaagtttatgtgcatacatgtataggcatatccttgtattaatgtatacataaataaacatataatgaaaggcacaaagttaggattatatataatatatagatatggaaaactataatctagaaccaatcaataataagttgatgatgcaaatgcacaacaaaagttgggtgcttgtaataagctaggtggctagctattagcaactagtacaaacttagcttaacaaaaagtccagctatagatatatgcatacataataattaagaaattctagtactagagtactggtcctgcccaaagtttctggtttgcatactcacatacatatacaacatcattaacatatataagagaagagaagagaatccccaaatctccttccggccatgtttgcttcaacacttcaactgcacccaaaatcaaagatataaattattacatatacgatatatatgtggatgatttaacatgtaacaaataattattaattattaggaattaaattaacttacacaagttggaaacctgtgtggtcagggcgatgggagtgagagtagtggggattggagtccataagagttacgggaagaaagttgtgatggtcataggattgggaagcagattgatcaacattgttattattattattattggagtctgtgttgttgggtctggtagtagcagtggtctctgtcggcatcaaattcatttgttgctgttgttgttgctcttcttcctcattctgttgttgctgtatcctctcattttcagctatctgtattattgtatattaataattatagtttcatgtgcaccaaaattcataattttttagacacgtcacatataataattggttaataatatattagttttatttgcctaactgatagttttgttcatatatatttgtaaataaaattacataaagggaaagaagagaagataagtggtgtttaattaacctttgctcttagatagttgttatggttttgcaactccatctcctgcatatgaatattatatcttattatattattattaccaaactcaaaatattgtgtttactttctttctataaattatcaaataagtcatatagaattattatgcaataaatagaatacatacccttttttgcatgaactcgatttccgcaaatagcatttcattctaccaaaaacaaattcaaccgataaacattattattagtagttgtattaatataatataacaaactatttatgtatataagtatatgttgagtaaactgctagcaaaataaaagaggaacgatattaccgaatgaagaattctgggttgagt

SEQ ID NO: 235630 - DNA, 686 bp, Cannabis indica
gctcctcatgctcctcaagctcctcagatactgtggcttgcctaacaacaaccatgtatctagcaatgtaaggatcgtcgactaatactgcatggacaatttgctttgcacgggccagtattagtttgacctctaaaatctttctttgactatgacgagcaacagtgacgtctattttagccttcacaaagattctcttcaaaggtctcggttgaccaacaggcagtgtgttctgcacgtctgtctagactttgtacatccaagagggtggatgaaattgcctttaacctcttttcaactcccacacaaaatgcccgtacacttttccatcgatctggtcggagtagtggtagtattgagtttcaacatctcaggaatcactactgacttcccactcagagaaacttgaattagtggaaaaatcactctgagatgaagatgattcgtctgcttaaagtctaggttggtcctcatgaaaaagttggagaagatcgtcatctattcaaaaatcacatccccagaagtcacctaggttcatctaaaaagaagaagaatagagaggtgagtatccaaaaaggtttaggatgtccttccaaaagaagaacatcccaaatactctgaccagaaggaaaaaaaggatcaaaataaaggagatttgacctaataacgaaacacctaagcaaatg

SEQ ID NO: 235631 - DNA, 1316 bp, Cannabis indica
ccctttataacatgacggaaatataatgccacaagtttattaaaatctataatttttttaatatatggcatatttgattgtttagatttttacagggtttcttaaaaactgaagaaaaagaatgtcatatttataagtttatttttcagttaatactattttggaccttgtattttgcaaaagttaccgattgaattctctgttttgtaaaatagcaaattagatcctgtaataatacaaaatagtacactgagatcaattttcgataatttttttttaatataaccaacttaaaataatttctagcacgaacaaatacaaaaagtgtacctagttttggcgtaaaaactctatatcagattattattaacttttatattgacaaaaaatcagtttagggtattattttagaaaatacaaggtctaatttgtcatttaattaaataaaaggtccaatcggagatttaaaatggtatttaccctttattttttttttttttaaagatatcatatttaatgcaattctccctacttttattttatctgagtaattctgccaacccttatttgtgtaaatattaaacttctcaaatttggtatttgtgcaaagaaagagaacatggattgtgggaaactggcccaaaatgtacgtccccacatgcccataatgccgaaccatattggcccaaaagtaagcccgcagtaggatgggcccagttacagtcggtccatttcgttaatgagaaacagccagtttttcccagtaaatttctcgttggtggtgaactatatcgattccgataattctcatctaatctgtcggaacttcgaacctgaatttccgatcgtgttgagaaggcaaataaaccgtgaacatcatcgtcctcgtcgcttttaaatcgaaggcgagcgacgatgccgaagaagatgggtgtgaacagtaaagccgaggaggctagggctcgcaagaccgctgccgaagcggagcgcaaggagcgagatgttcgttccaaggaggaccagctctggcgcgaagccgaaggcgccaagtcccgcgcctccaagaagcgggaggaagaagccgagaagaaagccgaggctgccgcgcgtcgcgcagaggttcgccgcttggccgagcaggaggagaaggagctcgagaagttgatgaagaagcctgataagaaggccaacagagtctccatccctgtccctaaggtcaccgaggcggagctcaggcgccgccgtgaggaggaacaagcggctctgcacaaaaaagacgaggaagtgaagaagcgccatagccggactgctgctga

SEQ ID NO: 235632 - DNA, 927 bp, Cannabis indica
tccagaatttaaacaataagtaaaataaaaagtaataatttatccaaaattcataataaatagctaaagatactatatgtgaaatgatagggcagtcaaaccagatgttacatatctcaggtcgttcaaactaagatagtacatatctcggtatggccgagtaaagtcaaaaggagaaaactgaaaaagggtagttgttaaatcctaaatacctataaaacaaggaaaaccctttgagtcaggaaaagttgtcagactcagacattatgcagcctacattggttaaaccatttgaaataggtcaagtaaggtataacaatatcctcatcacttgagtacaccatcaccattttcgggcaataaactattcttaaaggagtttcttataaaatacttttataagaaactggaggagtagtgtttgggggaaattttagtgggtgaacaagaggcccatcatgttagaaacataagaaaggcccgattaatgaatacatgtaaagcccacgaaaaactggaaaagatgtaaattttaaattaggagccgagatacgagaataaaactaagagggtaacctcattggacgagtcgaagtaatacctaagtcgaattgatctaagataattcccatctcagatcgtgctgagaaacacattatctcggatcggaaggtgcctatctcggtttagtcttggactcctcttatctcgaatcaattcaaaatatgttttatctcggaccagtccgagaaatgatctatcacggttggtccaagatatggagtccgagatatgacctatcacggtcggtccgagatatggagtccgagatatgacctatcacggtcggtccgagatatggagtctgagatatgacctaccacggtcggtctaagatatggatttcgagatatgacctatcacggt

SEQ ID NO: 235633 - DNA, 682 bp, Cannabis indica
aaataaatcgggttaaaatataaaataatcagaaacaatattttattttgttgtttaccaaactgaccgaaaaggaaatcataatcattttattttgtttacatattcaagaaaggtaatcggaatgacttaatttgactaaattgccattgttagaacatgtaattattttttatttatatatttttgaagggcatatttgccttttttatttttaattaataaaaatataattaatataaagtaaattaaggaaagagaaaagtattccttatgaaaatggggtgagaacctttctctctgttttctccttaatttgtgtgggccccactaatttctctcattccaaaatttagtaaataaatgaatgggaatcagtcacatataattgattcccattcccctctagtaaacatgacataaattcattagcaatggaatagtatcaaataaggatatagaaataattttatttgtatataaatggtgtaaggaacaaagctagacttgaaatgtagaggggccaaaaaaagaaaaagaaattaagttagtgggtgccaaatcataaattttgaagaaaatgagtctaaaaatacaaagaaataagaattattattattattatctttttttttttatttaagcgtttatatagggtaaatactattttggaccttctgtt

SEQ ID NO: 235634 - DNA, 1943 bp, Cannabis indica
ctccttttccccaaggatttaaaaaccatcatgtctcatcgtatgatggaaccaccaatccggtctcgcatttgaacaaattcaacacaataatgtgagctagtaatgtgacaaacaatttacgttgtattttgttttccaccttgctagttggaacagcaagcagctggttcaacaaatttactcatcattccataacttcttgggaatagctatccaaggactttaaaaaacagttccaggccgcaagagatagatgatctgaggcgtcctcgctaaccaacatcaagcaacagccaggcgagacacttaaggcatacttaagtcattttagcacgactgctagaagggttagaaatctggatgatagtatacaacttaatgcccttcatgcgaggatcactactacctatcaactgttggagatgaattgtgggaagacttatagggtcgtccaatgaagaacatcactgagttcaatgagagggctcaggtgttcgtccgaaaagaggaagcttgaaaagagatgaacttgttgaaaacaggctcgggaggcaaacccagcaatgtttcaacaagtactgtctcgactagagttgataactcaggggcctctggctcaaagagaaaagacgatcctaaggagtcgtcaaaggacaaaaagaaacaaaagaagcacgataaatatgtgccagtttatactatttataccgagcttaatgaaactcgggaaaatatttacctcgcgcatgagcacaaggttgccttcagcaagccagagcccatgaggcatgcaaggaacaaaagagatcctgtcaggtattgcaaataccacaaggacattaggcacacaacagacgagtggcgtcaattgaaagatgagatagaaagtctcatcgctcggggccacttcaagcagtttgtgaaatgatagggcaatggacataaccatcccagtctacccaacaacccaaacaaccagggattacaacctcttcctattaaaggagatgacatcctagttttttcgggagggccacatattgcaagagagagcaacaacgcccaaaagaagtatgtgaaagaaataaaaaaaatgagcagtcggtatttgctccagaaccttccaagaaggtaaaaactaaagaacctccaatcatattctcggaggaagatgaaaagaacgtgaggtatcctcacatcgatccattggtgattactatccagctggccaataaaaggataaagagggtgttgatagataacggtagttcagttaacatcctttacaaggaaacgctgaagaagatggggctcgaaaaggccaagttaaggccttgcatggtaaatctttgcggcttcactgacgacagtatcgccagtcagagcataatcgagctcgcattgaccttgggagaggtacccctatccgccacagttatggaagactttctagttgtcgacttgccatcagcttacaatatattattgggtcatcaagcattgatcggactaggggcagttagttcgatcaagcacctatccttgaagtttcaaacaccagaaggtgtgggagtggtgcgaggcgatcagatggtagctcgcaattgctatagcatagagctacaacatagaaaagccaaccaccagttaatgacagtcttggcaaaggaaagcgaaaagaaggacgaggatcttgaccctcagattcaagatgaaaaaaacttattaaaaccaattgaagaattggaagaagttgttcttgacccaagaaatcccgcaaagtgtatttatattgggaagaacctggacgagtagttaaaaaagcagctaataagtttcttaagggcgaatcaagatcagttcgcctggagccatggagatatgatagggattgaccctaatattatctgccatcatttaaatgtcgatccaaactaccc

SEQ ID NO: 235635 - DNA, 1144 bp, Cannabis indica
ctttgcaatgcattagaccagaccccttgttgagtgggagttattagtaggtatcaatttaatccacgaaaggaacattggaaaataatcaagtaaatcttaagatgaagagaggaactatatgttagttgataagggtggtattttaatactcttagactacaccaaattagttttctagacttgtgttaatgctaaaaagtctactaattatatggtgattactcttggggtggagcagtgattttggagaagtgtaaaaacctatctaaagtctttaactctaccaatgagattgaatgttaaagttgcaggaaggatacttattcagcctatggaaagttttgtatagtttttggcatcgtaccaataatgaattagcagctagtgttacttcctgacaaacaaagaagtagttgccaaaaattaaagaatccagtatccctaaaatagtagacatatagagaggaatttcacaatataaaggatttcgtgcctaaggatatgtaatggcagagaaagtttgtcttcaatacaacctgttagatcctattacaaaaataataccacatactacacttgatttggatatcaaggtgttgagattatttgaaatgcactttttgttttatattagtgcaatcgggagtttgttggattttctgccctaaataaaacctatttcaatataatatgatttactaactagtaaaagttcataaatcattttatgttgcatggttcacatgatttatttcatgactatatataatgtataaattctattaagtgcggaacatatatttgttcatcattatagtgttgccaacatagtggaatataatgattatgttcaaaagtttaagtcccatgatttttcagtacactggatttagacagagatgattgcgataaggtatacttacaccttagataagtgtgatgtaatttctagggaattagcaaagtatacaagtatcggatgtatggagtatacattggattggaccgatgttgatcttggataagatatcataaacatatcgttatatctttctatgtcaatatcacttgttgatcttaggtgtatagatcttaatgttgatattgtaaggttcaatattagttgtattatttatgttct

SEQ ID NO: 235636 - DNA, 923 bp, Cannabis indica
agatcctggtaaaataaattccaacacaaacttcacaagtctctgccaacacaaatgagcaagccccattaactcatgctcaatgtcagcaactcatatcaatgcttactcaacaactacaacccaccaataatgcaacccaccaataatgcttccactttagatggtccaaccatcaacaagtttactggtaaaccctatcctttatctctcacttcctggattattgatagtggtgctactcaccacgtttgttgcaacatcaattgtttttcttcaataaacaaatcgattactcacagatctgtcacattacctaatgctacaattgttaatattgaactaataggcacagttaaactaaattcagctataactctctataatgtcttatatgtacctaagttcaaactaaacttactttctattagtagcttaatacatgacaactcttttcacctttatttcaattctaaccattgtcaaatccaggacccttcttggacattgaggattgggacagctgataaactcagcaagctccactacatacaaccagagacacttcatagtcaaatttctaattcagttttctgtaatgtaaaatcacaaagtgaccaatggcatacacgccttggccacccaactatactcattacgaataaaatcaataaacaactgaattttcatactgatttcaaaagtaaccatgtctgtccaacttgccatttatcgaaacaaaagaaattaccttttgtttcaaacaataatttttcacaggatatatttgacctgattcacctagacatatggggaccctaccatataccttctattgaaggatacaaatacttcctacccattgtggatgaccattctaggcacacatggctatacctacttcgagcaaaatctgatgctcc

SEQ ID NO: 235637 - DNA, 1281 bp, Cannabis indica
atggcttctttcagacaaagttcttcgcacttctcagaccacgtccatgtaacaccgttcttcaacaactctatcaagggtgtcactcttctcgaatagccctccacaaatcgtctatattaattgtctagaccgagaaacgagcgtcgttattttcacattggctggggtcgtccacttttggatcgcccgcaccttttccaaatccatgcggatcttcccgtgttccaaaacataatccaggaacatgatactttcttgagcaaagaagcacttctctcgcttcacatataactcctctttcctcaacttccgaaacatcgtagccaagctttcccgatgctcttctaaagtgacgttgtagaccacgatatcatctaggtacaccaccacaaacttgtctaagtcttcatggaagacttcattttcattcatgaatgtacagaacatggttggcacatttttcaatccaaacgacatgactcaaaatccgaatgccccatactgagtaacagaagtagtctttggttcatccccttctgcgatccgaacctaatagtagcctgatctcaagtccaacttcgtgaagtatttggctccacttagctagtcaaaaagatcagcgatcaagggaatagggcatctgttgtgcacagtcacattgttgagggcgcagtagtctatgcacagtctcaaggtcccgtcattcttcttttggaacaacacgggggcaccaaatggttcctttgatggcttgatgaatcctgcctccaacatctgcgttagctgcctcttcaactccttaagttctgggggagacaatcggtatgctgctttagctagggcctttgcacccggcataagctctatttggtgatcaactcccctcctgagaggcagtctttttgggagttcttcctgcatcacatctttgaattcatctaacacctgctcaattacaggtagagtagactcctccactttttgtatcgtacacgacgggagcaatgacaaatattggcctctttttcttaaggcccctcttcagttgcagggctaatagtagcttgacttctggggactctctcactttagcgggaaccactgaaggattctcacccatgatcagtagattccctgttgctggaattggaatggcccccttctctgctagaaatctccattcccaataccacatcgaagtcatccatgcgaacagctacaagatcaagttgccctcccatccgtcgatcttgcccattcactttcctgaccactcca

SEQ ID NO: 235638 - DNA, 1452 bp, Cannabis indica
ctgataccatatcagtttggaatttattagaggaaaaacataaagaaagagtagaggaatgaatcaaagacaaaatctcattatcatcattgaacagtacacgagtataaccttttatatcagctgaggttagttacaatcacaactaactctaactaacaacaatcacaactcatactcttacaactaactaactcctaactctaattaatctaaccaattacagacttgatacatttagcttcagattttttcttaagaaaaaaaaaacgaagctatctattttttatgagttttggcttgtagatcaatgaaaattaatttagtttattgtggaggcttgaactcccaacaagaaccaacacaacaccaagaataacacacaatgatcaagaacacattcaacataaaaccagcaacataaaccagaacttaaaactagtaaaacaacttaaagaaagtagtaaaggacaattaaaacttacgtggttgggctacacaatcaatgtgatcatgagcttaatccacgggaaaaagcagccttaaacatggttgtggtgatgagttttattgatctgaatagaggtacaaacagggataaaacccttgaaacaaaatagagtcttgctccttacaaagtgtctctcaaatgtctctctcttacaaactaaagagagaccaatcacagctctcaaaacactctctcaatccttactcaaccctctgaatttttgtctcaacctaactcaaagtaagaggccttcaatatatatatacggttagcaactaactaaccttaactgtcaaatcagttaagttagtttgggaagttactaactgtcaaaactgacagtgaatccaaattcaagaggtcaaatctcaacaattccacctggtttgatcacttgaatacctctataaaagatttccaatgggaagactgctttctaattccaatgtaggttgtctccatgagaagacatggctttagttgattctgagtaagtttagacaatatctaaacttgtcacttgtagtactctttgttaagatgtctgcaggattgtcatttgttccaatcttcttgacttgaacttgctttgaactgattatatctcgaatgaaatgtagttttatataaatgtgctttgacctctcatgaaacatgggatttttcatgagatgcaaggcactttgattatcatagaaaacagtgatgttttcagattctatctccatttcagtcgacattcccctgggccaaatagcttccttgatggcttctgtagcagccatatattcagcttcagtggatgacagagcaaccactttttgcaagttcgatttccaactaacacaccctccataaacagtgaacacataaccagttagggaccttctggtatcaatatttcatgcataatcagaatctacatagccagttacatcacc

SEQ ID NO: 235639 - DNA, 910 bp, Cannabis indica
tttctttctttacttatatttaatttaatagttttaaaattctatcatattatattaattaattttacttttcaagattataatgttcaatgtatttaaaatttttagatataaaactaattatttacattaattacattatttataaaatgatgcatgaactagtaaataatatacattcatggtatgcttattcttcaacttagttcatggtaaatgttgaatgtatttaaaatttctagatattgaattaattatttattttaattacactatctatataaagcatgcatgaactagttagtagtagacatttttaacataactatattttcttctcaaaaaccaaaaaaatatatttttttggatcacaccatcaacaacattagcaagatatgtattttttattcatatatgtatataatttattgtatcattattatatattttttatttggtgtacaacttatttttcctttgaattttagatgtcttctgatgaagattggatggctgcaccaaataaaacatttgatcttaatgaagcaatacaacgtattgagaacaatatattttccctttaattttgatatgatactctgttgtgatctaacaactatagtttccttatttatgttttggaatataaagggaaattggaagggccttctcggaacgcacagttttatctctccggtctcgtggtaccgaacatgtcttccgggtacaaattactgaaggcggaaggctttacgagtgtgaaaccaagatatgttcatggaaggacatatcagggtgggatcggcccacttctcctttgctgagggtcccactgataggtctgcggtgctgacctgaagtccacatgtccaataccaaaaacgcgaataacagttacaattggttcgca

SEQ ID NO: 235640 - DNA, 1075 bp, Cannabis indica
atggaacctcatgattcttaacaaagcgacataatctttctttagcttgcaatctagacttgtagaaatcttctctcgaagatagcggtggttgtttcctcccgtagcaagacttgtagaaatcttctcccgatgatagcaattcttgtctcttgaagcaagagaaatcttctcctgagcatagcggtgcttggttcctcccaaagcaagactcggatgaaccttctcatgaagcttgttctttattttcttcaatttggaatttacttcacataaaagtaattgttatactcgtaatttggctacactccaaaagttgacatgtgtccaacaaaaggaatatgaatcaattctgaataatataataatattataccaataaatgtatattaaataactcgttattattaaataaaaatttgatagataatattcaaaactcattgactttatagtcaaaagtgagacaaggataataattattgagctgaggttaacgagaaatatgcatgcctcgacatatatagacaagaagggggatgttcatccactcgagtagaatgaatgtaacaatgtaactaccttgcattacacataacgagaagatcacctcgtattgttaatgccaataagagaatatgacgagatgaactacctcccaacacttagcattttttcttattaagacggacaaggaggataactcgtatcaagcgagacacaatcttccaagtcactaataaccgtctaaaggataagagtaaagagtggttgggtagttattagatattatcccacatgtgattaaaatgaaacgcgggaattgtccacgtttcatgaactgttatatttgaatcaatgccaaaaaggataactgccaacctatattcctatatatagaggcagatcccatgggaaaagggacggcaaaaatttaagagagaaaaaaaaaattcaaattctgaaatagtattctgtaatcaacaaatatccctaataataaggactcgtggagtatgtagattttaactacaaaataacgtaaaaatatttggagttattctatcatttatta

SEQ ID NO: 235641 - DNA, 833 bp, Cannabis indica
aactaaataaataaaattaacatttgagaaaaaatctaataaatatataaaaaaaaattaagaaaaaacaattagtcaaaataaaaagcatatacatacaaaaaaaaattaactattaattaattaagaaattttgtaataataactacgtaaaatagattcttaattaactattacaaaaatatccaaacgaaacatcataaaaaaaataaaataaataaaaaattgccattatatatgtatatacaccagatatgtatatatataaacttaccagaaatgggtagatcagaatatagtactgagataatggtagatatagcctctaacgatcctatggtagcagctagcagagagagagagagaaaatcacgagttagggttactgtcacaaaccctagctactccatctgcagttaccaacatattcatcatcgatcattattattcagagcaaatgcaatagatctagggaggagagaacgatccagggagagagagaccttcattaattcaagaatgattatgcttgagccagggagttctgattgccttttatggaaatgccggtgttggctgctcaaagctagaaagaaaaagaaaagcctaaataaaccctcctataatactgagaatgcgagagagagagagagagagagagagagagagaatcatgagttagggttacttaacaaaaggagagagagatcgacctttagatactattagaagaatgatgattacgcttgagccactttgttttgatcaccttccatggaaataccggtgttagtttgttgttactcaaagctggaaaatcaagaaagatgagg

SEQ ID NO: 235642 - DNA, 553 bp, Cannabis indica
ctacaaatgttacattggccaaatgcggtgtggatgtgaataagaagtgtgaaaggtgtacaggtcatgtggaagaaaatgctattcatgccttatgggagtgcaaaaggagcaaggaattctgggctgttagtggtttcaaggatgagatgaaacggctgaaaggtgaagatgtgttgtcttttttgatgaggatggctcggcaatgggacaagggtaagttcgagttttttttggttctcacatggaatatttggaacgtacggaacagtgtaatacatggtgggaccgctcctatggtaggggagatggtggactggtgtaggatgtatttgactaagtttcagggaggaggagctgctgctgtgagtcgggtcagaagggaaaatttgaaatgggaggcacctgatctgggacggatgaaaattaatgtggatgccggagttaaaagtggtggaggggtgtcgggtatagggtgtgtggttcaggacaatggggggcgtactctctatgcgtcctctactgtagttaacagggaaattgctccacttca

SEQ ID NO: 235643 - DNA, 758 bp, Cannabis indica
taacatataatacgtacacgtaacaatagaaacaaattatattaaatgatatattcaacatcacatgtgaaaaaaaaaggcagcaaattggtatacacatagctttatcttttgtcgtattacggcaacattatttttaattattattattacttacgtaataataaccaatacgtaattacgtacaggtttcccaccatatatatatatatgtatcctagaacgttttgagtctttgatttgacaagttcacaacccaatatatataatataaataaaatagctataagataagtaatttagtgaatcaaatattattgggttcgttataactttaattatcatcattagagagatatggagactgcaaaaatattccttgttgtttttctttcggtggccattgttcttgttgctttgactttgttctgtcgacgacgacgccatacttggctcggattaggcggtggaaatagtggtggagctcctcatcatgaccctcatcatcacggaggtggccatggagatagtatggtttaattaaattgtatgctgtagaaaatagctagatcgaggattgattattccgttgattatgatgatctctttttttctctctttgatacgctttcaaattttgggtttattatatatgttaattatgtgtgtaagtactatatatactacgtattagttgattgaaaagatatagaggttaagtatagtctctgtatatataggctggtgtgaaactacaa

SEQ ID NO: 235644 - DNA, 744 bp, Cannabis indica
tgtggaattgcagatgaagagcaccgacatttttttttttgcttgttgttatagtaagaaggtccttgaggaaatagctttttggtgtggtttgccttacaaatctactaacatgaaaaaattgatccattattggttgcagaaaagtaatctctcgaaagtaaggatggtgattctaagtattatctttgttgtattgttgtagtatatagtatctcgcataataaaaactcagtcttatgggatcataaagtttccactgattcatgtaactgttaagcacgtaattcatactgtttgtgttagattacaattcatgatccttcaaaaagtttgaccgaatatcaaattggatgagcgagctcattagaacttgtaactaatttgtttggctttgccttataaatgtaattgagttttgatgtcaatataaagtttattgatttaccaaaaaaaatgtattttctagttttgaacattaaaaatttcaatctttgcattgaagaataatgccatatttataagcatatttccttgatgggtcgatccagactcattaaggttatttgagtgtaaaagctcactgatgaggtaaatataattgtttattgatataatttgagctaatcaggagggtaggtgagacccaagttgagtagagctgtcttccgtatacggtcgtactgttgacagtgacaggtgaggcgtgagccgtggttgagaggaaagaatgtcagaatagtg

SEQ ID NO: 235645 - DNA, 1473 bp, Cannabis indica
gaagtctaggggtggtgagacaatgccgtccagagagaaggcacctgttgaagctgttatcgatctatccgaggatctaaccgtggtggacccttctgctccaaaagctgtgaagtgcaaggtctctcgaggaggaagctcggacatgcccgaacagttgaagggcagatctgggatcctaccccacctccattattgcacccagagaccaaaagaggcaacgagatgctcacccactacatgaatcgttcggtccctgaggtgaatgagcagtaggcgggagctgacaatgagccttctctagagctgttgatgggaggagtctttcctgacagtttcctttaatacttctttacttggctcagattctaacattttttctctgtgcagaccggtctgaagatggcttacacttattctcgaacttagtctaccgcctccaagaatgctgctatgtcaaacaccatgagggcggaagtggacttagccaggaaggatgctgatgaagccagggttcaactcggagccgtccgaatggaaccagatgaagtcaacaaaaagcttcttgctggtgagaagaaagtggctgagctgaccaaggatttggaggcttccgaccaacttgaggctgccatgacctccttgtccgaagaagtgactgacctccaagaagaaagggaggttcatcaaactatttttcacgggttggaagtagagaagaagtccaaggaggaagagcttaacgctgaggtagagaggctcagagggaaggtgaacgccttagagacagccggtctcgagattttttatgacttttggaaagctaatcctcaagggaatttcgattacattggcaaggccaaagacatgtatctcgagtactgcgcttcccaagtggcctatggagagtccaaggcaaccacttctacctccggtctaaacgtagacatgcctgctacccagagaatagatcctccagctccgactggcctagaggacccgtacaaggagcttgggactccagccgtctgaacacttatctttctttttttttatatatatttttttctagccataaggccttttctaagacatcgagaccgaccaagcggtctttaaacttggaattatttttcatttttcagacaacaggttgactgggcagcttttaatcgcgggttcacgtgctttagttatctataatgaatttcattctctgtttatcatcatcgtgcaattgtgtttgttttatctttaccaaattctttgtacatatataggtgcccccaagtgaccgagcagacttatgactcttgggcacttgttagtttttgctagcatgcttttttgtctgttcagggttttgggtttgaccaaaccttttgtacgcaatggatggtaaatgaaaaacatgctattaatttcaaatcaattcgaattttgaaataaacatctttctgttggaaattattt

SEQ ID NO: 235646 - DNA, 928 bp, Cannabis indica
atcttgtgatggttatacttttcggacacgggattagattttgtcccacatgtcataacatagtggtgagcatacctcttctgaatacactgttatgtctaacggctcttctaagcgttttgtataccaggtgcaactttcgcccgacacgtgccctacaccagcaatggtcccaattgtccagaccatttgccccacaataaagagccttcttagggggccaatagtcagtatttttatgtattttacccaaatagagggtgggcttctagcaaaaaatcctaggcgggtcatgggtatgcccatacacgcactttagcctatataagtccatttatttcttcataaaaagggataaaaaattacatagtcgaagctctgctaaaatgctctctaagtttttgtcttcttcaagagaaacctagagagccagagttagggtctcactgtaaacaccactttgtaatacgtataaatgcctataaggccaatatactaacttgtgaactagggataattacgttcccgtaaccatggtggcacaaaaatagtgagagagaaaactcctctataaaacgctgacgttgtcaaggatggtaaaccctccctctcaagagcatgcctagccaagccatgcaatgggaggggatacgtctgaagctaacaatagaggggcaaacctagatcatcattacaagaaagttgcagacgaagatgctaaaactaaggatgacgaggacaaagatggctactagaaagaagggtatcattatgaccaagacctagatttggttcgagtatccaatgaactgcttgagactcaacaaaatttatcccattgagaatagttctcttagaagatgggaaagataatggccacctctatgcaaaattcaaaaacctagaacgaagattccaaagaggacac

SEQ ID NO: 235647 - DNA, 1577 bp, Cannabis indica
agtaaaatatatattttttaatattcttttgaaaaagtattctcttgaagtaattttttttaataaaatatctagaactcaagaaatatgtatgacaaagtatttattttttataataaattatagaaataatatgaaaaataattttgataaatacattaatactttaggtaaacataatattaagatagttctattttttatatacaatattaaaatgcatacaaatatatatatatatatatatatatatatttagaaaaaatgttttgtaatattattttaattaagatgataaaaatttaagattaaattatttaaatttttattatctaatataaaatattaaaaaaaagttataacataattataaaataggatatttttatttttctttatatctttgtggagtttctttatttttttcaaaatttaatttttctttttttttctcaaattatagtaaatattaccaatggcttccttagtattttgttatattttatataattttctaacaatgtaaaattgattttgtacaatttaaaattcttgtgaaatatatatatatatataattttgactaattttaactaatcaaatacatatttgtaagacaactataaattttttattataaactatatcaacaaattatttttaaaaaaatgaagagagtgcaactaaagatgcacattacaatgctatacaatcttttgataaattttgaataatttcttatactaaaaatataatttatctttatatattttgtactattaaagaaaaaaactatcactaattaaaatattaatgtaattttttatttttaggtgcaccacgaaattctcctatatatataattagggtctatgtaggtacaccacataattctccaatatatataattaggttttatatagatatatacatggtggtgatatatataggatcaaaaaatgagtgtactcgcatctttattatattttatataggtataattttatttatatcaatggtgatctatattgtatactcatttaaaatattatgtaattatttttaaaaaaattaagtaatttatattttaaaataagatttaaatacatgttttacaggagtattaaaacagcaaatacaactgtaacatatcatatctttggcgcttaaatttatttagaatttaatatatgtagaagctaaatagctaaaaatgtgcattgtcttaataaaaataatagaataataattatttgtgttgaaaacatgatatagatatatattgtacaatttatttttttggagtgtacttttaatttttctatatttatatatatttttgagtggggatagtcttcaccttacaaatagttaacagtgagaattaatatttaattaattataataatagtgatataatatcttatagtaatattgagtataagtagtattttttttgaacatttatatggtcataaatattttgctccacgtgcgcagcacgtataactttcactagtatctatatatatatacatggttctatcacaaaaagagaatcccattctaaaataata

SEQ ID NO: 235648 - DNA, 1139 bp, Cannabis indica
ttttaaaaaaaaaaaaaaaaaaggagccttataggctaatttttgaaaaatatacttaaaagaaaaaattatgaaaaatctcttggactgagagggaatttagacaacgaccctgaacgtggctatctctcattattattaaacacataaattcttttctcaaatttatctggaaatccaattcaaaacttaacgatacaagaggtggtaagcccaaaagcacgagagctcatttgagtctatctcagcccaggtggttaacctacaaaaataagctagacaacccaccaggattaagtccaaccccacaattaacggtcatagacatgatttgtggatcacaccactccaagatggtcaactactctcacttttcttttcttaacccattgttaacacattttaattgtggagcagaatgataatgataaacttcaagcgcagcgaaataataaagaaacgaaacgaagaaaatttactcagtttggtaaaactaccaaattatcactaagagagatatatttcacttatcacttcaaaattacatatgctctttatctcaatctcttcacctaaatctcaatacactctctgcttctttctcactctcatcacataacaaactcgcacactttttttttcacaactaactattttctccacacatatacatacctctctcacacacaaaatacatatctataatcttacaaaacttgggcactaagacaacttggagaccaagacattctaaagcttccttaagaagactcatcaaaacttttggctacttagacttttcttttctcacaatttataattactcaaaaagaaattgcaactttacaaatatagataaataaataaagaaacaaataatttgagtcaaactccaacaataccttggcacaaattctataaactcacaactcaaaccatcaataagaatatatatgcactgaattcatactctcattaaacttcacttgaacacttatcttcacattcttcaatctttcattgattcttctttcttcaaacaacttctaactgaaattggagttttctccaccttgtcgtattccttcactttaactgaatgcattttgtaacttgactctacctaaaatagtcttctc

SEQ ID NO: 235649 - DNA, 753 bp, Cannabis indica
ttgaccaacatagatgcctgtgctatctagataaccttccaccaagttttgtgggctctaaggcgcgactgagatcgtttaccaaattgtcatgcccaaactaattcttcaactctttaaggcgacccaaatattcttagagcaactccaatgttgtctttattctagttgtctatctgtctttgtcaggggtatagctactaggaagagtagctaatgcattagagcaaaaatacttgactactccaactgctacacaggggcaacggtcttgggtcatggggtcaatattttatatatatatttttaaaaattaaagtaaatattgaagataaatatagtgtgtggaactataggagtaacttttagagttgttaagtgttggagtaatttttagtagtgagtgaccaaaaatgatgtggatgagagagaaaataaaatattatattttggaatgatgtgaaaatttgtggcaacttttagaattgtttgcattggagatgctcttagttaaccataggagtctagaaagatcccttcacatgtttgagttatgggttttcatccacaaaggggtggaccgccaagatcaagttaagctcataacatctacaacattttctgttggaactggaacaaatcaaaccatgaatgaaccaacgtggaggtgatacattcctaccactacattgatggtaattttttaataatgctaattgggacaagatgatttgtcaaaaaaaaaagaaaaaa

SEQ ID NO: 235650 - DNA, 515 bp, Cannabis indica
cattttagtggtggttcagcccccaggcaccaccatgcaccaccctaggcacccaagttgacatttgccataaggcttagtgttttgtccatcaaacgatagtttagtcttgggaatcaatcttattttgccaccaacataagatttggatgcttctgcaagtcaatatcttatgtacatgtgtcatgcgcaagtccatcgacacttacgcgcactaataatcagcttgaattcaagaagaattggaagattaagccagaggtaagccctagaacccattttcttagatttttgaaagttaaaggttggtttcagcatgcaatctttgagaataagttttgttcgaacactagatgtttgtgggtttctttctgaggtagattagatttttttgagcttactttggctggagaaggtattgagcaagtttaagtttgagaactcaaatttggcttaacaatggtgatttttgaattcttgtgtttcggttgctgctatattgcttgaaatatgtt

SEQ ID NO: 235651 - DNA, 616 bp, Cannabis indica
tttctttcacccctaccaaacacggaataaagaaagtttcttttctcattctctcatcccgtgaagctgccctaagcaaacggacgaaacctcttcagtctacctccccactttctccgtcaacagtcgccgtcctgttcagtcttcggtgaacggccggcgtgaacagccgctgcaagtagataggtagattcttttttattttaaaatctgcctaaaagcctattcttccccgatcttctccataattctctctcctgtgatacattcacttgattagaacccgacttaatcagttaatccccataccacctattgccaaatcatgttaagctttcactttctctaaaacaggtttgtcaaaccaacgatcgcgtaaaatcgatgattcccaattcttatgaactcgttcagaattgagattgcaccagaaccagtcccccctttcttccgcattaggatacgatttcacgtaactagcaacataattcccaattcttaagaactcgttcagacataaaacaacgctgtatttcatgaacctgaacccctcaaacgagaccatgtccaaagactagacaagacttgcattcttctgttaacattttgtgctaaa

SEQ ID NO: 235652 - DNA, 1456 bp, Cannabis indica
tcagacccaacattccaagaaaatagccaagcaatccttgggcttagcatagctaactttggtagagacactcctcacatcatcataaccaatccaagtagtccctgaataacaataatcactcaccacactcccattgaaaacactccgaccattattctcactgataaaactccttatattattataaccaatatctccgtcccccggtaagccggctccgttcgccggagcaaaaagaccattgttattagaattcaccaaacgccaagcgtacccgtaaaaaggaatccccaaagccatctttctagccggaaaacccgccctaatccaatctctgatccctgcagcaccgttgacctgactcgccgtcgcgttatacagagccgccggcggcgctgtaaagttcggcgaccagcccgggccgtagaaatcgtaactcataacgtttatccaatccaaactgtttgagatattctgaacaggcaaatctagtgaatagtaattagatgaacggaaaactgcagctgataagagtaatgcagttttgccggaagttcgggactcgttggcgacggcggttctccactcgaggaggagttttccgaagttggaaatctctgtggcagtggatgggtactcccaatcgaggtcgaggccgtggaagctgtaattccttgctagctttatggacgagtcgatgaacgagttccggcgactgggttgactcgccatggaggcaaaggtagcgctgatatttggtcctcctccacctatggacagaagggttttcacggaaggattcttttgctgtactgttgtggtgaatgtggagaattgagttgaaactgagttgggaatggtgactcggtatgtggtggaattgagatcggcgaaagcacagaaaaggtgggtgaagagagatgagttaatgttggaaacaggaaactctgttccataataccaataagatcctttgactgtagtttgagcggtggagaatcggagattgaagaggaaacagaggactgagaagagcatgaatggagaggttttggttttggaagccatatttgtttgattgttacttgttttgtttgtaacatttatgtgtattatctagtatatattggttgtttttgttcatggaaattctaaaatgcactttctttagtgtatatatagatgcacttttatatattttatttaatttagataattattttttaattaaatttttattatagtagtataaattataattataatttttttaaaaaaagtttgttgtgtgtaaaatagaatgtctaagattactttttatattataaaatattttaaatttatcaaaatttagtaaattatcttaaataactataacttatattatttacatatgaaacacttcttaatgggtattacccatgaatggttattaaacaaatttaactataaa

SEQ ID NO: 235653 - DNA, 954 bp, Cannabis indica
attagcaacgagctgcacaatacgttaaaaatcacgctaacacgcctataatagttagggtgttacacaatcactacgtataaattgtaaaagtaagtaaagaaattgacacaacaatttataaaggttcgcccccttgtttagcgagtaatgacctactccccttttaattgtattgatttgagatataataccacacagattacaggcttttatcttataatttcaagtatgactctctttgaatgttacaatgatgagaatgatgtatgaaagattctgaataagtgagatgagaaacagactaaatatctgatgctctttatatagtttagagcttacaaaagatctctattcaaataggctaatatcgttcaaaaataggagatattactcttttatcatatatttaagctataaaaataactaactaatatctctaaaagataagtagatattttggggttgaatccatacttttgtgggttattggagccatctcttagctgaaactattgtatgacccatctaggaggatggctgcagaccccaccattcgattgggcttcttttgatactctttattggtgctaactgacctaccttctgtttggggctggtcgacacatactcatccttggtcggccagagtatagtccggtcaggccctctagctggctattttcttgtaacttgaccttgcctgaatgtttagatccttttccaattgatgtgttgtgcatggtgactgtaacgccctaataataaggcacgctacagttatttttcaatcgaagtgctatctttgctaatcaaaaaaatttcttgaaaatcgcgtcaaattaaaacttttagaattaaatatgaaactttataaactttatatgaatatttacaagtgtcgggatccccttgttagactttttacaaaatattccaaatacaaaagtcagg

SEQ ID NO: 235654 - DNA, 1689 bp, Cannabis indica
caagcctataatacactctgctaaagggatgttttagttaagaatgggtgtagtgcaattttcacattcttctctcaacccagcccaaacccatattgtcgatttagcaacagtagtactgtagtagccgatctagtaaccatccccaaaagatgaatttcactatcgttttttgaggccatcaaaattcttgactaagtaaccacttcaccagtttagagttaggtctgacagtgctcgaccaagaaggatagagaaagaggctactgtgacagccaatcaagaacaatactcgatgaaatcaccataacaattctcgatctcagaaataaaattgtcatcgggtaatatttgatttttgtttgataactttgacgagcaggtatgttgggatagaagtatttgcagagtaatattattataaaaactaaagtaattttttatttagtcctaatttaattgcagatcaaccttttttttttttcataattggtatttatggaatgataaccataattggagattgtgagattcaaacgagagagaaagaaagagaacagaatcgaaagaaagaaagagttgttctgtctattgattatagttaggaattacaagggattatatatacatgtgaataaccaacaactaacccctaactaaaaacctaactattaagacaaatagtgcttaacagaattaacagacttaaccaactcagctcccttaaacagccccttcaaactcaatgtggtgagagaaaaaatactgagtttggacctgaattcattgaacgtgctactactatatgtttggtgaagaaatcagcaagttgagcagaggcagggacatgtttaacctgaatttgctgccaaagaactttgtctcgaacaaagtacagatcaatttcactgtgctttgttcgagcatgtaaaacagggtttgcagccaacaaatcgtaccctgattgtcacaccacacagatgtataggcaaggatgcgaatttgaagttcttgcagcagtgattgaatccacacaacttcagcaacaacactggccaagcttcgaaactctgcttctatggatgatcggtaacttgtttttgtgacttccaggctatgagattacctccaaaatatacacaatagcttgtggtggatttcctatcatccaagtcagatgcccaatcaacatcacaaaacacatctaacgcgaaatcaggagctggtttaatgtaaagaccatagtcaagagtgccagcaacaacgtatctcaagattcttttcactgcagtccagtgtgaaagcaaaggtgagtgcatgtattgacatactttgttaacacaataggagagttcaggtctggtaatggtggcatattgaagagcccctacaatagacctgtagagagtggtgtcaggagctggttcactaccatagctggacaactttaaaccactgttcattggagtcagctgtgtgttgacattttgcataccggctttggttaggaggtcttggagatattttgtttgggagggatgaattccaactgcagttctagtaacctatattcctagaaagtagtcaaccaagccaagatcttcaaaagcaaacctagtgctgagattagtaacaagggaatcaaccaagagtcatcacttcccatggtaaggatatcatcaacataaa

SEQ ID NO: 235655 - DNA, 482 bp, Cannabis indica
cttggaatactatcagtcgatgttcgactttcatcacatcaggacctcccaaaaagataggaggtgcctgcttgcagaacctttgtacagcagtttcatctgattcactgtagcaattggccctgcctgcacagcaaggacaggagccacctgcatctttggagcatgcattgaaggagcaccctgccgcctcaggcgtctgatttctttgtcttgctcattgatcatggcttgcattgctgcaaacctattttcccattcttgggcagcctacggcaggttaacatctccttgactgcatgccctgcctcgagggcccctgcctcggcctcttatatttggggggaatctgaactccctgaccgccactagattcgaccgagttaccttggatcctagtgtttcacctgacgtctattttaatagaatagcatgcgaaataaagaactagcctgatcagattgcattcaagaataatttat

SEQ ID NO: 235656 - DNA, 1365 bp, Cannabis indica
agcaaaaacagtaaattgacatttaataaataatcatgacaaaagaactgtaaaataatactaaaacaaataaaaaaatatgaaaggaaaaaagaattaaaaaaaataaccatttgcacaacctcaacaccagatgcaatgcaataacaattatatttgcaagtccagtcttgaaacatcagaataaaaaaaaaaaactactaaaacaacgcaaaaacaaatgtaaaacaatgaaatatatagaactacttaaaaaaacataaaaaaaatcacacacttcaaatttttttgtcaaggaactcgtcaaatgtatttataggagatcagaataaaaaaaccacaaaaatagtcaaagagaacaaaaaaaaaatgtatttatagacttcatcttcaacactcatggatagaaccaccacagcaatatgagaacactcaaaaaataactattaatttcgacgagaaacagtgaaatcaacgttaaataaataaaccatgacaaacaactataaaacaatattaaaataaataaaaaaattaaaagaaaaaaatgattaaaaaaaccaacaatcttctgcacaatctcaacacaagatgcaatagagactatatttgcaagcaagttctgaaaaatcagaataaaaaagccactcttatctttcccgaaaatgtgaatgaaaatttcaaatactaaattagaaaataaaaagaaaatgaagaagaaaaacttaacaagaaataaaataaaaggtttacatattaatggagaaagatagagagaaataaaataaaaagtttacatattaatagagaaagatagagacaacttgaggaagaagagagtgaaaaaaagagagttatttattatttgttcaataggagtatatatataaacacataaatagtttcttggtttgggagatcaagtgggcttgcccctaattttttttttttaaaaagaaaaacaataattattttaaggaaagaaaataaaaaaaaaaactcacttttacgatagcatagtaacaacatcacttcaaatattcaagcttttgtttatataccgtagcccgaaaagtaaaaaaaaaatagtacacaatataagaagaaatagtaaaaaaagtaattttttcctaacaagagtaaaattaaaagaaaataggaaaaaacagtatagagtgtaaatttctattaaataatcaaagtgagatttagtaggttttttttttcttttttttgtattaattacataaaatactatttttgtaaaattactaaaattttacgtattaaaagttttttttttttttaattaattttacgtatttttttttattgtataacaacacgaaaatgaataaaaaaatt

SEQ ID NO: 235657 - DNA, 628 bp, Cannabis indica
cacagtcgtcttggcgaattggtgaagatagaaataatcggtaggagagtagggaaggcttttgaggattactcgaggttttctaatggtgatgatgcagaggtaacttgttgtcttgttgatagatctctgagtcatgatattgagtccctggaagtggattgggtggttttcactgatgcgtcctggctcagaggggaggcaggaatagcagcagtgatgataaacagagtaacatgcggctgggctacaaaatcagatttcatcaaggcaaattctgctttagacgcagagcttagtgccattcttatggctctggtgtgggcttctgaagaaaaaagacaaccaattcttttagtctcggattgtcaaaccgcagtccaagctctagccattaatcagtgtcctaaggattggagatccctcaacaagtctctgtctattttggattatagtcgtagatttaatctttgtaagtttcaatacattagtcgtaatttcaatctttttacggatagtttagcaagaagtgctagaatttctagacaacctgcagttttgtttcaaggggagggtgatccccctgtgatccccatttttcttcttgcttaatgaactttagttcttt

SEQ ID NO: 235658 - DNA, 904 bp, Cannabis indica
ttaggcaaaacgttaggattaggcagctttaatgacaaggctttactagcacaaggaaaattaaccccaatctgtataactaactttattcaacaaaacttgattagttaatactgtacatgaattacttaatgtgttcttttaaataaaaaaaaaaaaaaaaaaaaaaattaacacttgggagttttaaaggttcttataataaatataatacatttaagtttgaccaatttatatagtattttttattattatttttaggtctttttatggtatttgatatgtcatatatatgtaaattaggttttcaaatcccatatttaatatttttatttgttaaggtagttttattagtcacggatgctaagaaagtcaccggagtttgctgtcggtgccgaaaaaaccaccggagtagcagtcagtgccgaaaaagtcgttggagttgctaccgacatcgaaaaatccgtcggaattggcattgtcgccggaaaaatcattaaaaaaaatcaccaagaaactggtttcttgaagaagaaaccggtaaaccggtttcttgatgaagaaaccactttcttggtgatttttccgttgacaatgccaattctgacgacttctctgacactagcagctactccggcgaattttccggtaccgatagaaaatttcggaaaagtcatcaaaattggcatagtcgccgaaaaaattactaagaaatcggttttcttgagaaagaaaccagtttcttggtgattttttccaatgtattattctaacgacaatgcaaattctgacgacttttctggcattagcagcaattctaacgacttttctgacactggcagctactctggtgactttttcggtaccgacagtaaaatctgagaaattcatcggaattggcatt

SEQ ID NO: 235659 - DNA, 1015 bp, Cannabis indica
gtatacatagttggtattaataaaagaaaaaataatttaagtttagtaatttcttgattgaacaaaaaagaaagcgaattagtattttttttttattttagattgttagattttaaactcaattaggtttaattttactaagttttaagatcactttttgatacatatcaaaatatcaaaatttgagagtcactttctcattatttcataaataaaataaaaaattattgttgaacactacttataattatagatgagatcttgtaatattttttaaaaattattaaattaaattatataaaatttaatatttaattataggaatatcaatataacacctaatctctttccacatttcccttcacaaaaatctccaaaaaaaaaaaaatcttattattactataaaatttcccaagaaaaaaaggaaataaaagattaaaaaagcattaatggtgtattcatgtgttgccacaaaaaaaatggtgtatttatgtataagtatctccaaatttccataaatgtgttaatgttacgttgaaaaaagataaaggacagcatctagacaattgtatcatacccatttcccaattcccagatcggatctctctctagctctctccttctctctcgcttcctgtctttctctctatcccaatatcttctcctcaacttcagcttcaggttcgtcatttcattctctccatttctcttgttcacttcggattcgacattttcaactaatcacattttagttttcaagtttcttttctgtgcatatcatatcatacgtgtgttttcccaccatttttcccctttttaagtcgataggggagatttggttttgaattgtgggaatatgaaaaagagaaataattaggagaatgtgtagttgattgcatacgttttgatcaagcaaagaatataattgggttttgtttattgtttcatacccacttcgtttgtgtacataattttccttttttttcaaattgttgatagaaatttttggccttta

SEQ ID NO: 235660 - DNA, 1235 bp, Cannabis indica
taatatatgtttgcttagagttgttattttttttttttttaatgcaagtatcaacttttattaaatgcaaacttcagctaccaagcaaggtagcaaatcagtaggaacagacaccatattgaagagacgatcaagatataatatagcagctttagcgaaattatgagccaccacattgtcagatcatttaacaaaagaaaccaacacatttcttaaacttgcaagcaagtttttacagtcatttataacttccccaaacaaagaaaccatggatagtggactctgtaatgcttgtacaacacataagcaattagtttccactttacacatttgaggtcttaaattctttatccaactgagagcttcccgaacaccaatggcttcggcaagggcagggtctacttgagcgtgggcaaaggtggtacgaccttaaattagcatgtcgttaatgtctctaataatcatccccaaaccatagctacgacccccatcaaatattgctgcatcgacattgatcctcacactattaacatcattagaaacccactgcctgttaccgactgtaagttgaaaaccagcttgtgttgtatcatttttctgagcatctagccattggtgaagataagtttttagcgaaagcaactatattatcaggtcgaacctctttccgattccaaacaaaattgttccgtgccccccaaattgcctaacaagtgactgccagtaggcacttcaggtcattgcaggccacttgaaacaccttgctgcaccagtcgaaaaacgagtctccaggggtagtttgggtgcctattctcacacggtcccagcatgatttaattctgctacaagtaactaaacaatggagaatggtctcctcgtgctcaccacaaattggacaaatacaagaaacatataccctcttgacccgaagttgagtaagagttggaagacagttcgcaccaactctccaaaccagatttgagactattgggggggagtttcagactccaaagtttacgccagaactgggatgcttcatcttcaaaccatctgccctttaatttttgaagtgtcgagtatgcactcttaactgaataaatgtccgagttctctttacaccagaataactgatcattgttttgagtgatcttcaagcgatgttaaggattatttgtttgtccctatcaatgaagagatcagagattaacactattcggttttatgccctaaataaa

SEQ ID NO: 235661 - DNA, 824 bp, Cannabis indica
tattagttgtaataacatgttatgtatttgttattcaaaactaaatattttttttttctgatttctgctttaaaatcaggttggtactctacttatttgatgagaaagaggattttttttttgtttttataaaaattatcgacaacatgtcgaaatactgtcggaaaaatctacatttttttagaaaaaataattcagcctaataatcgaaaagaagtcgagaaactatcgacatcatatcgacattacgtcgacatgaataatttcatttttggaaaattagtctttttcatgtaatcaacatcatcgacaaaaatgtcaaaaaacagtcgatgtatcattaataactctctgtttgtgagaacaacacattatttgtcaaataaataatcaactaagtaattaatgttgacaatatatcgacaacatatcgacataccatcgataaagtcgtaagttaatgaaaaagaaaaataagtaaaattatacaaaatatataaactttgataataaatggttgcagtaattgtttaactatcgagaagaggtcgagaaactatcaacattatgtcgacattacatcgacatgaatgctttttctttagaaaattagtctttgtcatgcaatcaacaacatcgacaaaatatcgataaatgtcgatatatcatcgacaaacactttgcttgggataacaacacattatttgtgaggaaaaatacactaaacaattaatgtcgataatatatctacaacatatcaacataccatcgataaagtcttaaattaatgaaaaaaggaagttaagtaaaattatacaaaatat

SEQ ID NO: 235662 - DNA, 782 bp, Cannabis indica
actctcggcccaacaagataaggaagattagtttttatggtaattctgaaggtatatattcatcatcatcattataacaatctaggtgagaattataattgaatgcaaatatggctacagagttaacttaattatacactattgttgttttcagctgcaaataagacaaaaccagtatctgaagcaaatactgatcatgacaatcaaggcaaaggcactaataataataataataataataagagctcttcatctgaagtagccagcaaattcttctcagacaattcttactttcaagtaaaattgagagcacatcaattgcgtggaaatggaaaattggtatgtacaagttgttgctctcattcatagatatctctgtatcaaaattgtctttctttgtagataattcactatattaatttttgtttgtgaagtatattccagtggctattgcaaactcttggtttgagaaaaagacacaaattgtctgtctttgggttggtgagaaatattggcatgtgaatttaactgttaataagggatcatcatcttctggattagagcataggttttctagtgggtggcgtgcatttgcaagacacaactctcttcagccaaatgatgtatgcatctttgagctgatcctcaagaataaacttgaggttaaagttaccatatttagacaaagtgaaagtagtatgactcaacaataaactcttgtaattgtatggattgattgaaatatgcctttaaatgtataataaactttctcaattaaaaaa

SEQ ID NO: 235663 - DNA, 3390 bp, Cannabis indica
ttgagcctccttggcactgagaaccatctggcgacaaggagagggaatatgagaaaaattggaaaagaaaaaggaagaggagagaagagaatggaagaaaggacaagagtggttggtgccaaccactcttctaggggagtggatggctctaaagagagagaaagtggagaaaataagggaagagagaagaaaagagaagaaaataggggtagaattggttggcacacaccactctcttgaggagagaggatggcgacaaagagagataaaagggagaaaagaagggaagagagaagtgggtagaagtggttggcgccaaaaaatctcttggagagagtgggtaatgaccgcatatttagacatgaaacttagtggtatttttatgattgatagttaattaatgttgattatgcatgctttaatgaaaatggggcctattgtcaaaaataggtgtttgagaaatattttctcaattctggtaattttgttgagttctagatgtattatatataatatataaaaattatgttatttttatattttatgcccggtaatagtgtaatgcgacgatttggccattggtgtcacagtgatatgattgtgttgatgcagtttttcgtcaactgatttaagaagatcgtaaaaaataagaggattgcgataaattaatttggctaaataaaatcgtaataaataaaatggacactagggatttatagtagttcactcccatgtcgcgatggtaatggggctacatctacttttgtttttattaattggatccgacatataccagagttatattgtcaagagtgttttgaaaataatacaaaaatagttttccaggtgaaatctgtatcgagacttatgaacacaagactcatgggagatccaatattcacaaatttgatatagatagtggttgtaaggctcttgtgaataataaactaataggagtaagaaaagagaatggtccctgttcttggaaactatgtatgttaatgacatttgagtaatggagacttggtgtcgacaaagtatggaggagcaaatgaagggatgtaattttcttagtagccatccagtaagcaagcgattcatcctctaaccagcatatcactatctttatataggcttagggtttgtttgtgatcccccatatgtcagtatgtctcactttcaaatcatgtatcccattcccaataatgagtaaaaagttaaataaataaatatctacaaaaatctcacttattcttaaaatcccacaaacattgggagaatggttgttcttggctagaaatatatcaaattggagaggatgacattggatgtcacctcttgccttggaattcataaaattagatagaagtattggaaatagatgttttaaggtgccacttctcacatatgatgtcgcatgggctgtggcatagctctccaacatcctacacttaattacaccactcaattctcgaatacaatgtaccagcctgtcttgtaagcaaaatttgagcttgatatataacttcagaattgagctatgactatgagacacttagatttttcttaaaaatatatttccattgcaagttgaaccaggtcatttggataaaaattaagagagttatccacattttactaaaaggccgtttgtgttattttgctccaaatgcaagcactgacacgaccaaatggcagctctcgaccatgcatgttcacgaccccctcggggtgtgttctgaaatttttttatggcgagtcatattttggggatcctgggaccccaaaacctcatctcaacgtctaaaaccctaacagcagaccattgccatcagttggggccaaaagatggcagtggtcggccatagcttgtgggaagccttggaaggatttttcttgcttattttaggcatatggatgctagaaaactactttgatcacattggttcttggcgaattggttaagagagcacaaccatctttttagccaaaaagatgccagtggtcgcataggagggttatggattcttgggtgacttttctcacttgtatttgatatatggatgttagaaatacactttggccaaagaaactccccatcctatattgtggtcgaccattgccgaaaaggttgtagtggtcggccaagttgtttctatatcacttggtggcttttctctcttggttttgacatgttattgatgaaaaattacttttggtaaaaaatattttccccattcaatgtacatggccgaccactatcactctttgtgccacaaagatggcagtggtccgttgggcttcatcttttgtgggaaatgatttctttaacttgtgttgcacttctgggtgttgatggaacacattttaataagtcccattttgtattgttttttttgagtggcgagagcttccatcttcttgtgacagtgctctaaaaaaagaaggagagcattgccatcttcacgtggcagtggttgcatatgccatattgcgtgaaattcttgtgcaattttgacttcatgttcaagtttaagcatttttatgccttaatgagtaatgttcttgttggtctccttgtcggattgaggtatatagggtgaaaacgctcacgcagacccataaatcttagtttaggcacacttgggtgtgtgagtctcggcaccaaatagttggtcaatatttttgagtctcctagaggtgcaatggggccttcaagtaggatgtcttaacttatttttcatttataagtctagggttgagttgagtgtcttcaaggtactcttagaaagtgggcccttgtgcaagagtagccattttatttttttgtgaaattttgatataacattttctcctaaatttttttgcttgtaagccttcatgtattgcttttgcacttttcctaaggctttcacggaaagcacttctttgtagagtgtatgaatgttacttctcttctagagatatgtgcatgggcacaaccaatgtccttaattgttgtgaagaggtgtgcatgggcatgaccaatgttcttcatttttgtgaagaggtgtccatgggcacgaccaatgtccttggaattatatgtgtggagtttttaaatcacatggcttctccttagaatgtgaggtgagttagctctcacatatcatatggtagttgagtagagttatgtctcttgctcgattttgggacttttcctaggtttaaaactttttgtttaagttttttaattcagagtagagttatatctctttcttgaatttgaaacttttacagagttttgaaatctcttgcttaagttttgatcagggttgagtagagttatatccctttctcaaactcatccttgagtagagttaaatctcttgctcaagttggctggcaagt

SEQ ID NO: 235664 - DNA, 1257 bp, Cannabis indica
ctctggtacgtatgctaaaatccctccactttttattttaatattaatgtgccgcctattggtatagctgggggaattatcttggcgtggaagttttaattttgattttgagtgtatctcttgttctcataaccatatcactggttttgtttattcggatcatccgtcacacccttggctcctctcgtgtgtgtatggcccttcttaccaaaatgctaagaagaagttttggactgagttgatggacattggggataggtttggcgggccctggttgatattgggtgatactaattttgttttaagtgactcggaacgagaagggtcttccggtagggacccctttatcccctttatttctacttgtggattctcgaggccttattaatatgcccattcaaggtgataagatgacttgggataatcatcgttctcgtaggtgccatgtgaaatcggctctcgataaaggattgattaatggagcttggttgaatttgtttcctaaagctatcctttgctcttcccagacttctgaccatagacctctttgccttctctcgagtggtttggagcctaaaattaaaagaagcttcagatttgaataaggatggatgagagatgaaaggagcaaactggtggtcgccaatgcgtgggtttcggtcattcacccttgggccccaacgcgagtctacaagaaaactggagcgactcgtgttgctcttcttaattggaatcgattgcaatatggtaaaattgactcgatcataaaggatctggaacaacaacttgattcgttgtagaggttaccggcgggagtcaaggattggaacatggaacgtgatattcggtgctccctgaatgagactttggccaggaaagcaatttattggaagcaacgggctagaatttcttagctcaaggaaggtgacaagtgttctaaattctttttcctctcggctgttattaaaggaagaagaaatgccattgagagtactttggatcagaacaatgtctagatttctagtcgtgaattaattggtcgtgaattcataaaattcttctcaaggatctttatgaggtctgatgatggaccggagattaattgtagtcagttgtttcaagagaggagctctcaagcggaccaggacgagcttatccagactccctcgcatgatgaaattaggaaaaccctatttgatataagcaatcataaggcgccagggccggacgggatgtcaatgcttttcttcaagcatt

SEQ ID NO: 235665 - DNA, 680 bp, Cannabis indica
aatatctactaaatatctaattcttttacagctaatatacatctaatatctaaaaaatatgaaaacacaaaaactcaaaaacacaaaaacataaacacaaaaactcagaatcagaacttaaaaacaagtgtttttaaaagctgaattaaaagacagtgttattgaaatatgggaacatctgaatgcgtaaaactcaattgaaaaaatggagtaaaacgccagaatctcagttctcagattcgatttgggcaacgtacagcgctaataacactattcaaaaatcaagtgttacagagactctaatttattgccttttgatgaaaattctcagatctaaaaaatcaaaatatgaaaagcctcagagattgccaaagctttgaaagtttgatggtacggacaaatttgtgaaaaccataagcgatcaggttgaataaaaatgtaaacttggaagagattagaggaagatgatgaagaaattggaggcggctaccattgaagagcgagagaaggaatggtttaaggatttgcggtgatgaatacgttatttatagatagtatatgggcccaatgggcctgtaatgtattgatgggaggggtaagttgaaaaataccacttttattaatcaattaattaaatttacctttaattttatatttaattgaaacatacctctttttat

SEQ ID NO: 235666 - DNA, 867 bp, Cannabis indica
atagtggtggcgactccacagcgggtgggggttcgtcttcatcggcaaacaacagcacctgtaacattttctgctcacacacatggccccgatgatacttcttatcacatcgaaagcatattcccttagctcgtttctcttggtattcggactcagacattcggcgcatcgtcggagccctccccgtggtgtttcctggtgcgccatgaggggctgaagaagtgttggtaggagcggctgatatggcgcgactttggaaagaggcagggtactggcaggatggtgttattgggcttaattgtggcttgttaggcttaaccgattgacccgaagtgagtaactggttcccgtcttcgatcctctgagctgcgtccatgatctgagccagtcccataggttggagtatatggagggagcccttaatgttatccttgagtcccttaatgaagctgccttccaagatgtgttcgggtaccccaggtactctagatgctagtgcttcccatcggaggcgatattcacggacagtggtggtttgaatgaccgagagaaattcctccgatacggatccgatcggtgctgcccgaaatcgatgaagcaagagttgcttcaaagtggcccacgagtttatcggcctccgctggttctcccattgaaaccacgttagtgcatcaccatccaaacccacaatggctgtttccaacatcattggttccgttaatcgacaaattaaaaaatacctctcagctctatagacccaaccttctgggttttcgccggagaacacgggaatctccattctaggtggccggtaatctgatcctggaaatgatgcttgctgatacggattgggatgtggtggcggct

SEQ ID NO: 235667 - DNA, 869 bp, Cannabis indica
gttttattttgggcacaaaacccaacagggaccaccgatccggtctcgcattttaataacttcattacaataatgcgagtaagtaatgttacaaaaaatttatgttgtaccttgtttcctacctcgctagttggagcagcatgcagctggttcaacaaatttacgcatcattccattacttcctgggaacagctgtccaaggactttaaaaagcagttccaggccgcaagggataggcgactcgaggcatcctcgcaaaccaacataaagcaacagcggggcgagacacttaaggcatatttaagtcgttttagcatggctgctacaagagatagaaatctggatgatagtacacaccttactgctcttcaggcggggatcactactgatctatccaccgctagggacaaattgtgggacgacttataaggtcgtctagtgaagaacatcactgtgttcaacgagagggctcaggtgttcgtttgaaaagaagaagctcgaaaagagatgaacttgttaaaaactggctcgggaagccaacccccagccatgtttcaacaagtattgtctcaactagagttgataactcagggatttttgcccaatatcgtgttgcaacatcatctataaagcagtagcaaaggtaatttgctcaagattaaggagagttcttctagatcttatagcaaaaaattagggaggaattgttcatgggaggtatatagctcataacatcatggtgtgccaagacttagtgacgctatatggaaggaagaattgcaagccaagtttatggtcaacattgacatgaggaaagtgtaacaccccactagtttaggtgtgttaacgtgatttttaacttaactgtg

SEQ ID NO: 235668 - DNA, 899 bp, Cannabis indica
tccttgtctttttggattgatggttatgagttaaccgccaatataattgagttacaactatctgattttgacataatcctgggaatggattttctatctaagtatggggcaacgatcgactgcaagcggaagatggtgatgtttgaggatgacattgctaacccgacaatgtttttgggtaaggttcaggggatgtgcataccaagaataacacttttaaaagctaaagatctaatgtgcagaggttgtttgggattcctagtcactatggtggatacctgtcaacctttgtcatctggacctgagaatacaagattggtatgcaaatttcttgatgtttttcctaaacatctgctgggattaccaccttcctgagagattgaatttgtgattgaattagttttgggagcagaaactgtatcaaaggcaccataacgaatgactccaatagaattgaaagaattaaagatccaactctaggacttacttaatttgtggttcattagactgagttactctccttggggtgctctagtactatttgtaaagaagaaagacaggtcattgcggatgtgtattgactctcaagaattaaacaagcttactattaagaacaagtatcctctaccccgaattgacaacctatttgatcaattgaagggaaagacgatcttttctaagatttatcttcgcccaggttaccatcaactgagaattcgagaggaagatatcctgaaaactgtgttccgtactcggtatggacattatgagtttctggtgatgtcttttggactcactaatgccccagcggcatttatggaccttatgaatcggttgttcaaggattacctagacagatgtgtgattgtgtttattgatgatattttggtttattctga

SEQ ID NO: 235669 - DNA, 561 bp, Cannabis indica
cttcttgatgccgaaacaagtagtacacatgtgcatcctttttaaaaagtgcattgtaaaatcaccctactttaaactattattttttttgataatttactaataatcttatctacaatttatacaataatgaaaaacagaaaaaaaatacttctaaatactgaacaaaataaagaatgtgccaacaaaataactcttcatagtactattttcaagtatgtgatgtgtgtgccctaaatatttctctacatctataaataaatattcaccttttcatattttttttagttatcatcgctccttacttaacatgaataaaaaaactataatataaataaattggaactcttaaatttcattttctttttgtaagacttacaatataatatttaaaggcaatcattttatttattaggataaattaaaaaggaaaatgatatttgtacattttcttacatttttcatatttttattaaaaaaaaaaaagaaaagcaaaatgtatcaaaaattaatatctggtgtttattcatttattcataaacgtatcaacatctatacaat

SEQ ID NO: 235670 - DNA, 912 bp, Cannabis indica
gttgtattcactacacaaaggttcaaatcaaaagataccttgtttatgctcaattttattgtttagattactgctcaaatattttatgaaaatttaagtgagggattgttggaacttcttctcaatagttaatgaattttgacaaaatgagagagtgtcctagtgtgtataatagaatgagtttcacatagaatatgagcatttgtttacaaaagtatataaagtacaactatgacacttgaaatagggtcacaagaggtacttagttttgtgcgaatgagagaggacacgcacacttgacccaccacacacgcgtgcgcagtccgtctgactgtgccgggctatctagtgtggtgtgacacattattttttagagaaaaattatttattaaattattatttttattcaattaattaaaatttctttcttattttcagcatcattcccacgattccacttcacatgatcaacatatttctttccgtcactaatacatctttctcacactggaaaaattatatatatacagtttattatttataattatattatataagtagttcgagtagtagtttttgggtgtagtgtttcgacggttctttatcgtacagtagagctctaacatagggtattttgaatgggttgttttatcttggcgacgaccgacaattttcgattacttgcacatagttggatatttttgcgattgctttaaataaagcaacctaattcacgattcaactcaaaaaatttatttggaaatatcgtccttgttttatttttagtagtagtttaatcaataatataatattatatgtattattattataactacgcatgtactatatatgcaatggccgtgtccatatatatatatatatgttgtttttttttttttttttccgttttaa

SEQ ID NO: 235671 - DNA, 867 bp, Cannabis indica
tgatctttattttgtgcatgaaatgttctccaaaaactggttcatgtcaaacatgttccagcaattaaccaacttgcagatggtctcacaaaagtaatctgtagtcaacattttctcctatttcgatccaagcttacaattcaagatctcactactacaacaaatgactcgaattgtaaccttgacgggccgtgttaagggtatgtggttttgttatgtctattagtgatagttgtaacatttattctatcacaagactttcttaggattagtttgtttctatttgtaactaattctcttccaactctctctagcttgctttgtattcagtcactatataaaccatgcacgattaacacttaatcaacgatattgctctttgttttaacaatcttcttttactttctttctgtttttctttcttcctctcttgcctttcttcttgctctgttttccctgttactgtattcgaacatggccaagagattcaacatggtattagagccttttcctccattgtcagcaaatatggcaagcacaagaattagcaaaaatggcaatcagaccaattccaacaccagcaaacctcagaatcaacagaatggagcctttactttcaatcaaccaagaaataactcagatgagcccagtctaatgtatttcaatcataacatgttgattaaggttcaaatttgtacaatttttagcctttatttatgaatatataattaatataaatcaagtattccatggtttaataataatttatgttagttggaaagtatttactttattttaatttttgttgttatttttctagatttggagtcaaaaagatataaatgaaatattggcattcttgaaaag

SEQ ID NO: 235672 - DNA, 1860 bp, Cannabis indica
ttttgcttacttctttttcttattttttaaaatttgattattttatcttaattttaaatctaaggtcagatattaaatttattataaaatattctattttaagtaatttgaccttaggtgtgtaatagataatataagggggtgatgaaaataaagtgcccatttaggggtctgtagcagttatgcattttaactaactttttggtttttaactacctatttttcaaattctttttccctccctcgttccctgatcaatctaactgcctcctgggttcatgttcattgctttcctcctcatactacacctcactccccagttcttgtccctattttcgtgatccctgcttctccctttgtatcttagttgtacaatggatccactcatgaatgaaactcacaatactttatctttaactgaagaggaaggatcagttttcacctccctgaagaggttgctgcgtctcatacttctcactctagccacatgctcatttctcgggttctcactgattcatatgatcataacccatctttcattgatcaaatgtctggactttggaaaggccggttccctgctgtgatttctgcctatggtgaagatatgttcaaggtttcttttggttgtgcaggggataagtttcgggttatgaataaagaaccttggcactttcaaaatcatctcatagtgatgcacactccaagtgctctgcaaaatgtctcaatcactgatttgttgtctacgccattctgggtgcaagtatatcgcctaccctttttaagtaagtccaaggcccttgccaaagctttaggaaatttaattggtgaatatgtagatgtccatgaggactctctcgatgaaggttggggaccttttcttcgaattcgggtgaaacttatgatcaacaagcctcttcctcgtggcagaatgataagccttcctaaggtgcgagatgagttttggatagactttcgatatgagcgcttgccagaattttgttttgagtgtggcattctcggacatccttttgagaagtgtattaaattcatggaacgtatggataatggcaatgacgatgatcttccttatggtccttggatgaagggatcgaaacttccttccacgggttatgataagtatcgcaccgatttttcaaagggaaatgcctggccattattaacccgtcttgcccgtaccactctcacatccacaatcccccgtttgaacaacattggcccccctcagcccccatatcttactgctgcagaatcgctctctgccccaatcattccccaaacaccacttagtcaccccactaccatttcttctcattcaactatccctctatctacactaaacaccacattgcctccaccttccactatcctacactctaacaagtccccaccaatcccaattacttccccaattacttcccaacatcgacctgcatctgatatgcaacaccaccaacactttgttacttcttcaccaactgttcccccaccaacttcatcaactcactttgatatgaaaactgataacagcctctttgtcaccaatttgcctggaatatttacacctgacattggatctgcttcaaggcctttccttcccattgccacttatccaccaactttaacaccatcaccatttaaatctgcctccttctctgctgttcacactgcaattccaccgtcagtatccacctcttctattgttatcgctgcttcgaataaagaaaattacccgactacacccgtggccaagagacaaaatgacactctctctatgaggcaatttcttaaaagatgccgtaaccacaatgcttcctcttttcttgtgggtgaaaactcaag

SEQ ID NO: 235673 - DNA, 1010 bp, Cannabis indica
tgcatacttggttgaagctcacagagattcagacctggaaaaaatcctttgcctcatgtggagtatatggacagagagaaacaaagaaattcacggcacgcgtcctaaacctgcacctaatattctcatctttgttgattcttatgttgatcaatttagaaaagcaaaacactgtgctacaaaccagaaagatcaggctgtttgcaccagcagtactacatcagctgcgacttcatctcttacttctaactctgctactccattaaaatggctcccaccgctccaggtttctacactcttaatgtggatgatgcgtataatgaggaagctgcaattattggtattggagcgatatttagagattatgcaggagatgtgattgctgccttttcgagatctttgaagggttgttattcaatcaaagaaatggaagccaatgccattattcacagtttacaatgggcttttgctaaccaattgcctattcactatattgaaacagactccttacttgtggcaaatgcaatcaacaatgcttcttctaagatttgtgtttctcatttttaagatttaatagatgacatttcacttttattatccttctttcttagagtaaaagtttcccatgttaaacgagatgctaaccaagccgctcatggcttagctcgctttgctcttcgattggataatgattgtacatggttggggaaaatctcttctccaatctactctgttgttgtttttgattccattcaataataatagcagtgtttttacaaaaaaaaaaaaaaaaattaatgaactatctatattttttattattttaaataataaaattaataataaagttattaattgtttatatttttaataaaatcattaaattttgtatcaagttttccaattatacattaaagcacaatgtttacaattgatgcaaatatatcgtaaaattatttttgtggtaaatataacatgaaaatggtttatatataaatatatatatatat

SEQ ID NO: 235674 - DNA, 817 bp, Cannabis indica
acaaaacactgagggtgttcattatggggatttagtaacttctgagaatgaaaatatcaaatgcaaccaaactaaatttattttaaatgacttgaaagtatgtatctttaagtggatcccatttttagttctatttgaagaaaatcttgaacccttcaacactaagttccacattaccttaatctaaatcctcttacctctaatcccaccaaacttgagttccacattaccttagtctagagtactcttaccgctctacttaccaaatccagcccccaaaccaaacaccccgtatgtttaataggaaggaggggttgattacttggaaaggaaatagtcctttatttttcttccgagtgtttggcaatgtagtaagaggtgaaaatcaagcttttgtttggtaggaaggaaagtggatatatgtgaaatgataaattaatcacttgaaaagtaagcaaatctctcctaaatccatcaaatttaaaggtattccaaatttaataagattttacagtctattacctaatcccttcccatataagatccttccaccaaacaaattattcaatcacaaatccttccatagctccacctccctatctttccaatcctttctatcaagcagagtctacattgtgtaaatagcaatgatgagctatcatcatgcaatttattaatcttactgtatctttgattttaacttattattttgaccttaatttcttctgacgtaaatgaaaaatgaccaaaataaatctaaacatgtgaaaatgaaataaatcaaccaatttcaccagcattaccatgcatatcaaat

SEQ ID NO: 235675 - DNA, 761 bp, Cannabis indica
cggatttgattggattggatcgtgcagattagattggatcaaatacttagtgaacaccccaaaaattgaggcaacaagaaatccaactaagcattgtgggagtttctattttcctttagaatttctcatttttgtctaaaaaaaacttgaagaacaccaaaattgcaaaaaaatgaagatctctcaatatttttcctgaaaaataaaaataaacaaaaaccaagcataaatctgcataataaaataataaaaagactaaaatacacagtaaatttggaatctaaaaatgcataaaaataaacctaatattttctcatatttatacgcatcttaatttttatttgagaaaattttaaaagactagaataaacataaggtttggggtttatttgcttaagtacattgccaaataatgtacattgttatgcaatgtatcgtaatacatagaagataatactcgtcatataatgagaacataccgctataattcatatgtttattatgtaatgtgaaatattgggtttaagttgtaaatctaaatactaaccaagtgggacaatattaaaatatttctacatttattattagaatatttctaatattggtacgaaattattttaagagattttgctttatctcgctgactatttgttgacagtatataatcacaaatcaaaaggttataagaatgaatattttaagtatggccaccttaccatgtactaattaatctatttcttgatttgattttttaaattaat

SEQ ID NO: 235676 - DNA, 1342 bp, Cannabis indica
gtagatacttattatcatatttttgttattaatcttggcaggaacttgaagacaaaaaattgaagggtgctttaattagagaggatcatgattttactaatgaggttgttgatgccgcttattctggttttagtggagtaatgaaatttcttcaaaaatccaaaggagaaggaactcaagtatgttttaataatttataattgtttcactcttttatttatagtttttgttgtcttatgttttcttgttatttccaaattactaaaaataaagaaccacatacaccttttgttgttgtttcccctgatttgaagagcacaactgaaaaggccatattgtctactgagaatatggctgatttagagaaaagggagcccaaaccttctgcgatctttcaatcttttgttactgattttggttcattagaacatgtaccagcagtgaaaaggaagaaaaatactttagagattgtgaagggaaccattccctttcataaggagaatgggaagaatgctactactgaagaaacacatgcatataacgactgggattttgagggttataaacctaacactaagtcagtattctctttcttcttttatttgttttttttttttaaaaaaaaattcactacataatgttatgaattattcacatttctataattaatgtatttttgtttttcgattgtagaaataagttcgtggctgacgctaatgacattgattttaattttgggatcatgcacatcaaaaagaaatattggtttcaccaacttcagacttgaggtcaatttttgtctgattctataagtatattgttttgtcagttcaagaccaaattacattattatttattttatagtttgattgaaagtaacctattacttttaatttctttaatttatgccttttatttttcaatttgttataaattacgtggttaattgattatcctctctttttaattgcagcatatcgatgttattatgtattatcttaggaaaaagatcatgcacagtggtaccatcaatatattggttacgactactgattcaattttctataaagttgttagaactacttatgagagttacttagctaacggtagcaatgtgatcaaccaggaaagcattattgcaaaatacatgtctggacaatcattatcatgtagtgttccatggtattaccttgatcatgttgcgattccagctcatgttacagaggaagtgcattatattcttgcacatttcaatattagagagaggagcttggtggtgtataattctatgactttgaaagtgaataaggaacctgttcataaaactgttacgacattctct

SEQ ID NO: 235677 - DNA, 695 bp, Cannabis indica
ctagcttttcctaaagagcttttcgagtctctaagcacttgctgccatatactgcagtgacaaagaaggtgctcttttgcccaaaaaaccttactttggatgaatcaactagctatctttatcaatgacattaacatgaacaaaacttttctgccagagcaccagaattcttcaagcaatttcatcactagaatagaaattccaattaagaaaattattctccatactatcaccaactttatcctgtttaatctttatttcaaataaagttgggaaactaattttattcaatctaaaaacatcaagaatagctagttgcttatcctttttattcatacctctcacattctatccgaacatattacaagcatccataaaaaaaaaaaaaaaagattagagttaggattcaaaacctcatcaagagcagcaacctgtagcattccatagccattaatcttattcgaaataataggatcctctagaattttaggagcttcattctgtctcagtcctctccttttgggggtaatccattaacaatcattatcaactttatcaaaaccatcaacccttgcttgcttcaaaattaaattcgaatctttagcttcagctctagtatatatccatattttcccctagcacattgtgttggaatttattttaccaggatcttagatctactcacaagtatattg

SEQ ID NO: 235678 - DNA, 4120 bp, Cannabis indica
ggagctactgggaggatggtatgttttcttaatgaaaatacattgtatattgtgtttggtagaatgagaagtggactcaagaggaggggtaagagaattagtggatgaattttgggtatgtggttgtttggtacgaatcatgaattttatgattctttctatggctttgtacatgaagcattaatgacaactaattcacttcaatgtgaagcgcttgagtgataattattcccatttagttgtttacttaaattttagaatgggaaactggaaacatggtgagcctcacatgtcagaggaaataatctcagtagcactgtttcttaagcattcttttatcgttttaatacttattaggataaattagtaaattcaacacattccaattctttcttctagttcaaccaaacacactattgaagtttttataacttttatttgcaatcgataaaaattatgtaatgaagccaatgaagtaataatttaatttgtcattaattcttattcagtttattccgattacaattgcggttagtaaacataccttaatggagtcctaaggcaggttttgggaattgggtgagattatgtggcttttctagcaatgttgatggcgtcatggccagcattgctagtttatggaatcctagtaagtggagactacttgcttgtgaatcttgtcgttggtatatttgtatttacactaaaagaatcaataaagagttttgtttggaacctgcaacccatcaattatattaatgaaaagtgtattgtgttctctatcttcagctataaccttaaaaatgttctttatattttagtccagcatgtattgaaattgaatagctgcctattttcgtagcctttgacttgtagaatgttcttttgtgagagtgctaactgactttgggtggcatttacagtgaggatagctctcttctgtcgttttgtttttgttttgttttgtttgtgcttgtcgtgaatatttctatccagaacatccttgaccacagaattatttcttacattctcaggttaaggggcctgatgacgagcaaattcatgacatacgtgacaaagcaagtgaaaagtttgagtttgtggttcaaaagaaaggcctttatcgcttttgcttcactaacaagtccccttatcaagaaacaattgactttgatgtacatgttggtcactttgcatattatgaccagcatgctaaagatggtaagatgtcatttttgttctgtcaattcctgttttatatccacattcattatagtcggcgcaccaacatatgttttaatgaatgtgtgcagagcatttttcccccttgctggaacaaatagcaaaattggaggaatccctttacaatatccagtttgaacaacactggttagaggcacaaactgaccgtcaggcaataggtactatttgttactttatctctttcttgaaccaggctttagctctaaatggacagctctgcattagatatagtgactttccatatcaatcctgtgcagtttctgagtattgatcactgtttccatctatttgttgaaagcgattacataaaaagattgctgatctcagaaatgtctcatagttccctacaacccatttgtttaagatattataactcgacagatttggagctgcataattcctcttagataaaagtgacaaagtgtagccttgatttggaccgtagactagacatgattccaaagaaacatttcttgtgacagtagcgagtgtccatagcactccacaaaattcaaatggctagtgtgttaaacttgctttgaggtttagtcaattcaaactagcatgaatgagtttagtttatgtatttttatcagttctatatgaccatgcttagagttagagatttgtagcattagttgtttagtgcattatcatttttggatcgtaactaacatcaaaaatacacagtgaatgatgcaatgagtcggagaacagtgcacaaggcaatgtttgaatcagcagcacttgtcggagcttgcaccctccaagtctaccttttgcagcgcttgtttgagaagaaacttggaacatccagagtttaggatttgttagagatgccctttgatcacttttgcttactgtaacatcatcacacaacagcatatctatttatggtaacattacaaaatggaaatcttagcatttgattctcttattaattattccttcttacaatattgtgtcagcctgtggaagctctttgccatctactataacatagattttgtttttgaatcagtccatacatatacaaagaaaaaattgttacaggccatcatatcatgtttgttagtacttgagcaaagtagcgttttcttcccgaataaacagtcgtatttttctctcttcagttttcttattaattatttttaaaaaatggttaccattattaggggagagatataggggggcgagtgcgaccctcatcggcctcgtgtctcatggatgtttaagaaatcatagataatatcttccatttctaacttgaagcaaaatagcttttttttttttccttctcttctataccatctccaatatgtaaatattatactaaagttggcacaaaaatcaataaatattatatttagcacaacatttgtaaccctactctaatatacaataatatatgacattttaagaggcaaagaaaaagtaaaatattattaattattatcaataaattaaatatttaaaaattattaataataatattacaaattaaatatatgctttaaatacatcgttaatgattagtaacaaaagtataattgaaaaagtaaatgtgtatcaaatttagcataaagttatattgtgtgtcaaatttagcataaagttgtttagttgttgttgttgtgttgttgtcaggttgctgcacagttcagtgtcctaagtgattttcacttacactgtcatattgttgcacaccattgcttgagtagttacctaaaaggattgttattttatttttctgtgtagttgaatgtattcacaaccaataaatatcatgtgaaatcagttttctttgttaataactttatgtaaaataacaaacttttatcatccttgatttagagtggttggcaactttccttcagttggtatttcaattgtatttgagttgtttagggttgtagtctaattcctgcaatattatctgcactaattcaacataagtgtaatctcttgatattaattctccacttattcgtaattaacatagtgcttgatgtcattctaatgatcattgctctgtactaatacttgcagatgttccatatataccttgaaatttttttatatttgttacgagtatcagtatttttaaacaactattttaatccataaaaataacgtataaacaacttttctagacaacaaacaacaaatgaccttaaatacaccagtagttgttcaattgtaaattaattgcatcaatttcttcagatcaaccaatttaccttatgaattatgcttgatatgattgacaaacactaaataacaacctaattatgaaaaaaaaaatactaaaaatattggtaccttgtatttttttttttcaaattcttttaaattatatttgggtatgcttcgattctccttgttttgtgttgttatcaaattatctgcacaatataattcgagttattgtttttgggttgtttttatgtattttcgacttaatggatgtagaaatatctgttttcctccttttttctagtttacctttttatttttggatttgtcggggttaatcattttgttgttgagatctattttgtgaccttgttattatacagctttgatattttttttggagttgaaatcgtgctatagttgagaagaaaaatggaggagagaatgctttggtgtagctgggaacgaatgaggaagaaaatacggactgttcagtccgtattatttaaaaaaaaaaactttgaatttactttgttgtttaattttccttacaaagctaaaaatataaaatttggacctaaaatattcattatagaaaaaaacccaaaaagttttttctcaagataattttttcataatgttaataatatctacaaattaa

SEQ ID NO: 235679 - DNA, 651 bp, Cannabis indica
gtcaccttggagaacatcgggaaccactcgtgtatattcagtaaaattaccaagagaaattctccatggtcaaagaatgaactaaggataactatcacatcattcaagcatctcaaaatatgcctaacgcccaagaaaccaagtcttgggtgcccatgttgacgtttatgtcaacctgggcaccccaaagtcaggttgttctcacagtttttcctagaatgcacactgcttagtaaaatgaccatgactctctcaatttttatccaaatgacacgattctagtgaaaaattaaagctattttgaaggcgcatctaagtgtctcacattgccccgcaattctgaagtttcaatcctcaaaatgaacttgtgagctatttccaagcaaattttatgcgaatttccctgttattttattgcaatttaattaatcctccttccatataaaaggagagtttccctaactcatttttcacactttactttttttttttccaatgttagagcttctctctctagaaattgtgaagcgaagctagacttagtcattttttcctgagttctatggtaagacaattaggttttagtgacaatgaaaactctaagtagatgtagcttcattaccttcgtgataaggggaataaactactata

SEQ ID NO: 235680 - DNA, 1612 bp, Cannabis indica
ctgatcatatataaataatctttgaaattcaataaaaaatcgatggagagcattgtctgcccttaatattgctctgtggcagttagtctgttatcttctttttaactacttttcctgttctttcttctatctttgtttgaatttaactgttcccgcctgcatctttttaaaaaaaaaacaaaaccaaaagcaaaaaaacttctctgttactggttccaatcatggaaaacttcatccctaccatgtctgatgctctgtcaatccgagaaagggaagtgattaatctttccaacctcaacatccctcccccacggcctgctgtcaaccgtctgctatgcaggatatattccaaaaagggatataaccccaagactttcaagaacttcatcactaagcaatgggtgggccggtttgctgtgtccatctctgactatgatgctgaatcagattcctacacaattacctttggttgtgaaggtgatctcaagagaatattgtctaaagaaccctggcacttccacaaccagcatatgattttatgcctcccaagtgctctgcaaaatgcttctatggaatcatacactatcactccattctggatccaagtctttcggttgcctttcctaagtaaatctgaatcccttgctaaaattctaggcaacatgattggcacatttcttgaagtccatgaagactcacttaatgaaggttgggggccttttcttcgaatgcgtgtcgaaatagatgtttctaaacccctgctgcgtggtcaatttgtcacatttccttggatggctgatgaactttggatagattaccgctatgagagactacttgatttttgttatgaatgtggaatcattggacatgtttttgacaagtacccgctgttcttagagaagattgatgacggtattgaaccaagtttgctttatggtccttggatggaaggttctcctcttccaaggtctagttatgatcgttataggcaggatttttcaaaagagggtccttggccattcctcacaagacttgctcgaaacacaatcaagccgattctttcacaatcaagacccctccctgctgtcccagtgaatgttactaacgctgagaaagggaagcaagttttggactcctctctaatcattgaatccaataacaaaaatttacactccttgcagatcaattgcctctcttctcaatttccaaaggatcccacttccaaaggccaagcatctacatcaggatctaaggaaattaacatggataagctcatcaatattcattgtaatactccccctgtcaccacattttcaaaagaaaattgtccaccatttaacactaccagcccctcttccacaacaacttatcctgttaatagttctcagaattcaacatctttacccattgccacttatccacccactaccactccacttttgcaaaaacttgtagccatatctatgcccattccaccagcgtacatacatgtttctgcaccagaattttcttctcctctgcaatccacctccacggctgttactatttctgctgctgactctctactgtgcactgagaatcgaatgaactctctcttctccaaacgacagct

SEQ ID NO: 235681 - DNA, 1006 bp, Cannabis indica
cctctcaacagctgggggcgagcagtgggatgactcgcaaggttgcctggtaatgaattcaataagagagcgcaagtctttgtgcagaaagaggaagcaagaaatgagatgaaattgttgaagattggctcgagaaacaaacccagcattgccaaagcaagcactgtctcgataaaggctgacaattcaggtggttctaacaccaagagaaaagatgactccagggaatcatctaaaaataagaagaaacagaaaaggcacgataagtatgtgccaatttacattgtttataccgagcttaataaaactcgggaaaacatctttcttgcaaatgagcacagggttgcattccacaaacctgagcctatgagacatgcaagacacaaacgcgacccgaatagactttttcaatttcataaagacattgggcatatgactaaagagtgtcagcaactaaaagataagatagaaagcttaattgctcgtggatactttggacaatatgtgaagtgccaaggaaatgaacaaaacaaacctattcagcccaacaacctagataaccaaagaatgcaacctccccctattgagggcgacgatatattggtcatcttgcgaaggccacatctcgctagagaaagtagtaatgcccaaaagcgatatgtcaatgaagtcaaaaataatcaatcgttgcttgcaccaaaaccactaaagaaagcaaaaatagaagaacctccaatagtattctcagaggaagatacaaaacacgtgagatatccacacgtcgatcctctagtgattacaataaaactcacaaacaaaaggataaaaagagtgttggtggataatggaagctcggtaaacatcctttaccgggatacgttaaagaagatgggactacaaaatgcaaagttaaaaccttgtatggtgaacttatgtggatttactggagatagtgtcgccagtcaaggcattattgaactcccattaactataggcgagccaccat

SEQ ID NO: 235682 - DNA, 760 bp, Cannabis indica
gatccgacacatgtgcttaaatacgagaacttgaacttgcagcaggatatgagttatatggcacggcctgtgcacgtgatagaaaaaagaataaaggtcttacaaaataagactatacccttagtcaaaatcttatggagtgatagttctgatagagaagcgacatgagagttggagaaggacatgcagaatcagtaccccaagttattctcaagtaagtaaatttcgaggacgaaattcctttaaggagggtagattgtaataaccaaaatattcagttattattttcctattatgctagtctataaatcttgatgtggaaatagtaattgcatggaataagttagcttttagagcatagtagtatttttttttaattaaataagatttgtgttagtctagaaaataacaagaatatgagtattagtagaatggaaatattattggactttcattaattattatgggttttgaattaggttctttatggattagacttagaaaattatgagtaattttagttatcatatttaattaatgaagtgatgacaaattttctatgtaaatagtactttaaattaatatatgtgacatcaagagagagagagtttcactctatcttggacgtgtggcttgtgggttataatttagaggtaagatattgaaatttgaattatgatggtagatatttagttagctatatacacatgaatgtatgttgtatgtatgttgtgattagtgagattaagtcaattataag

SEQ ID NO: 235683 - DNA, 1199 bp, Cannabis indica
acagccacttaggatcgaggatagggaattgagtactgacctatgtgggtcatagttaacaggcttacaaagtcagtgcactttttacctgttcagacgaacttctccattgatcagtatgctgaactttatgttagagaaatagtttgtcttcatggtgtccccaagtccattgtttctgatagggaaccaaagttcacatcaagattctaggagagtctacatcgagccatgggtactcaattgaaattcagcacagtatttcatcctcagacggatggacagtccgagaggaccattcagattttagaggacatgctatgggcatgtgtgttagactttgaaggatcatgggtaaagtaccttcccctgatcaaattctcatacaacaacagttatcaggcgacaatcgtgatggctccttatgaacttttatatggaagaaaatgtagaacacctattcactggggatgaagtgggtgaaagaaagttcttaggtcctaaagatattcagagaacaagtgaggaagttgataaaatcaagtgtgagtgctcgcggctcacagtagacaaaagagttatgcagatccaaagcgtcgggatattgatttttagatcggggatatggtatttcttcgagtatcacctatgaagggcattaaacgctttggtaagaaagggaaagttagcctgaggttcattggaccttttgagatcctttagaggatagggcaagtagcgtacaggttggctatgcctccagccctggcagctctacatgatgtgttccacattttgatgcttcagaattatgtctcagacccgtcccatattcagagttatgaagcattggaacttcagccagatttatcatacaaggaacacccagtgcaagtacttgatagaagagaaaaggtcttgagaaacaagacaattgcactgataaaagtattatggagaaatagtaaagtagaggaggcaacttaggaactcgagatggatatgcagcagaaatatccagagttcttcaagtaaattttaggatgaaatttctgtaaagaggggataattgtaataccttaagattaagacaacagattagcgaaccctaactagttaaatatgtattaatatagaattatatcattatataatttattatatgtgaattaatcagataaatgacatgttaagacccc

SEQ ID NO: 235684 - DNA, 923 bp, Cannabis indica
tttttttttaatttttttaatagtagtattcgttgtaacttcgttatagttataatatcatccctgtaaatttttaaaaaattttaaatagtttacagtaccgaaaatagtgtttctgatattccaatttaccacgctctttcaaaaaaacttcaaatgtactttcagcatcagacatgcctgatgctgtaagcataactaacacccgtgaaaaaaaatattccgacatatgttttcagacataaaagttgactaagagattataataagagatttacgttaatactcctctatttataaaacatacatattctatttataaaacatacatataaaaggttaaaactaaaataaataaataaataaaataataataataaaacttttcacctgtatcgcagttctggagatcaagaaacgcgcaacaagcaaaaaggagggatttaattttatattgttgctgttcaaaaatatgaatgtacagaaagagagagaggttgattgaagatgaagttaatgcaccacaaaattagggctatgagatttttaggccttttcgaagggaataaagaatagaggaataaaacaataaaaatgggattttattagtcgatttcatttcttgaaggccaagactcacattttttttaagatacatttatggtaataggaaattaggaagccttcatattaaattgtaattactcttaacaagtagtgtaatcccattttttccttatagctttgaaaactattctatatttggtctaaaaaatatattcacacatctattttctatgtgtgacaaaaatattccatatctcttcacaataactgcacagcaattaattgaaagtattttagaagagtaaataagaattttctctttttttcttaacctttgattgtgcatggaatttcat

SEQ ID NO: 235685 - DNA, 1236 bp, Cannabis indica
ctctcccacatctgttattcctgtcgagacttttgacaggatactagccagtggactattgagaggtgtccagtgtgagatactcacgagggatcatagagcacactggcttgccatcggttggatggcatggtcggagtgccatattcaggagggggttgatgttgctgttgcacccataattttgagatattgctacttactttggaatgtgttgaacacaaatcaccccaaaaagtataaaatacttatcaccgatgtttgttctatatgcagagctaggctggcctcagcctactttgtatgagattggatactactttaatctaaaatatgctctaaaacaaaatcggacgaggtatttctacttcagtcaggttggccatcagtagttgggtgacaccaacagaacgcctatgtcaaaagttggtggagatgcccgaaactacttaatttcctaagatatccatgagattcgacatcacttcttctagcaagtgccgacatacaagcgctccatccttactctgtagatgagggatagggcgaatcacatcctatccctccccgtggtgaagaggaacataatcaggttggccagtgtggccaactttcagaagtacggcttgtatcctcttgcttttagagttatgggggctgagggcccatcagttggtgtggatggagccccagctactgaggaggtttgtcctggtggtggacatggacatggatgaccgtgtgcctctgtcccgaatagcctggggtctagaaaagagagagagggccctctgccagtgcttggcttgcatgggcacagttggggatgccactctttggattaggcttggaggacaaagctctgcagggcctacttaccccttgcctgcatctagaggcaagggcaaggcagtcgttgaggattcaaatgattcttcttttgaggatgatggtatttgatagttgattgcaccatcttttatattcttattttgcattgaacatttgtaacttgtattctgactttgttactttctccttgtagatatgtcttccatgttgagaggtctagctagtggaccttcaaaggagcctttgggtcgtccaagggccaaggtagctcaaaccacccgtgtggagatgtcgcggggtcatttcttcctcctcctcttctaggatctgtgccgactaggcagcccatgatggatgaccctccagtgaggagggaacggcctt

SEQ ID NO: 235686 - DNA, 914 bp, Cannabis indica
gaacatcaagccgaatttatcataagaagagcaaccagttcagatttcagacagaaaagataaggtcctttggaacaagaccatagctttggtaaaggtactctaaaggaacaatgaggtggaggaagccacttaggagttggagttcgacatgagggcttaatatccagagttgttcaggttagattttgaggtcagaatccttttaatgggggatacttgtgaagaccacttaattttagcatgagaattagctaagtaattaggatttaattcaaaaatagacatttaattataatttatgaatttatggtaatatatttgaattctaggtgtgctatctatttatatataaaattttatatttttcataatttatgcccattaacagtggaacacaatgttcggccaatagtgtcactttttttatggtttagtaattttagtaatagtaaggaaacttagatagacattgtgaatgtcgcgaatattcgaggtattaggttcgaccaaaatgcccctaggaggtaatgatactttttggcttaggcaagggcaaattaatcttttcccataagattttatttgtccttcagtgatttataattgaattagttaatctgaaattaagttaatgaaatattggataaacattaggttttatcttttttatttaaaataaaaaattagaaaaaaaaatactttctctctctcccttcaactctctcgacctctcaagaaaccaacaacaatttaaggtttttttagttcaattcagggtattctagcaagttcttagtgattcaatccaaggtaaacatcatagctcccttctgtttgttttcttaagttcaaagttaagttctatgcatagtttttggagttagggtctgtaagtttgaattgttgttgtt

SEQ ID NO: 235687 - DNA, 1751 bp, Cannabis indica
cacatcaacgagtcctttaaatctgatatttttccaggattactacattcggtaataactttgagatgtttccaattaagcaatggagaacgacatacccttttcaacttttatggccaaatgagagcctccatggaaacatataaacacatatcactttagagtgaatagaataacaatacgacattgaaacaaggctacaaaatcaaataaaaataaaaacataatacaagttacctcatattccacaacatgtaggctaatagtattccaagagcaattgagattcaaaagaaaattcaacatatcagtaaaccaggccgcatcatagcgatcatccacatactcagcctccccctcaagtatcacaatttttccactcaaggaaatagatggctctattgatatgcttagatccatatgaccttcgtaacaaaagtatgctaatttcggggctgattcaatcgtaatattgcacggtccaaagtaagaactcgtaaaattgaaacttttcaactctttacccgagattttgagatggttctcatgtaaatgatggaagatcaaagtcaaattctcaagaagaggattattagcaagaagagtgtgtaacaatggctcgaattcatcactagtatcatctaacaagagatttctaattttcttgcaagcagagaaatttatattgcaaaccgaagcaccccttagtactaaagattcaagatttatggcctcaacttttatgtcatcaacatttattgtatgttccaattccaagaacttaaggctcaagcttcccagtcgaagcttaccatcaatatgcaagaattcatatctacataactgcaatttctcaagagaatgacaacccaacaaaaacttaactaccacatcctcctttgcagtatgggaaagccaaacatattccaatgacaaagtttttagtgatgggaaattaaatgaatgagaagtattcaatcctactccacacaactccaaaatagtcaaatatgttgcattgacaagtattttgggtaagcagtagcaacaacctccattgtctttgtctctgcctatgctaagatttatttccttaactttattctcaactgcaaaagctaaccatttatctacaatcccagccttactttttttatagtaaccaaacatttcaagcttaaaactagttgaaattgaattttctataaaatacatacctttcttacggtgttccaaatatttttcaacataaatgtagaacttttctgggtcctgttgccattccaaatactgtgcggtgtccattctactacagagaccagtcatggagaaaaagattgtggggactgaataccagataaacttccaacgctttgaaagaacgcatgtcggaaccacgttttcagttttgagaaaggataggatgtgaacgatcactgaattagggagtttcgaaattctgtcttcaccatcatttccatccaccattgttgatgatgatgatgattgtcttttacgccttttgctcaagttcatattatcattatccataatgagctgaaatcgacccaaattggattgtgaactgtaatggcaaagatgaatataagtatgagaaatatatcaatcgattaatttcatatacataaaagaaagaagtagaagtagaataagaacaccagaccttcaaactgagaaggattgagatttagggtttcttaattaagtgtctcatataacttaacaaaata

SEQ ID NO: 235688 - DNA, 1149 bp, Cannabis indica
aaatgcaaatttttttagaaattggatagaatttgaaggaaactcgatgcacaactcgacggggccttaaaaatcaagattttcataaaaaaaaattgttcaatgaagctccataggtagtcgatagtgtgctcaatgcaatactataaaattagcctttagaggcggttattttagttgagtaatataaaaagggtagccaaagtcttttggtctcatgaaaaagcctatggagtaagttatttcatgtcgattattataaaataacagactccattgagaacacgtgtatttttgaagggcctacggagtcagttattatgtaataactggctccataggggacacgtgtatgtgtgctcctatagaatcgattattacataataaccgactccatagggcattaaaatccttcaacaaaccctaatgaatcacttcatctcctccaacattcatctcctcccaaaatacccaattgaaaccctcaccaaccaccgccaaattagccccaaattcccatttctccaccatttttttttttgttgcaaaatttatcattttcaacagccaaaatgatattactatattagaataataatatttagtcttgtaagcgcaaagtgagtgtgttggtgcggttgtgttggttgtagctccggcaacaggattttagacataaaaacgttgaatctcaacgtttattaaggtaaaaatttgatctttaataattttattaaggtgcaatgcattattttttattttgtaaattttattatggtttttcttgttaagattgtgagtcctttggggttgcagtggttgccggattaattgtcggtattggtggcggatttcggtaataaggtaaaaatctaatctttaatagttttattataattttttttggattggaatgatttttttattagtggttgtgttttttatactaatagtttttctacaaatttattatttttctttaatattaatatgttaaatattgtaattggaagatgaaaagtaaaatagagaacgatataggagagtattaaaacaaattttagaaattagattctaaaaaatatgttagtgagatataatttattataaatgtatagataatttttttttttcaaaatagatgtaaa

SEQ ID NO: 235689 - DNA, 529 bp, Cannabis indica
ttctttttttttttttctaatatgtgttactttattgttatatatactttatacttagttagttattttatatatttttcttctttgaaatatttctcttatgtattgatacttataagtatttttcattaatttactagcttcatgaatttcttccccgctgatacttcggtaaatcttatttatttatttattttgtaatttacattcaattcaattataattaaatattcaattttttgtaattggattagaatttaggttggtttaatataattaaattgatttaaatattacccacttctaatgtaattgttatattttcgaatgaattattaacaaaaaatatcttttaagagacaatttgagagtgttaaaaaaataatttaggaagagaaaatacaaattattctacttttcactacttttattgtatagttgcatgaatatcatggttagttttctaagaacatgtaattacaaaagggatgaagtttttttttttaagaaataatactacctttctaac

SEQ ID NO: 235690 - DNA, 943 bp, Cannabis indica
aggtaaagacaaaactaaacagttaggatggcgagctcggggcgtggattacatgttaggggattatcacgatgttttggtttaaaaatatttcgttaaagattatgatttgattacttttgtaaaagttaatgtttaaaattttataaatgaattgagtgtttttgttttaaaataatgagatctcatactttggttattttcaataaattagtttgtcttttaaaaatggttttaaacggactagcgagtgtgacgtctagggaaatcggggtgttacaaaatcttctcattaaggcttctgaccacttgatgttgtcgatatggctgaaacttcacacacactaagtcaccaactgcaaactgaacatcccagcgctttcgatcagcttgcaccttaattttctattgtgcacgagtgggatttagcttaagtaaatcaagaatggaatcttgagacttgaggttctgctcaaccgtagagatagtcgtagtattatgctcaaattgaaccaatggtgggggttctcgaccatagacaacgaggaaatgagtcatgcccgctgaagtgtgataggacgtgttgtaccagtactccgcccacggtagccacttgacccactgattgggttcagtatacatgaaacaacggaggtaagttttgaggcaatgatgcaccacctcaatttgaccatcggactagggtggtaggcagtactgaagtttagagatgttccctgaagaagaaagagctccttccaaaacatactgaagaaaaccttgtcgcgataaaaaatgatggaacgaggaaatccatgaagcttgacaacaccacaaacaaacacggtggccactgtaacaatagagaatgggtggtgcaagggaatgaaatgagcatacttgctgaggcggttgaccagtataaggattgagtcaaaactag

SEQ ID NO: 235691 - DNA, 1713 bp, Cannabis indica
ataagtaagaaacctaaccgcggtttcaagagtaattactcgtaacggtattaactgtttccaaccctaggtcataacctaggctcaaccaatatctaatcaaagtcttgataataatcaaggtcataagcattcaaccatcaaaatttagacacatacggtgcttaccacttttcttaccttagttcaaaactaaagcgtacgggcaaacctgagtggaaaacaagctaggcgatccgagtcctatgtcatgacaattgaaaactcaatgaataccttaattcgaaattctggattaaaactctaattcaaaaccgaatatagcttaaccccaaacaaattcaaaatagaccaaataactcataaacaaccaaagttaggtaccacgttccaccccgagccaaaacagggtttggagaaaacccgagaatttttcccgtgcaggcaaccggtcgaccgttttttggcagaccagaaaaattctgggttttcttccccagctcgaaccaaaatcatcacagacctttatagcatttccagaatagtataacataccaaatacaacatatccaacacatcaattaactacaattcatcaatttgctcaaaatcaccttctctaatgaaaattaatttcaatttatcacttttaacacaaatccaaccaaacagcccctaactccaatcaaactaaacttagacaagcttcaatttgaccccaagaaccaactctaacttcagtttatagctcagcccataaattccttaaaacccttaccaaaacattaactaaacttaagaaaatcaaaagaaatagtggtaagatcatacctcaccttggctagcttctagagttagagatttgctcaagaatttgatgaagtgagatgagttttccttggttttcagcctctcctagggctcagcagaaggaaagaaagaaagaaaagaaagagttatggctagcttgtttcacaagcttttccgtttggtttccttcttttttttttaaaaaaaaaaaaatatacagctcataaacaattaaacaaaaaaaaaataccttttcttaaagaatgacaaaactaccctccaaagaaacttaaatataaaaaaaataacctaagggcatttcggtaattctactaatccattaaaccgacattctaaaatttttaacctagtccgaaataccctcaaaataatcctcccattaatgtcgtgacatttttaaccacatcgttaaatttccacagtcgccgggccagataaaatatttttatttcaataatggtatcctcgttacacatatatctcaatataatctccgtaattaataaattacgctttatgatcattcaatgaatccttaataattaccctagataagatcataatcttacttcattatcaaaataattacttatttaatcaaatatgtctatttaaatatcatttatattctgggatattacattgtcactttcattgacgattactctagatatggacatatttaccttatgcataagaaatctgaaacatttgaaaagtttcaggaatttctagcattggcagaaaaccaattgggtaaaaccttaaagatcttgcgaactgataggggtggagaatatatggatttgcagttcaaagatcgtttaattgaacttggcattgaatcccaattgactgcccctagcactccacagcaaaatg

SEQ ID NO: 235692 - DNA, 630 bp, Cannabis indica
ggtgcaatggcagggtatactggtttcacagttggccctgttaatggaagacatgcttacatacctttccatgtaagtttaactatgcaaatatacatacatatagttagtgtagtgaaaatgatataattgtttgtttttttttttctatacagaggattaatgagaaacagaataaggtttaactgacagaatgtgggcaagactactatgttcaaccaatcagccaagttttctaaatgctgcagatagttttgaagatgatcatgaagaaaatgaaacagaaatccatgctgaaaatggggaaagcgaaccaaacggctataatggtcaaagcttaataagctgagagagactgcctctagtctagacagatcacaaaaagtgttgaatttcattttcgtttgaacaacatgctaaataatgtgtcataaggttttcaaatgaatatactgtagtctgtatcattagaatcctcttttaagattatcattttctatggttttctattttagcactggaatattttaaggtccaagtaaagtatactgcattcagtcatcaataaaaaattattagcgaaaaataaattaatatatactacactaagaaaaactattatcacctttt

SEQ ID NO: 235693 - DNA, 1155 bp, Cannabis indica
gttcacgctactaccatcattgatcaggattctccttaccctcttcggtggcagttttagatgtatcagtaggggtcattatgtaaactttatacatgatgggcatcctcactggaaaattttatggtctggtcttccattcagctttgcctgggagcatgttttttggtatggaaggagtcttatctgagttcttatgctcattaatatatctattttgagccccattattggtcctttcaaagtgtggtcctcctgatatgaccaacacatcctctccttctacaagtggaggaaggtctaggttatgtcctggttgtccctcttgtggttctgctggagggttaggagcattggcatgtgggactataggttgttatgcattgactccttgtgggttgtattaactattcctcgcatagtgggcaagaggcccattatgtatgagagtctctatctcattctcatgtttcgacactcgttagtggtatgccatttgtctttatggtattggcaatacttgtttagatccctttttgcatgacttcctttcaagggttcaggtatcccaaaatctacctgatgttcgtttgccacatatatagtttcttgtgtctccaccaattcagagtatattgtgaaaatggcctgataacctttactcttcttagtgttgttttgactcctccattgtcaccctttctcttattattgtgcccagagttattggcgactggagggttggcagttcttgccttcagattggtggaagtcgttgttgtagttgtcggagcatgttgtgttaagggaagaggtaggttattggctattctagcctcctcaatgcttatatacttttgggccctcttcataaattttttgattgtgggggaacctctttcttggaggctatctcatagtaaatacccatgaattatgtatgctcccagtgccatgagtctcccactgtcatcaacgttcttgactttggctacctcaatgttaaacctattactataggcctttatgctctcaccatgtcactgttttacgttggccaaggaagagcttttggtttttcgagacttggcggcacaaaattcttttttaaaataacttgacagtttgtcataagaggtgattgaatgcttcttg

SEQ ID NO: 235694 - DNA, 1106 bp, Cannabis indica
ttatacaataagcactcttgaatgaacaaaatcacttcactaaacataacaataaaataccataacacaatttttagccaacaaaataattctagcaaaaaggaaattaactcataataaattgtgcaaaaattacaaagtctaaaagaaaagagagatagaaataaaaactcattttagagttgtcacaagactctaagttttttctctaccaaatttctcttcttcttcctcttgatttttgtctaatctcaaaataaaaatgccaaattaaaatcctaaatagaactctctcctttttttttcttctttttcttcatttttcttcttttcttcctttgagtggacgtcccctggagtaagcagccgtctgcttcttctttcaattcttaacgcctcccttgtctattgccctcttatcatatactagtaaaaaactacgtgcgaagcacgtatactaaatttatgctaggttttttctatgttatttgaaagtgagattattattattatgttatttgagttgatgacatatattattattctcagctagctctgatataaattagaataagaatcttcaaattataataggaaaagaaatacatagatatttaatttttgaattctttatggcaaactacataataaataaataaaaaaagataaaaaataaaacaaaagctaaataacaaaaaaaaaaaaataacaaaaagaataaaaaataaaacaaaagctacataacaattgatctatggatcacattatttatagtaataataataagaaaaaaaagaagaggaagaaatcatcaaaacggtgcatttcgaaacaggggatgaagaaatctttgtcgtcgtcgtctttggagagcagcagtagtccgacgaggctttcgatgtttcagaggatgattccttgtagtgtcgatgggaaagtgagggagattacattagctagaaaacaaacaaacaagaaaagttgtatacgataacaaacagcattgatgatgagtgtacaaattagctagcaatagctatatatgatcgacctttcgaaaccttcataagagagccagcgaccacaatattgcataattataatgt

SEQ ID NO: 235695 - DNA, 1112 bp, Cannabis indica
aagaaaaaaattgcggacctatatctttgattattttaagagaatcaaagacatagttcatggagacctttattttcagttattatgaaataacaaaagacataggtctccactaccctagccccatatcagatacatgtggaggtctctatcttttctctcaatgaaaaagggtcaccaccatctatcttaaggctccattttctccatacacaaacactttcctcatttttcttttagatcttctagttttctcacccataacatatatacattataaaaattaattttttaaatgtgagggtagatgtcagattttaggccaacaattttttagggtttttagagaacggcagtcggctaatggtgacaactttgaggcttttaaagttgccttttgtgatggtgaaaagtggctaacactagctcgctagattagggagatgaataatgagtttaagtaaaaaaattagagatacacacacaatttatagtaattcacttcccatgtcgcgatggtaatggaactatgtctaaggttaagtgtttaagctctggtttctagagagagatgctctaaccttgtgggtagtttttctgaatgtaataaatgaactaagggagctctcctaatataggtgaaggaggcccacaaaaatagggaaaaataattcagaatatgaaaaattctaaattggctaacttttaccgtagatgatgatccaacgatcaaaattaacttctgagactgatattcattttttagagcctagcgagacccgctgcgagtaacctagagcttatttttgtaactctcttagagtgaaatttgaggttaataacttcataatagcgtctgaagtgtgaaacactacttgatatagcattgacatagcttcgacacacaagttgaatcgcatcaattggataaatattgagtgagttatggctattttactgaaggcagtccacaaccaagcacccaggttgacatcccagcgcccaggttgacatatgtcgtcaacctagatgttgggtaagtgaaataaagtccaagggatgtactttatgatgcctaagtgatattttgacatcacttagtctatttttgt

SEQ ID NO: 235696 - DNA, 1341 bp, Cannabis indica
aaaaataaaaaagcccctataaataaactataattgagaataaaattcccaaatttttgcaaatcgatgacctggccaaataatatgtaatattttttacatttttattaacatcaaattattttgtgattgtaagtagttctgttatcagtgaagaaaaatatcaagtaagttgtgtggttccataccgtttgggaaaagttactaattatgatggttttaaaattgtgtaggtatggaactacacatttgaagataacttaaataaattgattgtcactacttatatcaataagatgtattttgtttttagtccacgaaagaactctacaattaagtgtgcttgacctggagtaatttcaggatgggtgacctcctgagaagtttttccaagaagcgtgcaggtgaggaagcagccagagtgatgtactcatgtataagagtcatgaatccttggtggaaggccaatggaggcttgaagcgactgggacgtgccttgacccaaccgaaagtgtggctacacaattaaagatgcttaaatggattgattggtactacatatcaacaaggtgcatcttattttttggtagccagacttgaagcagagacattagtatcagagtcttcacccaatcggaagtgtggctatacagttgaatagggcttaaattaatggattgattgatactacctatatcaacaaggtgcatcttattttctagtagcccatcaaactccacaattaagcgttcctagaaatttcttaggaagcgtgcgagtgaggacataacacattgaaaacacttgtgttggtccacagggttagtcgtcagtccaagaaatatatttccctatccttgcttcattctattcttgaattcttctgaatcccaggctccctgttgattttggtttacacatttcatattaggccacaagcccatgtccgtttgcctcaactaaacctttccaaaggaaacttctacagattgcattcactttctggagaacttttttttttggaataattatcaattgagcccaataaaaatgtaaagacataagcactgaattaactaatactactcaacttgcatatgaaggattccttatctccatactttaattctttgaaccatattttccaaaagaaccttacatttagcattaggaattgttgtgatattttgcacacacaagtgtacgtattgttaacaagtagtaaactcaccaggagtgagatcgatcccacaggggttgtagttaaatactttaaaattaaacttttacttctatttggtggaatacaaattaagaaagaaatttaaaataagaaaacta

SEQ ID NO: 235697 - DNA, 628 bp, Cannabis indica
ttatattttagggttagatttttttaaaatgggttgaagcccataagtgattttcttaatgcctttttgcatcggttgtgcactgacgctaatagtgtatataatggctttttgcgtcggttgtagaccaacgctaatagtgtacatattattttatattcatcttttgcttcagtttttgttttagcgtcggatagataatggacgctaattaataattatttatgatagtggataactaaagttaaaaactgtaggttgacttacgcgtcggtcaaaaagtttgaccagatgcgttgaccgatgtaaaaactcctttttgtagtagtgctatctttcagtattctgtaccatgaagacatggagcaaccaattccaggcctcgagagctgaaaatacatgaatcagcacctcaaaagtaaagcttggcacctagggtttcaatttccaagactatcttagtgcaaatggatcaaactttacattggaagatgaactagacatgttatgaacatatttgaggcatcaaaattagattcaaagaactttcatttttgagcacttggacacccggtgctcagttcacaatctgtcaacctgagcccctttcaaacatcatatcaacaat

SEQ ID NO: 235698 - DNA, 1287 bp, Cannabis indica
tgcacaaattttacatcctccaatattagagatggtctcattaattattaattatcaatgactgtaattaaaaaattgtatgtattatatgttaaattgggtccccctgaatcacttgttacgtacaacagtttaacaaaaaagtaaaatacaactaaggctcgtgattctcactcaccagacataacaaacagcaactattctaactgaatttctgttacaataatagaaattcttctactcaactattgttgaaattaaacatctataaaagcagataacctcaccaatcgtaagtaggagagagcgaaacccaaattcttgtgagacccaattgtagagagaggagctcccatgtggagcgcagtgagttcatgtaaagaaaaatacaaagagagttagtgagagaaaatacagaaaaagaagaagagagaaagaactgaaataccagtcaaaattgtgacttagatttcttacctggtgtaatattcttcaagtatagtgcagatttgagattgttcttcaaggcaagctcaaagaggacgtacccctagatttaggacgaacctctataatccctgtgtttattttctctatttcttttattgtgatgcgtattcttgtgtttgtatgatgttgatctattatctagggtttgattgttggtaatatcaatctgatttgatcgagaagggggaatttgtttcctagggttctttcaaagaaagaaagggaggaagaaatctggttttggatcttaaggttctgggattggtttttgagctagggttgactcaccttggttctttttgttgctcaggtttacgacaaattgttttggcttaaacgatttgtcgtgtggacattaacgacatgtaatttttaactaattggtttcaattattttggtcaattttaatcctgtcgttttttatctagacattgagttggtgtagggcatttttggaaattcaacaaatccaccattatatgttaaatttgacataagatttttttttagggaataatttgacacaagatttagtagactatggctagtttattctcaatcttattgttttatatagactaagaagatgaaagagaacaatagtcatttattatggatgaacaaataaagcaatcatttgatggtttattgtgaaattccatattttaatattctcagtttaattatttaattaagtgattaattaaatgcggaataatgaaactggtactgaaaacagtttttccgtagttacagaatacaactctgtaactcca

SEQ ID NO: 235699 - DNA, 551 bp, Cannabis indica
catacaatatcaaatttaaaaacaaaagataaataagtgatacaatcaaataaaagtttaaaactttgtaaacaactgatcataaaataaaatatctatagagaacataccatacaattcatattgaatagttatttttaaaattcaaaacttgtcttaaaattcaaaacttgacaaaaaaattgaaacataggcactcgaacatataagggaggtgagatttttgaaatttggagtcctcaaccgagaaaaaaaaaattaaaatcttccacatcaattttttcttatatattttataagtgtatataaatatttttcctcttccaactttataaataaatcagaaagtaattgtttaaatttttttaattgaatctcatatgtagatttattattattattattattttaagaaaaaaaaaagttagctacagttttagtaacaattttgaaaattttaatcattttcttttaaaaaaaataagttagctatggaattatgatcattacaaaaaatcaaacttttagtcccaacaaaatttgtgactaaa

SEQ ID NO: 235700 - DNA, 1881 bp, Cannabis indica
aaaaaaatattatttaataataccagaaacttacggcaatcatctataataacctccaaagaagaaattataggtgatgaattttgaagagtttagactgctaccaagcaatttgactccagctccaattttcgctatagttgagttttaatctagcttagcacttcttttataccaattgcttcagttgaattcggagggcctatgccaccaaaactgctcgagttagccatcactaattctccttgagagtctcgagcgactatgccataaccaaacgcagctcgatcacgaaaaatggcaacatcaatagttaccttaattgtattctcatgcggcttaacctgaaattcagctccatcacgagtttcaaaaactgaaaaagaagcctctgaacctctattttggccgacttctattgcacaagacaactcatatatgagataagaataccatccaccatagcatacttttggctctaaaccaactcgtttcgagccttccataacccccaatacaacataacaaccttcccacacttttccttactgcacctttgcaaaatttaatcaaaccaactgcaaaaatcagcaacaacaatcagcctaatcccaaccaaaatcctctaccagcattgagcagtgaatgaacgtgaaataagcacatggaaaatactttcctcacttctttgacaaaccgaacacatgatttgaactgggaccctcttaccacttaattgaatcaaggtgcgcaaacaatttgaagcagcccgccataccaaattgagagctttcggtggtaccttcaaattctaaagcttgtgccagaacccagaaaaatcagttgcaatccaatttcctttctgagcttgaatcaacttttatgcactacacaccgagtagaaaccatgatgctccttagaccagaaaaaatgatcatcagttacgttcggactcaatggagctgccaatatatgctgttgatcgtgttcgttaaaaagatttttcataatatctaaatctcattccctattattagtacacattagcgagctcaccttatggtccactaaatattgggcatctgaagtaacaaaaggacacacatcatctagaagccatggctaatgtaaaatatcaaccttcacaccagttcttattgcccaacgaaccccagacttaagaagctcctacgattcaaagacgctcttccacacaaagctataatcatggacacatcccacatattcaccaagaataggtacgctataaattatccattatttcaatccaaataatcaaagatcctctatagatgatctacaatgagtagggacaaatttactattttaccctttaatgtattttatctttaaaacacttagcttcttataaataatattttagtaaactaatataattactaaaataagagctcttctatttatgtctattaagctaagctcaaagaaaatcatcatttcacttctaaataattacagaagctatagatttcatatctatgatcagcgctcccactcaattgtactatcatgttcccaagatgtaagtattgggccaatccatttggtcagctttaacgaacaagtcaaagaacacaagcaatgcagttacgctagaacctaactatctcaggattaagatcttttgatctaagatcaactaagtgacattgccttagaatagacataacggtaaaattatgacatcttttccatttgttaatatcagtccagtccgatgtatatccaataaatccaatactagtatactttgctaattctctgaaaaagacattccacatattattgtgtaagtaaactttatcgctgatttttacgtcagtgtaaatccagtgcac

SEQ ID NO: 235701 - DNA, 1689 bp, Cannabis indica
agttaaccttgctaaaggttgtccagtgtatggacgctggcactcttggccgaccagctataggttcggccaaggctttgctggcaggtatgtggatctgtctttgcttgtgtccaccgtgcagctatgtgatcttacaggttgaaagctacacgcactagcttggtaggttgaaggatgcactcactaacttggcaggttgaaggctgcgcgtactaacctagtaggttgtaagcactagcttagtaggttggaaggttgtaggcactaacctggcaggttagcaggctacaaacattaatgtggcaagttagtgacgaactgttctccgtgtgtcttctgcttttgactatgtagacatgccaggtcaagtggacaaaatttaggataacatttgccctctaagttcctattcgaacgtttgtatggatagggacttttcagattttactttgaccgtaggaacctttaccaaatagctttgtcaggccaagtattggactttttggatgacgtacttttaaacctttgatcttctctctcccatgtatgccttttactttcctcatcttctcttctttgacattttcctctttctttaaatctgttattgatgagtttcaagctatttaaagcttttaaaaactttttgattctcacgttttacaatagtttttatacattgtaatcttcttcataattttaggatgtataataatgtatgacttcttgatgaacaagattgagtcttggactggtaccttgggtctgttagagaccctgtccaactcttagatcttgtcgaggaactttgtctggtacttagatcttgtaaaggaaccttgtcaagggcttagatcctgcgtaggaactctgtccaggacttagatcttgcgtaggaactctgtctaggacttaagctcattatatacccctgtccggtacttagccccttttagaagctttgttaggtacgtctcgggctgaatcttccctggccgatcaatggccattaattcataggttgttcgattcataattcttgagcttatacttttgtcaatcaacagctttgtatttcaaggctatctggttagttcccttaggctttggctagttaactgtcctttgtctaagtctttttatgttctccaattgttcacctccctctgcctttttgtagggatgaacccgcacggcttttggggaggtgacaaccgaattgacgaagagttatttaatctggacagctagtctttctcacacaactttgaaccctgtcaactccagttatttttttaagacatttgaggacttttttgtttgtttttatgcttttattttgcatatctcttgttcttgtatggcctttaggctcttcacttttgaacaatgattgtgtatggccttaggaccttttacttttgaacaaacgattgaccaggaagtctttaatcctagctttaacttcttttgttagacatatagctaaccaagcaacttatgtctaatatgaagtatgtcattcgcacttacctagctttcaattttttgcttaacaagcttttaaattttgcttaagtttagtggtgcttgttcaatgttgtacagtgtgagtgccccctaagtgatcgagcagacttatggtctcttagtaacttacaactcaccaaatactatagatctttg

SEQ ID NO: 235702 - DNA, 583 bp, Cannabis indica
gagcttgcataaattgactcactttgttgacacagaatgctagttcaggcatggtaacatttgcatattgcagccctcctactatggatctgaacagggtggcatctaccattggttcacttccatagcttgagagtttgaggccactgttcataggtgtgtttcgagttttcacattatgcatttcagctttggaaagcatgtcctgtagatactttgtttgtgtgaggagtaatccttgctctgtttttgtgacctgaatacctaggaaatagtccaccaatcctagatccttaagagcaaaagtattgctcaaaccagtgatgacatggttgactgcagtttcattgctcctcataatgagaatatcatccacatagaccaaaatgtagatgcaatgactgactgtaacctgaataactaggaagtgtcagcttcggatgagtgaaatcccatgtttacaagagcattggatagtttctcaaaccaggctcttagaacttgtttgaggccatataaagccttgctgagtttacaaacatagtttgaatgttcaatgctgacaaagctaggggattgttgc

SEQ ID NO: 235703 - DNA, 838 bp, Cannabis indica
atatataattaaaaaaatattaatttataattcttgtttacaaaaatctacctcatgttttaaagtgtgtttttgtgcactgcccttatcaccatatcttaataatattttcctcacttggtatcctcgtctcctacctttccacactccgcagccatggcagagcagacagagaaggattttcttaagcaaccaaaggtttttctaagctccaagaaatcttccaaggggaagagacttggaaagggagggaatcgtttttggaagagcgttgttccctccacaaccaattcatttggagcataagataaaactttcaggaaatagtcttgtgggaagtgcttgttatgatgtgttggttgatgttcctttcccaattcagagagaattatctgttcttttggccaactcaaaaatgagccaggaaatcgacgcctgtgatgaagccatatgtggagcaattagaaaaagcctcaagcaccgcaggaggcgggcttttttccttgggtttagccagtcactggtggaatttatcaatgctttaatggaatcccaaagcaaggatctgaagcttgtagctggagaagggggtggaaatagtcataatagaaaagcgctgagacgaaggaggtggaggtttaatgagcttaaattgctcaataatcagattataacagacataaattgtattattatagagcggagaagaaagttgatcatcattacaaataagttaagcatcatctagtttttcatgaattgtttttcaataactaacaatgaaatgtttccaaaacccaccatttgaaatcattaccactctaaattgcattataca

SEQ ID NO: 235704 - DNA, 642 bp, Cannabis indica
tttgaaaaagagtggaccatccaaaataatttagaccacatggcaagcacgtacagcctggtaatgaccaacccattccaccgacattgcttgcacctccatagaatctgagggataatgcgggggtgaataatgctaatccacctgccgactggtagcaaatgtttcttgaaatgtgaagtatcatacttcatcaagaagataaattgcgtcaacttaggcaacccgcaccagcagctccagcagaacaagtgttaccaccagctcctattccagtggtgggtaactcaggatttattctaccacatcgagactttgtgttcgaatgtttcgtgaagctgcaacctccaatgtttttgggaggtactaatattattaagactgaacagtggatgagtactattaccagcatcctagataacatggggtgacggggatagacgagttaattgtgcagcattcatgttacaagatcatgcccgcatctagtgggatattgttggtcagacccgagatgttagcatcatgtctcgggaagagtttaaaacccagttcgcagaaattttttataacatttctgtaagaacttgacatattcatgaggttgactcaaggaaagatgtcaatggccaagtataccct

SEQ ID NO: 235705 - DNA, 841 bp, Cannabis indica
accacaatttaaacattatcataaataaaaaaagctgagattataataaatttttgtacctaaaataaaaacaaatttttagtgacttccttgttttgttttttcatttttttgttttttgtttttgtactgtgagaaactatataataattgaatgaatacctctaattttacctagattgtattaattttaagaataaacaagattagtctccctaactataacatttatagagtttaattttttttttgttgttgtaaaatttctacatgaattataaaataattacaaatataccccttaagttacattatgctcatttttaaagaatttgttaatgtagtactattaacatgatgttaatttagaaatattcaagagttcaaacaaaaaataaataacagtataatgataaattatgaaaatatatatattcttagagctaatatttgtatgtttaacgccagtaaaataaatttcgaatagtttaaaattattaaacacacccttatactataactatatacgtcatcctgatccatgatcatatgagaaaaaaattatttcaaaaaaatgtgaagaaagagagatttctaataatttttataatttaggaggaatattttgtaacaaaaaattgtataggggcgaagggcttctccaatgggacactaaaatcctacaaatagtggagtttggatacaaaattgctccaatggaacactaaatactattctatatacgtgagagtgtatagcgtcctactatttttagtaaaacactatagactattttttttttttcttttttaactattaaaataatatgtttatgattaaa

SEQ ID NO: 235706 - DNA, 1297 bp, Cannabis indica
tgtctggtgtaggcacctgagttggaccggtctcagtgaggttgttagtgtgaaaatcagatgactcagctgccatttcagtgttaacccgatctgtacctgcaataacagtagaggaaattctgccatagcagttagtagcaccagtattacaagtagcagcatgtaaatcagtgtctatcacaacattttgatcaatctcaagaggaaatttattttgtttaatgacagtgggaatagcagcactagatgacacaacaggttgagtagtgtttgatgaggagggaatcattttggagtgaggaaatgagtgttcatcaaacaaaacatctcgagatatgtacactctacctgtagagtcaagacacttgtaacctttatgattcaagctatagcctaggaaagtgcaaggtgaggacctgaactgaagtttatgcttattatagggcctaatattgggataacaagtgcatccaaaagtcctcaaggttgtgtaatctggctttgtattgaacagaacttctaaaggagatttgtcatgaagcacaggtgagggaagtctgttgtaaagatagacagtagtccgaaaagcctcatcccaaaattttaagggcatggaggcttgagcaagcaaggcaagaccatgctcaacaatatgtctatgttttctctcaatgagaccattttgttggtgggttgttggacaagggtgtctatgaatgactccaatttgttgtaaaggggctgtgaaagatctaaattctccaccccaatcggtttggagaactttgagctttttggaaagttgcaactcagcctcggccttgaactgtaagaacatttttaaggcatccgatttagctttgagcatgtatatccaagtgaaacgagaatatgcatccacaaagctaatgtagtagctatagccactataggacaaggcatgagagggtccccataaatcagctacaacaagttgaagaggttcactatagacagtttgagagaatttttggaaaaaggaaacttatgtatcttgccaagacacaagcagaacaaaaagagacattttattgattaaaggcagattacacaaaggcaaagctttggtgccaaacatcaaaatcactaagtttgtctttattacaatgactacaaacagtattacattgaagtgtatgatttaggttggcattggcagtaggcacttgtgaagcttcgggtaagaagttgatttgagattggtcaaaagtatataggccattcttgtgcttccccgtcaaaagtgtatgatgac

SEQ ID NO: 235707 - DNA, 1619 bp, Cannabis indica
tggagataactaactctccgccaggcagtagggttccaaaccctgttcataggtatcatgcggtctatccaatttactaaaaattctggccgccacataagaatgagtcgccccagagacaaacaacacagagaaataagagttgttgaccgagagctgacctgttaccacagaggggttggcttctgcatcaacctgggttctcgcgaacaccctggctggagtgggtttcggtacagtcttcggtgcctcaattctgagctggggacaatcccttttgtaatgccctggcatgccacactgaaagcacccttgccctttacactcccctagatggtgctttttacaactggggcaatctgggtaagcgtattgggtttcggtgccactttggcgattgcctaaaccctggttcccctggaacctcttgttctgacccaagccacaggttgcagtggatgtctttcttttctgatctatggccgaaccactacctcccctgctaaaacctagtgcaggagaggtaagagccccgccaacaaccggagtcccaccagactcaaccatacatcccactgcgccctcagctcgcagtgccttatccaccatttcagcatatgtggttccatcgtcagtagtgatcatcaaatcgtgtctaatcttctcatttaacccatccaggattttcttttcttactgaagtcagttgccacaattcccgaggccaaccttgccaaacggtcaaattccgttgtgtactcagtaacactcatattttctttcttagttagttgagtgaattcttttctcttagcacttttgactgcttcattgtaatatttagcgttgaacagttcctagaacttttcctaggtcatagttgtcacatcatgaatcatggacaccatgtcccacaaaccatagcgtcttcttgaaattagaaggtggcacagaccaccctatcattaccggtcacccccataaaattcaagattctaataatcaatgttagccattgctcggctttcatgacatacgaacctcacaaaaaaactggaggtgcttgcttgcggaacctttcatacaggggatccatccgattcactgccaccaatggtttggcctggagagcaggggcagttgccactggaatttctggagcaggcactgcaggagcaccctgctgtctcaaccgtcgaatctcattatcttgttcattgatcctggcttgcattgctgcaaacctattttcccaatttcgggcaacctgagcagcttgggcagcttgggcaatgtaatggcctaatgctaaggcacgctacagtgctatttcaattacagtgctgtctttgataatcaaagaatcttcttaaaaaacgtgtcaaattaaaacttttatattaattattaaaatttataatttataaaattatttacaagttccgggatcccgttttcaaactttttaaacataatacttcaaaatacataatattcaagtcgcacatcgactacaaaataaaaccatagatgtcccaagaccgaacactccaggtcgcgctgcctcgacatgtacaatcccatcaaggctaggctcactcctgttcagccttcgcctt

SEQ ID NO: 235708 - DNA, 1251 bp, Cannabis indica
ataaaatttaaataattatttgtcacaaatataagtatacaacaaaatatttaaattttatttttgtaatagtaaagtatttagaattttttaaaaatttatatatactcataaataagtataacatacacgaatataatttttttttcttgactaaaatactttttttgaataccgaaaacagattaaaaatctactaaaatatcgagtgtactaaatacttacctactaattctaattattttgtttggttggttggaatgagaaaacaaacacaataattatagaaaaaagaaaaagaaatagtgagattagatatttaatatagaaaatatgagaggaggtgatgggagggccaaacaaactatttttgcaccaataattattagattttatgtatatattggtggtgtgaatgggatgagcctttgattaaaattcatttgtctcattacccatttcccatcatcaataataaatgaataattatttttggcttaaaaacgtggacaaaaatatatataaatggaatggaatagagatgatcacgcaatgagttgtgcatgtctctaattgatgttaacaattaagctttggacaacaaccaaggaaatttacctactagctagctaataaaataaccaaatattaaaagcaaaataattattaataaatatttctcattcttgtaaaatattatcacctaattcatcacttaccgcaaattccaaaactaagtttggtaagatgacatatctttaaagttttgtataatttcactattatctttacataactattaactatagtgttgacctctttactttaacattttagtactaaatgtcttattaaaatgttatagggtaagtatactctttaaacgagtgtgtcggtatatataattatgtatgttatagtcatttaataattacctgtaaatttttaaaaaatttaaattatttataatgctgaaaattaagttgaaatattctgaattatacacgtggtaagtagctgtctgaaatttaatttcgatacagtaaactatttgaaattttatgaaatttttacaggtagtcttatatatgtacaacgtacgcaattatgaaaaaaaatagattaaaaaactttggtgtatgctataatagataaggagtctaccaaaatacccatttagaggatgtactgcataaatttccaaagttacattccattcttaataaagtatgtaattaaattaataggtaa

SEQ ID NO: 235709 - DNA, 1002 bp, Cannabis indica
aaaaaataatacaaacataccctttcagttgtattttgttcttttttattattattattttaaatagtttgctaatatagcactaatgtagtgtgataaagagtctacacagaaaatacttgattattgtctaattaaaaattattaaaatatgtattacatgcagttgacgtgtgtatgcttagtgttaatcaacttgatttcagctaattatttttttttcttttaaaaagaagctaattcatgagctaaataagccatcgtcttgtaacagcaaattgcctaaaaaataaatgtaatagaataaatgagacatattttcaatagttgttataattccaagaaattttcgcccgttaaaatcttcaaagtgaaaactccacaaaacccataatttaaggggaaaacttactatttagttacgtggatgtatattgaaagagaaatgttaaaagacattagtggtgctaaacattctcttacgtgtcaatattattattggtgtaattaagtaagggtgctaagcaccactggtagccaataacaacgctcatattgaaaagctcattgtgatttttattccttactcgattacttgtgtcactcatatttctattgtttcctaattcgagcaatttcaatatatttttttagtttaattgcaaaatatacgtactttcaaaagaattgtagttttataaagttacatttcaaaaattttaattgcaaaggggtcatttggcatgatgatagtgtcatgtgttctctgctaagcaaatcataccgtcagaaaataacgtgctctatactacaagctagcacactcattttcagagtggtgaagtacttattctcacagccttacaggttgaatgtgagcatcttgagaatgtgaacagttaggtgatgtgtagtgtagtgtagtgtagacttaataaattttgttattgtggatgtccatgtatcattaattgttcccctaatttaattaaaaaaaaaaaa

SEQ ID NO: 235710 - DNA, 1671 bp, Cannabis indica
ttgatatttaagataatattttatttctttttttgcgtagttaatcgtatacgttttagttatttaagatatcttgcaaaattttgaaaaatttaaaataatttataatatagaaagtagtattcaaataatatattttacacacgtgcaacgaaatgtttaaatcttattttcaatgttttaaattttttcgaatttctcaaaattttgtaggatatttttaaaaataattacgtatacgactataaaaaaattggactaaatatttttcacagaaactaaaataaatagggatacaagtaaatcacttttaagtagtactatttacctaaaatatataattatatgggaaattaacatattttattataaaaaataataaaaaaataaattgtgtgatgaggagagtacagcggtgtccagtgggccacgaaagcccgcatgtggcccatcttaatctcaatcaccaccacgcacccacgttctttctctattcttttcctttttacaatttaccccctttacttttccattattcaaattccaccccttcgtttctgctatttactccttccttcttctattttcttcattattaataatagtaattattaatattaatctaaacagtaataatggattcgttttcttggctataaatctccaaatccaactactgtttagggtttccgtgttcttccatttcccaattctctcaattaatccaatcttcaaaccattattggtaacggtaagcatcaatctccataattatatttctttttggtataattcgattgtattgttaattttgcatattgaattcaatactaatcgagcttttgattgtaataatcttaacttatgctgaatttaaatttctaatacagttgttgaaagaaattgtgagccacgagctgaaatgaaatgacttgatttgatttgatttgatttgattacctgttggccgttgatcttgatcttttccaatctgttatgtatgtgtgtttgtgagagaaagaaattttgggatttgttttgttatggattcagaaactgaattttctgttgagaaagatcatgatcatcatcataatagtaatgataatgaggttaggaataatgggaatgggtcttgtgctgaccagacccaaaatttggttaagactggagaaacaaacccatcaggattggaatccaaatcccctcctccaacccgaataggcgttggattgaagaaatggaagagaattaggaggagagatggggtgaaggatagtccttcttcccctacagttgattcaagtaaaatgttgaagaggttattgactgagaatgaccactcaagtaaacatcagcagaatgtcaactcaagtaaacatcagcacgagatgaaggcgagtagtgaaggttctgttggatctgtaaatgtgttaaagaattctggggctggggctgttgatggatttgcgtttcgttgcttggatttggattctaggaatgcggttgggtcttgttttgtagctggtacggattcggagaatagtgaagatcgtagtagcaagtcttccacagctgctagtgctcctaaggctaagtttgaccagcctgcggtattgggacagggaagagagaagaataaggtgaaggggggtatgagtggtaagactt

SEQ ID NO: 235711 - DNA, 704 bp, Cannabis indica
tctgaacggaacattagtggtagatttctcgattttatcaacttgcattagttcaatcgagggagtgggattatcatctacttgagtagaagaggacgaaacattggttggagttatttctgaaagcctttcctctaatactactttactttgcggcttaaagttctttatatagtcttcttcaaagaatgttgcatttgtagaaacaaataccttattattcttttgactataaaatagtccacccctagtctccttagattttctaacaaacatgcaaacttcagttcgcgcttctagtttgtcttctttctttcttaagacatgagcaaggcaccccaagattctataatagcgtaaactaggtatacgacaattccatagctctataggtgtcttaaggactgatttagatggaacaacatttaaaatgtgattagccacctgaatagcatatccccaaaaggacgttgatagggttgagtagctcaccataggcctaaccatttataaaagtgtgcaatttcttctatttgcaactccattttactgtggagtgccagaggcagtaaattgagatttaattccaagttcaattaaatgatctttgagctcgttatccgtatactgtccacccatatcagttcgcaagatctttaattttttacctaattagttttgagccaaagcatgaaattcctgaa

SEQ ID NO: 235712 - DNA, 1377 bp, Cannabis indica
aatagagtattcttaaatagaggttctactgtattagcacaatatgtattttataaatattaattaaatctcatacataaactctaattatttaataactcaaaatattaatcttagacgatctttacatatataatatgaaatttatagatttaaatagtatactacaatacacattttagaatttacaaaatttatatttaatatttatattaaattttaattccaatatacaacacacatcatcatctgcaaaccatgtgagacttttgctaaaaagaataaagaaatcacaaaagtatactaaattcagtaattctaataaaatagataaaataggtgaaaaaaatcataagatgtcacctcacatactttatactttcctttatattaatatatatttatatttactatttatattaaattttgattcgaataaaataagtgaaaaaattataacatgccacctcacttactttatactttcctttatattaatatatagatttatattaaattttaatttccaatatgcacacactaattaattcaaaaaaaaaattataactaattaggcaacattaagatattcaatttcaatcacccatgacaaaataaagtgaatgtaaaactattttatttatagcttaaaaatacaccacacacatcatttgcaaactatgtgggacttttgctaaaaagaaaaaagacatcacaaaattatactaaattcagtaattctaataaaatagataaaataggtgaaaaaaattataagatgtcacctcacctactttatactttcctttatattaatatatagatctatagatttacaaaatttatattaaaatttaattccaatatgcacacactaataaattcaaaaaaattataactaattgaacaagattgagatattcaatttcaatcatccatgacaaaataaagtgaatgtaagagtactttatttatagcatagaaatacaaaacacacatcatttgcaaaccatgtgggacttttgttaaaacaaaaaaaaaagaaatcacaaaattatactaaattcaataattctaataaaatagatatatttatacattttatattttataaaagttaataatgttatacttatatgtatataaaattataaaccacccaaaataatttcatgcacttattattttttttttattctgcccaatatttagtattaagaatgtgagaatatcacaatctaatttattttttgctaacttttatctgatacgataagcacatgataaaattataataaataatattatgtaaatggttttaattttcttcagtatcttaaacttattaacaaagtagaacttacacatattttttct

SEQ ID NO: 235713 - DNA, 930 bp, Cannabis indica
aggacagtataaatgtaacatctgccgtgtggcagtaaaattgaaaagtattaacccaaattcagtatttttgtaaaataccctaataaaattaccatcttatataaactatattgtatattgtaatccaaatgagagaataaaaatgaaaaaaatgaatgtatatatatataaatattaggaaaagtgatgtgatttatgcatcatttagaattaatgtatatatatagataattattatttatattttttttagaatttggtagaagatttttttttaaaaaaaaaaaagaaaataaatttttgtatggtagtagaagaattttttaaaaaataataaaataattaaaaaataactttgtatatatgataagatatagattttttaaaattttaaaaaattgtatattattttttaaaattttaatattaaaaaagccaaaacgtggccaaaaacaatctaataaataaatttttgttgagttatcaattttttttaaataaatgaattaaggaaaaatatattaattgtatgttatttttaaattttaattttttatttttaaaaaaaagaagctaaaacgtggccaaaaaaatctaataactaaatttttgttatcatttttttaaaaaaataaataaattaaggaaaaaatatattttatattaattaatatatatacataattaataaattaattaaggagaaaagaaagatgaccttaaactatttttagaccggcacgtcaccgcctcatacttcttctatatatatattgttattaggtataagtgatatctagtacttttaggcatgtcgccttgtgattggctaacgatactctctaaaagttattatattaagagcaaattacattacatatttcttttaaattgatgcatttgatttttacctcctatttcaaaatt

SEQ ID NO: 235714 - DNA, 908 bp, Cannabis indica
attattagctttaacaaaataaatgtaattttaaacacttagatcataatatatgatacgtatatatatatatatatatggatcgtggggtttttggatgtgaaataaaataaaatttagaaaagaagatgagggtgagggccccaccaggtttggcatttgtctatggcttagttcatattttgttggagagaaccctactacaagtactggtgtcactctcagtctcacggtgagacgattttggtacaacgaaaacagctaattgggcccactctcacatggatatcatatcaaactcctttggatgaccaatggatcaacccaaaagcacagacatctactgcctactaccactgctaccggtactatatagcaattctattatacttttaataatataatatggtcccaaacaaaactcctaaccccaactcccaacaagccaccaagactagcttagagttcgaacctaagtcgttgaaattattaaactattaaataattgcaaaatatgattacgctacactaaaaaaaaaacccaacttccaacaaaagataatcttttatatgttataataatttcctactcttattattaaccttaatatatttcatcaaatggattaatggtagccgttggatcaactctccttgtttttagaactaccaacattatgttttgtcccattagttaatattggaatgtgtatatgccgtatttaatctctttttattaattatatatgtattgttctttctttctgttcacctgtttttttttaagaactagaaaccatcaaccgcccatatgggacaaattgtatatataaatatatatatacttttcaagagtattaaagtcattactcatgctataatttattaattggctcgtacactcacaa

SEQ ID NO: 235715 - DNA, 1090 bp, Cannabis indica
tttttcttacccagaaaagaaaatgaagaaaagtttacaactttggaagaatagcttactgggtctgaccttaacgtaacctcaatcctcagacccatcttgggttctttttggaatttttcttcctccatgaatgagtggaacaaagcagagactaaacatcactataacgactaagaatttctccatttttcgaccaaaaaataaagatgagaaaaccagagaatgagagaacacttatgaacctctctaatgtccaatatatatacacacattcatacatatatgtatgtatgtgtgtatatgtagtcggcaggccaatagttagaacatagtttgatctcatggttcaagtgtaaatcaaaatagaaagaatttctatgagggataagttgaaaagtctagccataaatgtttcccattgttttgcaaaacgtttgagcttggagaagaagcgctcagcctaaacggctgtaacatcgcctcaccaccgtttgtctccaccattgcacctactcgttgttcagagatcacctctcgttcatagacctctgaccgttcagccacacccattgttgcagctgtaatcgattgcaagcaaaattttagattattctagagcatgtatatataggattatatatccagaaaattcaaaatatcatcttcaaaaaatttggaaaaattccatatataccaaggaaatgtagaaacctgaaaaacctttaagagttttcagtattggcacttatctttctttctactgatatgccacttttattgtatcttctctcaagtgagattcaattcatgagatgagattctcaacaaaaaaaggtaacttgatatgacactttttcttgaaatcaaaatctctactcttccaaagttagaaaaagatgttttgctgggttaaacatttgcagaacatataaattttatcttgtgtcaattcattgaggaaaacgtacgtcgtcaaaactcctttgatttgtggttgaactggataaaaagtttggatgcttcctccatgtcaactatagaaagaaaaaaagttaacaaaaaataaatcattaacaacacattacaa

SEQ ID NO: 235716 - DNA, 597 bp, Cannabis indica
cccgagaaatagtaggtccagggtgagaagggaagaccccaaagtcaacagtgactaccgtccaaactaccccaacagtcacggtgatgatgaagctaaaagtcgggctaacaaccaacaaaatcctgagcagggggttatcaaactggagggccatatgcccctaataggcagtatcaacctaagaatccgccccaaaggggtagagatgacaaagtaccacccccgatcgatggaagggctgacattcaaaatgcaggaggaaggccaagaaccaagtaagctttttaacgtgtaggcccccaagggggtagagaccttcgggatgcccttaacagaaataaggacaaccgcggttccaacatagtaaatccacctgagccggttcaaaaaataccaagcgaatattggcattaatgttgctcaaccccaagaagccacaaattcggtgatccaggctcggttggacgagttaacccgattggtcaatgacctttctacaccaaaactcactgaattgaaaatggaaaggaggagagggtcttccttctcccaaacgatcaatgacctcccattctagcaaaattcaaaatgccc

SEQ ID NO: 235717 - DNA, 1851 bp, Cannabis indica
attttattactttttaatttatactcaattttttagatcatattctcattatgtgcattaggaattataattaataagttatgtaaggttatatttagtactttaattataaaagatgatatttattaaataaaattattttagagttgtatttagttaatttataataaaaaggggtagttttcaactaatccctaaattattctacaatgttagatgggtattcaaaattgccattttttttagggaaatcaaaattgccattgaaataggcttagacttttttttggtttatttcacaaatacactagaacaataaaaattacaaaaatacggttgtatggaattttaaatatttttacgatttttataattttaatatggtcttttaatatatttttatgttgtactcttattaagtttttattgacattttttattatttatgttattttttgttattattttgatgttatttaaatattactattctgttacttttatgtcatttttttattgggctaatgttctttttatagaataccctaaattaaaaaaatcctaaaaggtaaaattgtaaaatttttacaaaaatatagtaatttttttattatctctttttttttttttatctttgtcagaccttaatattaggttacaaatttaatggagactggtggctggagcaaacaatgattttggaccgttgataacgcaccccagttgttttaacctttaaaaaatttaatactaaatattatttatttatttgtaaggattaattattatttttatttatttatttatttgggtagaaattataaattataggtaaagtttgaattccttttctctaaaataggtttggttgaaagaaatgaaaacacaaaaataaaatgagaataagaataagaatagaatagaatcaaatttaaaatgcataaaaaattgatcaaaacaattattaaaatttttcttgcattggattggtcattccttccatttcaaaataaaatagtcattccatcaaaatgatagaaaaatcaagtatttattggaacttcaaatataggtccatggtctccgagtcacctctatacaacattgtacatggaaaaattttatttgatgagtaaattttaagtgagaattaatttctatgggaaataaattcttaaggacaaaacagtaatttgtgaaattatttattattttttttttaacagaaatttgtgaaattattgttttgaataaatagacacttatgaattgtaattaatagtgtttaactatttagttttataagataaaactatattaattagctaaataaatattatttttaaatattagaaaaaataatatttattttaatccttgtgaaataagaaataatgagaattaatcaattattatttattggcagaataaataataaattttatttgtgacaaaattgagaaatcaatttcggaccttaaaatatggcctacacgtgtaggcctaacccacacgtgtagggtgacatataaaggtccatgttaattttgtttgattatttcattggttaaactaattcaaattaaattaataattatctttgaattattgaattaaatgtattattggataatatatttatttaaaaagataataataaaataaaagttgtaactgatatttattaatcagttattagatatttatatttgaattttaattttaattttaaattcaatcaaattagatatataagatataaattataataaacaaataagacaacttaacttgagatatacattaaatagttaagagaaattaggaattgaatttcactccctcattctc

SEQ ID NO: 235718 - DNA, 752 bp, Cannabis indica
tccccaccaagaccatgaacaccaccaacttggggacctggaatccatcccaatagagccataagctgacacccattacaaatcccgagactaaatgtgtctggccgcttatagaactcctgaaattgatttaaaaggggttgattaaatcgtattgatgcagcccatccttttgccgagtcaaggacatcagcataactgaaaccaccaacaaataccactcctctaaaatcatccagagagattgacccatttaaaaggtctgacatagtcacatcccatggctcaaaaccagaagcataaaaagctgcagacatttctctatctccattgctcccttcttctcgaattacagccacctttggttttgatgtggcgctcatatacttctcatctgtgaaagtaggagtgaaggacaagttccacgagggttcatgtctaactttcaacccctctttctcttgatcaacacaagaagccaatctctgtaagctttccaactcaaaactggtttcttcccacatatccctaaggaaagaggttttctcattcaaatgagacgccccatcaacccttaattcaattgtgggttcagaacttacttgtccaataatgtcggcagatataccttcgctaattagcttctccatcacaacatccaagttttgtttacttacctcaataataagaccaagttcttcagcaaaaattgtttggaaaaggctcttcccatgtgaattcaaatctaacac

SEQ ID NO: 235719 - DNA, 1382 bp, Cannabis indica
ttattaaacaaaattctcatttaaatatatttattaattagaccctctaaggtttcttaattaataaacaaactatgaattctcttttcttctcaattatatcattccttagtaaagttcataaataaagttattattcagaatcctaattgattaaataaatcaattaattgagattacaaaataatattatttcagttagtgtggggactataagcctatgtaaccaagctcctaacaaataaattttctaccttattaattcctcctgaattcactacagatttggaattacactcctgattacacaaaataccctatttaccaaatatagatacattatgaattatctattgttacaatctaaataggcaatgatcctctatagacgatttacattgagtagggataaatttattattttacccttcaattatttattcttaaaacacttagctaattgtaaaatgatatttcagtaaactaatataagtactgaaacgagcgctctatcatttatcacattaagccaaactctaagaaaactatcgtttcacttctaatagctatagaagttataaattccatatctatgattctcgcttcccctcaattgcattgttgaatttccaagatgtaagtatgggctagtcctacggacaagctagaaacgaacaagtcaaagaatccatataatacaattaagctagaatttaaccatcttaggattgagatcaattgatctaagatcaactaagtgacattgacttaaaaaaacataacattaagtttatgatatcctttccactgtcaatatcagtccagtccattgtaagatgatacatccgatattattactttgctaacgccttggaaaggacatttcacttatacaaaagtaagtaaaccacatcgttgattatcacgttactttaaatccagtacactaatgaatcgtgggactaaatagtttaaagcatataatcacgattatgttccactgtgcagacaacactggacattccacttatacaaaagtaagtaaaccatatcgctgattatcacgttaatatatatataaattcagtgcattgatgaatcgtgaaactaaataatatgaagcatataatcattattatttttcactgtgcagacaacactataatcataaattcagtgcactgatgaatcgtggaactaaataatatgaagcatataatcattattattttccactgtgcagacaacactataatcataaataactatatattcaggatttaatagaatttatataataaacatataatcatgaaattaatcatttgaaccatgcaacataaaatgaattctgatcttttagtaatgttgggttttatgcc

SEQ ID NO: 235720 - DNA, 790 bp, Cannabis indica
aaggggactcccaaacaaaacaaattactaattcttaatgattacaataaaatactctagccttgagactaagtcatgatcttcaagctaagaaccttggccaagtcacaactctcctcaaacatacaattatttctattacactaaatataatagaccacaggtgctatgacagaagatttagtcgcttctaacaggttattctgaatccctcttggcccaaacaaccaatcttcaagatttttaggctaattaaattgactcaaccagctagaaacttcaagaatgacactcttagagtaatagcaatcaaagaaaatcagtttccaaacacactagacagaggggagaatcaagctccacaaaacccggccaagagatcccaacttaaaagattggtgttcagagcctacaacaatattaatttgtgcttcgaaactttgagctttgtgccagatttctttatggtaagaaaccttcggaaccgaaatatgcaaatgataaaactttttagctttacacatgtcagccccgctttaattatggcctgcctactatttatctcaagatttacagcttgcaaagtaccaacttgtatccaaacttggcttgaaagtccaaaagtcctcattcttcatagaaatgacatgggaaatttgattatctatgcttagaaaatcaaaaaatttgattataaccaataataaacctaaaaaactatactttttttactaaaccccaaaataacccccaaactaaaactactactctcttctctctctatctagcc

SEQ ID NO: 235721 - DNA, 2722 bp, Cannabis indica
tgtgctattaattaattgatcttcagtttatttattttcatgtttaggtaggataatattctctatgcaagattttaggaaagttttccttattatgtgcggagcaataaatagaaaaatgggactggcctccggatacacgctaagaaccctttccatgtacacggagttgacactctttcgtatgctgactaggcttaatgaaaccttcatctggcgagacatgtgattgttctctcagaaggccagataataatttagcttggcccagtttatgttatttagacccactgatgggctttaagcttctatttggattccatatatcccttgccaaaaacacgaataatagtttgttagattgaaatttttaatatgggtctcatatgtattggtgtattgctatttgaagtttaacccaaatagagattatataatagtagtggcccccaaaaaacaagagtcttattctcatctccctccatcaagagagaaaattaagaaaatacatcagtcttgttttcttgaaatatcattatccaaaattaccacaaagatcatctctactagatggattaaaatcattactatttatggattattcaaaaaaaaaaggtacgttttcgttatttgagttcttctctttaaatcaacaaatgtattctttaaatatatggttatacacttataattatatgaaatatgtttatctatgaaattaaatcttgttattgcatattttatgagtgataaaaaattataactcacttatctaaatataacttttaagattaaagagtgtgtacagtactgtacttatttagtaccatgtaattttttatctaaatacaagttttgtttgaaaaattactaatatagtatttatgtatttttaaaatggtacatatttttttttgacgtattgattaaaatcacttatgaatttacgatgcacacatccacaaatagcgcgggaacttcattgaatatggatagctcatcgtctaaccaaaatgcatgctttgtcaaaccatgaattgttaaagtcaacgagcaacatgagacaaaactatcacgaaaaatttagacaattaagctataacgtcctcaaacaacacacccaaagagctagagtacacaccaattcattagcatataaaaaatgatccccaaaatatctacaaaaaaaaagaagataaaagtgaattaatcctctagcgataatattaacctaataaaaaatcctcaatagtaagaagataacaactctcaaataaattatttttaaaataaacttctcggcaaatctctgtaatagtcctcttcaaaatagacatgcagattaacaaaaataaactatattaccacataatttaaagaaaaaaaatagttaatgtgaataaagatggtaaaataatacatattataatgtcatgacttgaaacacttatttgtcaaatctaaaaagtcatttgtaaaaggcatgagtacaaaaagaaacacttttcatacccatggaccatatcacaaatctaccataaaaattgtcagaaggaaggtaaaaatgtatttctattccttaaggcaaaatagtacacagtacattggtatttataatacctttggataaagtaaaatcatacaaggacacatggcactacaccaataatacacataaaaactaatattaatttctattgtttaacatcccccctcaaactcatggggctagggagcaccgtgagtttggttcttaattcttgaaaccgagtagaggcaagtggtttagtgaggcaataaaccacttgatcatccgagggagtgaaacaaaggcgtagcaggccctttttgactttttcacgaacaaaatggtagtcaatctcgacatgtttagtgtgagcatgaagaacggggttggaggctagatgtaaagtgttgatattgtcacaatggagtgtaggagggacacgaagagagaagccaagttcaccaagaagtgggtgcatccaagtgacttcagaagatccattggcaagggctcgatattcagattcggtactcgaatgagagaccactttttgcttggatgaagaccaagagatgaggttgaggcccaagtagacacagtaggcacttgtgctacggtggtcatcggggcatgaggcccaatcggcatctataaagcagtgtagttcatgagttgtgtccggttggaggagtacactaagatgggcagtaccattgagataacgaagcactatcttggtcgcttgaaaatgagtagttgttggtgcatgaagaaattgacaaagtttgttgacggtgaaagctatattcgggcgagtcaaggtacaatattgtaaagcccccactaaacttctataagttgtagcatcatgaagtgattcaccatcataaagagaaagtggagtgagagccattggagtggtgactggtttggcatccagtagctgtgttttagtgagaagatctcgaatgtactttgtttgagagagatgtaaaccagccgaagagcaatgaacctggatgccgaggaaatagtgaaggtggtcgaggtccttgacaacaaacttggtgttgagaaagttaaaagagcatcaatcatagcagtggaggagccggctatgataatgtcatccacataaatgagcaatactatcacagcggtaggagatcgatagataaacaaagatgcatcagc

SEQ ID NO: 235722 - DNA, 1046 bp, Cannabis indica
atgtgagacccgatacttaattggaccaatagcgatattgacacataagaaagtgctaaacaccactagtaccctttagtatttctccattgttaactattattagtgtaaataaatattgaatctcatataattaataaaaaataacttttaagaaatatcactaactaattgtgggacgtcacttatagaaggtgttagacactgctaatgcccaatagcaatactcttttacaatgcacctttcaatggggtctaccgatatacccttatttattttgatatctgagagatttttttttcatagtcataaatattgtagttatttaagacatgtcaaaatttttagaaatgaaataggatttaaacagtttattgcatatgtgactctattattttatacacgtgtgaaatagactgtttgaaccatgttttcagcgtgttatttattattttttttttgaatttcttaaaatactgtaggatgtcttaaataattaggacatagacaaccataaaaaaagttggactaaaaaattctcctggatgccgaaacaaatatgagtacatcggtgcaccctttttaaggagtgcattatagaattttctaaaattattttggtatatttttgtgaaagattctataatgcatcctatctgttttggtattcaaagtaattttttagtcaaaatttttctaatggtcatgtacgttataattatttaagatatcatgtaagattttaagaaatttaaaaaaatttaacacactgaaaaaagaattcaaacagtgtgttgcacgcgtgactattttattttatacacgtgtgaaatatattgtttgaacactattttttttattataaattattctgaatttctcaaaattttgtacgatatcttaaataactataacgtatatgaatatgaatatgaaaaaaatagactaaaaaattattctagatgttgaaacaactagagagtgcattagtgcatctcttttaaggggtacattgtagaattgtctttttttttatttttttatt

SEQ ID NO: 235723 - DNA, 2183 bp, Cannabis indica
gtaaggcgattaccttgagaagtaggaagaagtatgaggaacctagtgagagacaaccagtggaagaagtgggtcaagatctacaggcaccgacaccagatgagaggaagactactgagggtctgacatcaaaagaagcttctccaccagttagcattgacaaccatgtgaaaatcccttatcagcagaggctctgaaagaccaatttagacaagcagttttcaaagtttctagaggtattcaaaaagttatacattaacatcctctttacagaagccttagaacaaatgccaagctatgtaaattataaaagaaatcatgtccaagaagagaaaaatggaggactatgaaacattggcattgatcgaggagtgtagtacaatattgcagaagaaactccctcccaaacttagagatcttgggagtttcaccgtaccttgtaccatcgggagaatagaggggatgaatgcactttgtgatttgggagcgagcatcaatttgatgttgctgtcaatttttagaagattacaattgggagaagcaaagcctactacagtaaccttgcaattggttgatcggtcgttggctcatctaaggggggccatcaaagatgttctagtcaaagtggataaatttatcttcccaacagattttatagttctggacatggaagaagacagcaacatagtaattattcttgggataccattcttgacaataggccaagcattgattgatgttcagaatggcgaattgaagctgagggtgcaaggggaagaagtggtctttaatgttcttaaggcaatgacttttccaaacgctagtgacaactgtttctgtgtggatctcttgacaatatagtggagaagaaaaagttgatggaagattcattagaagtgagtttgactgaagaggatctgaatgagcaagatggaattgaggtgatggaatatgcaaaatagcttgctcctatgggccattgaatataaaatactttgaagagttactcccaagtaggacccaaaacgaaataattcaaagagacgtgctgccctgacacccgcacctaagaggtaaaatcaaggtattaaggtcattaaacattatacataggggtgtatgcccctactgagatgcaagtggtccaatcggcaccacaaagataacatacggaccacaacttagacacgtagtgcagaggtaacaaaaatggaagagatagagataagtgtggtacctcttgaagcaggaaagatcacaaagaaagggcaatttgctatggagtgagtaaagattcttattacccatatcaaaatgcaagtgttaagatgtcactccagggtcaaaggtaacacaagccaagtaaggtgaagacaagggcagaaaatatccaagtatattaaaccatctaaatatatatgcaaaaatataaagatatgtatgcgtaactaatagaaataagaatggaaaaagtgacttggggaaggatcaaacttgatacctcttggacagagtgataaagatttttcactctaccaaggtaatgttgtgaagtgaaagttcaagaagataggtctcatatatatagtgggtacatcctcgataaatgcgaagaagataatgatcacactacaacaagtcaaattccccaattctctcagtctatcagaacatttaaaagaattcttgtagactgggggcaagtgttaacccaaaaaattagtgttgctaactctcacgattggtagccccataacccaaggattgacgaggacatattcgattcccttattcatttgacgtgcatctctcaaagttaccaacaatattggcaagccttgggaggcatccgagcggattctagaccaacactacaagttatatacatgtgtaggggtgcaagatgggggctcgcctacgagcatgcatgtgtgtgtgtgtgcccgtccgggtgtaggggtgcaagataagaggcacgcatgtgagtgtgcgtgtgtgtgtgtacggatgtaggggtgcaagacgaggggcttgcatgcaagtccatgggggctcgcatgggagcgtgcatgtgtgtgtgcgagtgcaggggtgcaagacgaaagggctcgcatgcgagcgtgtgtgtgcgtgtgcgggtgcgggagtgcgagacaaggagctcgcatgcgtgtgtttgtgtg

SEQ ID NO: 235724 - DNA, 1124 bp, Cannabis indica
tatatattttttttgtaaaataaataatttagtgtgattattaaaaaattagttaaatttatatttagatgataaatatattaagatatttctgtataaatgtcaattaaagaccattcacttgacaggctgacagttatagaatttaggtataattacctaaaaagttaaactttgataaattttaaaaataagttgtaaatatatatctcatttttaatataaattaaaatatttggagtttgaatttaaattaaaatattacaataataaaataaaatagtagtatgtaaaataataattatatattgaagattgaattattattataattattaaaaaattagttattaattatatttacaacaatagagaaaaatagaatgagaaatttctcccatccaaatgacatcttcatccaactctagaacgtactttgctaacccgtggaccgcttgattagcatgcttacgaatatgcgtaacaacaactcaagggaaaaaagagaacagacaacgaacatcatctattagatccgaaaaacaagataaatcttaacgtggcgaggtcaaagcagaagaaactcataaagcattcgtttcaacttgtgctattgggatttgttgttgaaaagcccaattaagactatgaaaaagtacttttgcttctattttatcacttctaaaatgatcctgaacttgtttggataatgcagcaacaactttcccttcgtaatttcgaatcatctcttctagacccaatactttgtctatagtgttaacagccgcatctacattcattttaagacaattaacgtctggaggcttccacggtatcccattctgcagatttgtgttgggacctgcagcattatattttgaaatattttgctggtgttgcagatcacactgatttttggcaatgttgggaatgccctgcccctgaatgcaacacatttgtgttacaatattttgctagttttgcagatcatgctggttgtagcactgttgggacggtcctggatttaaacattgttgttggtttagtgcagcaggatctagtgcattggttagttgcagtataggttgttgtttctctctgcttcttggtttagctaaacggta

SEQ ID NO: 235725 - DNA, 1752 bp, Cannabis indica
aaaaaatgaaaaaaaaaaattctgacataataaaattatataccttcatatataattacaattattaatataaaaaatatattttgtttgatagaaaaatagttgcaatatataagaatttgtagactattataataataagaatcttcatataaaagaaaataattagtaacagaatttcatatggattatggagccaataaatttatattgatcaatacaatttttacaggtacatattagcagcttggatcacgaaaatctagaaacaatggatagaaaactcaatcattactacttgtattttacacacatgtaaatcaccacataaataaatatttttcaaaccattttagccacagcttaaataaaacaaaattgtatcactatgtcaaagaagtttaggttgagtaatattataaattgtatcaccatgatggcaatattgtcttttaatttttaatgataaaaaataaaataaaatttttaaatcctcattacgcgtaatggcatacctgaacaaaatgagaagaaaagtaccttaattttctcttaaatttatgttaatccataaagcattcttattattaaataaaagtaaacaaaagaaatagaagcattaccttacatcacattctcaatcctgataagtaaacatgccataatagtggaaagggaatgaaaatgatttccccgaatataagcaagataaaaaaacttgcttttttttgttcaaaatgttattatcaaggttagaataaaactccctaaccagatttttatttggctgttgcaagtgagggacagacaacaaccactctatttgttcaatcaactcacgaattttggacaaatacttcagtttaacacgatatctaggccacaaaggatgaaaatagatattatcctgaaacataagcaacttatcatttgaattgaaaagcgcagttgatttgtttggctcagacacactagggttggaggttgaacctgattgagagtttttggctttcttagggacagaaaggtgaggagaattagacgaaactaatttcctttggctggagttttactagtaaaaggactaaaaacaaacctaattggcatctgtcagctatgttatgctaactatgatgtcaattttatcaagtcccaatgtttagtctcatctaatgggaaatctgtccttatgggcgacagaattgttgatcattgttatgttctgaatagtcaagtgaaatgccatagagtgtttctggacaaactagatcacagacttggtcacctaaattgcagagatctaaagaaaattgtgaccattaaagcagttcgtggagtccctgaattttggttgggaaaagacatttgtgtggtccctgtcaacaagggaaacaaatcaagtcttctcatcctcctatcaatgctcttcttacttcaagagttctagaactgctacatattgatctaatggatcccatgcaaactgctagtattcctagaaaaaggtatgtgatggtttgtgttgatgacttttctagatttacttgggtgaactttctcaaagaaaagtcaaacttgtttggtgccttctctgctctttgtttgaaactacagactgagaaagatgttacaattggcaaagtgtatcgggtcaaaagtgatcatggcaaggaaatttaaaaatatcatttttgctcaattttatgataaaatgggaattagccatgagttttctttttcttcatttttctt

SEQ ID NO: 235726 - DNA, 1054 bp, Cannabis indica
aagataaaaataaaagaggacaatataaaaagggtatagagtgtaatttcctccactaaaaatacactattataggatatagaataagaaaataaaattttaatttaattaaaaatttatataaaaactgtaattagagtttgatactaagtcgaagagtacattcccatacaattgatattgtgtcattgatccacttgataattgaattttgttgaatgaatctttgaataattccttttcatttttttttgtaaattaattcatttgcgtgttccaaattgttaaataattttatactcttttacaatagaaaataataatgagaatgtgaattattgtagttattgaatgctcaaaacataattaaacctaatcaagtgttcttttatttgattaagccaaaatgacaataatgacaaactagaaaataatttgtagaagattgttcaagaaacaaaaccacttttttgaattacttgatggaaattttattatacaatttctcaaaggagtaactcatcatgacatttattacaaatataaaagaaaaattaaaagggaaaaagattaaccaattaataatattattgagtaataataataaataatccaatgaatattaagtgcttttgggtattgtttttcacttcttgtcactcactccaagtgtgctcttcacagtttccatagcaccttgagtcatgctcttcatttgttccccagtctatgaaaattcatcatacaacacacaaatattaatattttacaaaattttaatttaataattattaactattcgatcaattaaatcactaatcgaataactttgaagccaaaaaattattagtacctgctggaggaatccagcactttgatcctttccatgttggatagaatcggttgctgaatcagttgctgaatgagcagcatcaacagtcttatctttggtttcgattgctgagtcagttgctgaatgagcagcatcaacagtccgatccttgacttcggtagctgaatccttagcacactgtgacatctcttcggctttagc

SEQ ID NO: 235727 - DNA, 693 bp, Cannabis indica
tgattttataattttctttgggtcaatgaatgcatctggtaattgatttgcaatattttacaaatgaattaatctttgaacttcaagttcacattgatttgtacgaggatcaaattgagataatgattgtgcattccatataatttctttttccagctgtttcttttcccctccccctaaagctgggaaacttgtctcatcaaaatgacaatcagcaaaacgtgctgtaaatacatctccagttgtgggttcgagatatttaatgatagatggagattcatacccaacatatattcccagcctcctttgaggacccatctttgttcgttgtggtggagcaatcggaacatatactgtacaaccaaaggtttttatatgggaaatatttagctcctaaccaaaatccaattgtaatggggagaatttatgatatgatgttggcctaatgcgtacaagtgatgttcgcataagtaattgtcttgccattaactggaggcatttaatgaatgattctgcttgaccattttgtatatgtatacgagtaagaagatgtcctacatttatccatattgacatacaataattattaaaaagcctgtgatgtaaattcaccaacattatcaacacggattgtcttgattacatagtctgggaattgtgctcgcaatctgattatttgagcaagcaatcttg

SEQ ID NO: 235728 - DNA, 1064 bp, Cannabis indica
attaaatcatagattattattaattttctttattaataaagaatatggcaatagatattataatatttataaaatatatagttttgtctaaagtaaatatgaaatgtcacaataatattgtaaaaacacaatttttttttaaaatagattaaaacatcaagattattattaaatttatttattagtagagaatatggcattagacattataacacttataaaatatatagttttgtctaaagtaaatatgaaatgtcgcaataatattttagaaacataattttttcttaaatagattaaatcattaagattattattaattttatttattagtagagaatatgacattagacattagacattagacattataacatttataaaatatatagttttgtctaaagtaaatatgaaatgtcacaataatattttagaaatacaattttttcttaaatatattaaatcatcaagactattattaatttttttattagtagagagtgtggcaatagacattataacatttataaaatatatagttttatctaaaataaatatgaaagctcaaccatattaaattatatagctcgactataaggtgtagagctcgaccattataaattatatagctcaactgtatgagtagagctcaactgtatatggtctagattttcaaagagcttaattatcattagtagagtccgactatttatggtcgagatttgtaaacactaaacaaaattaaaattatcgcttgtctataaagagtagagttcaattgtataggtcgagattcgtaaacattgaacaaaagattagtaaattgttcaattgtaattagcctgactatatgtggtcgagattcgtaaacactaagcgaaattcaagttattgcttgtctgtagagtaaagctaaactgtataggttgagatttgtaaatgttgaagacaagattagtaaataactaaacacaaattactaagggtcctattgttgacaaactgccatcttccttctgtagaatgccattctatcatctcataggctttcaaagctaagacca

SEQ ID NO: 235729 - DNA, 1230 bp, Cannabis indica
agtggtagaaagactacctcaagttcctttcaaatccaagcaccaaattccaagcttgattcaaggccattttccaagaattgatcaattgaagagatgagaaaaagagagggagagaggatcgatttaggctaagaaaattagagaataatgccttttcattttgccaaaaatccttttagttgaaaataaattaaatggcaaaaaaattatgcccctagggccaatatataacatatgcacaactcaagggcaaataagtcattctatcacacaccacattaaataattttttcagaatattcaattatcaataaaataccaatataaaatcctgaaaaggtatttcagccccaaacccagttcggtccgagatacccgattgtgactataatgcaccgacttgttagaaaacacctgcagaaggacaaaacaagtatactatataataatataattccacattaatacacatttaactagttagggtttgctaatccgtttcattaatcttaggacattacaattatcccctccttatagaaatttggtctcgaaatttacctgaacaactctggatatttctggtgcatatctgtcttgagttcccaggttgcctcttctactttactgttcctccataatacctttatcattacaattgtcttatttctcaagactttttctcttctatcaagtacttgcactggttgtttctcgtatgatagatctggctgaagttccaatgcttcataactcaggatatgggacaggtctgagacatacttccgaagcattgaaacgtggaacatatcatgtacagttgtcaggcttggggcatagccaacttgtaggctacttaccctatcctctcaaggatctcgaaaggtccaatgaaccttgggctaagtttccgtttcttaccaaagcgtttaatgcccttcataggtgacactcagagaaataccatatccccgatctgaaaatcaatatctcgacgcttttgatccgcataactctttttctactctgagtcgcgagcatttgcgctctgattttatccactgcctcacttgtactctgaacagcttcaggacctaaaaactctctttcacatacttcatcccagtgaataggtgatatgcattttctcccatataacagttcatagggagccatcccgattgttgcctaatagatgttgtatgagaattcgattaggggaaggta

SEQ ID NO: 235730 - DNA, 656 bp, Cannabis indica
ttgaaggacaaaacactaaggcccaggacaatgtcaatttgggtacctgatgatgcctgggagataactcactactcaaaaagtattttctcttaattccaagtctcatatcttgattttggagcaaaacaagattgttgcttaagacagaattgtaatcgaatcaacgaaaccaccaacggggtgctatgttaacttgggtgcctaatgattggggtgatgtcaccttgggtgcctaactttttatctagggcctagatggcttcatttgcttcccaaaagcacttgtatctttctcgtggacaaaaataagggaaattcctggaaaatttctctagaaagaagtcctaaagtgccctaagttgagatatatcaacctaggcgcccatagtggcctcaaggcatgcactgagcgcgcaggtggggggcaaaatcttcaaaattggtttcattaatgctcagtcttttgtttgcaattccaggaatcaaagctcctgggccagatgaatttactagttgtttctttcaagataactgggaattacttagagatgacattagtgaatcagttctcttgttcttgcactcaggtcagattcccaaggagatcaacactattgtactaacacttattcccaaatggaagtgccctaata

SEQ ID NO: 235731 - DNA, 1545 bp, Cannabis indica
gtaatgttgagctagtgatataagttatgcgttaatttctaagtttacttttttttattattttaaagattgtcattctaatataactttgttttttggtttggtgttgcaatattttttcagatttggcgacaactattattaatgggaaggtgttctttcaatgtgatgaggctttgtttaaagatgttatggctttattgtctaaatttttggggacagttttgtcccatgtggctcgcgattagatttttgcagctcatggtttggcaaaacatacccttcagtttgacaatgagttatcctggtttgaggaggttccaccgccgatggtagtttgctgcattgttaattatgtgtgactctgttcaccacgttaaaaacaaaataacaaagtctattttagtagctcatgaatttggtttgcatattaaatttggttactttttggttagttaaatagaaaaagaaactactctttaatgtgatcatttttttttggaagaaaataattagaaactttatattaaacttcaatctctgctaccaaacaaggcaacaactcagttaggacatccccaaactgaaaacacgatcaggataaaaactagaagctcttgcaaatgaatgagctactgagtttgctaaacgttttacaaaataaattaaaatattacccaactccaagagtaaagccttgcactcctgaataactgaaccgaagctagaaatcattctcacagggctctggattgcttggatgaccaacaagcagtcggattctagtgtcacatgttggcatcccttggctttgatccagcttaaggcctcacgaaccccaatcgcctctgctaactcaggtctaaccactcccaaataagagcgtgtaaaaccctcaattaggtacccaatttcattcctagcaacgaaaccaaagccatagccttgtgacccttcaaagactgcagcatcgacattaaccttgacaccatttgaaacagggggctccaccactcggctccatccccagcagccagctgagatgactacaaaggagtttgagcggtctttcattggccaagataagtaacagtaaaagcaacagtcgaagaagcattaggcagcttgttattccacaccttatcgttccaagccttccaaatggcccaacaaagaacagcaaccaagcattggatatcattggaggtagaatcgaaagtggtggcacacagagcacgtgacaagatcatgtaaaatggtttcatcatgagattcgcagatcgggcatagactagtaacagcaactcacttggtaataagcatgaccattgtaggcaggcagtagaaagctcctctccaaaccaggttcttgcacttggggggaatcgttcaatctccatagattattccaaaaacccaaaacatccacatgattccgagagccattcaatttcggcaacaaattgaaagcactctttacagtgtaatcacctgaacattccggaaaccagtagaaggaattcggctctgcattagcttgaattg

SEQ ID NO: 235732 - DNA, 727 bp, Cannabis indica
aataatcctatcacgaatgcccaaaataggaatgtgagtcactttgaatatacaatgttatttgttaattaacaagagagatcaaatttattgttactaattatgcatagaggtattgaaaataactttatgtaaagttgttttttagtaggtgtcattgtttcattttatattcatctttaattttattttcttattttttttttataattatttgtcaaaaacaatcatatccactacaaaattaatttttttgtgaatatgatatgagaagagagattatagtaaaaaaaaaaaaaattacattgttttttgacttcaccattagagaatttatgaatctcaacctctatttttctttttaaaaaataatcaaagctcttaattttggttataatttaagttctttgataaacaacttttaagaacttttagagagagagggaggagaaaaaaaaaagaagtgaatgataggattttttttaaaaaataattataggaaaatacttaggtagagtcacgaaaaacgtctgtatatattgacaatttttttcttcattatgtgtcactctagtattttatacaaataattaattaattcgttttatattatttttatttctttttttaaataatttggtgacccctaataagaaaattactaatatttaatattgtgcactcttaagtcttatgaaattccgtattttaatattcccagtttgat

SEQ ID NO: 235733 - DNA, 1112 bp, Cannabis indica
aacatacttgtgagtagatctaagatcctggtaaaataaattccaacacataaatcatatcagaccaagttgtgtagaaaagttgcataaagaaaatagtgactaaacaaatacatgtgttttaaaaagcaccaagttgcatctataaacgcataaaaagcataattcgagtatgaaaataccaatgtgatactatcaaatagtacttaaaacaggatacatttatcgatatccaatataatactaaatatattgatactgctattcgaatgtaatctaataggcttaacaaacatgtacgctaaacatgtaaatatttatgcatatcattgtactaatcttacctcacttccgaattcaggtgtgtcggcgaacctgagtggaactgctgctcgataatttacaggcccctaaatcacattattcgtaaaactgatgagtgacacggtaaatcacttttcagggacttgaaattgaaactaaaattttccctatcgatggataacatggcaataccctaaatattgcaaaaatgagaaaaactagggttcctaaaactgccccaatcggcagactggttccccaattggaagaccaattcagtggggttttttggggaccaactgaaaaactagggtcccactgaaccggtcgaccagttaagtgcaggaaacactcaaaaccttctacacaccacaattcgatcccaaactaaacaataacttccagattacctaattacaccataataaacataatccatgcaataaaaccagccaacaatatttatagcaaaaatcaccaatagagagaaaagcttgagttcataaactcaaaccttgctcaatcaccacaacaaccatcaaaacaacttagaacatctcaaataaccccaacataacatcagaagacaaaatcaaacaactcttaaaaccacagaaccctaattcctaaaaatatgcaatagaacctaacttgaactcataaaattaaaggaaggagagctaaggggtttaccttgagttgacacactaaaaattcagctagaaacctttgaattgaagctgaaaaactaaaattcatgctaccttcttgagagagagagagagaga

SEQ ID NO: 235734 - DNA, 1054 bp, Cannabis indica
tctacaaatttgaattggcctcgggacaaaaggtgaatgtgaataagtcctctattttctacagtgttaatactcacgctaggcatagacaaaatattaaccagatttttcacatgcgacaagctgacaagaacagtttatatttggggcttccaagcacattgggaagaaacaagtctgctgtgttaggttatttaaaagatcgggtaagaaaaagacttcaaggatcggaagcaaaaattctttctcgagctggtaaggaaattctgataaagacagtggctcaatctttaacaaactatgctatgagtgtcttcttgttacctattgagattggtaaagatattgagggtcaaatggcgaggttctggtggaacttctcttctaatggcaacaaaggaattcattggatgtcgtgggaccgaatgtgttatcataaaactgttggtggtatgggctttaggaacttgcgtgacttcaatctcgcccttcttgaaaagcaaggatggcggttgatttctcgaccccaatctttagttgccaaagtttataaagctcgttatttcccaaatgagagttttcttacggcacaattggggaatagtcctagttatgtctggaggagtatttgggaggcacaagacattgttcgaaagggcttacagtggcaagtgggcaatgggtgttcaatttctgttttagaagacccgtggctacctaatctgaataacccttttgtcgtttctcaacatccggggtcggtgaatgttaaagtccatagccttctgagattggaggacaaaagttgggatttagagatcttgcaggaaatatttgaggatcgagatatcagtatgatcaccaaaatccctttacaagtagctcaggagactgaccaacttctctggcatttagagaagtcgggtatctacacggtcaagagtgcttacaaacttattcaacaggaaaaagggctagttttttaggacaattactctaagctttggaagcaattgtgggcattgctcatccctccaaaggtcaagaatttgat

SEQ ID NO: 235735 - DNA, 668 bp, Cannabis indica
ttctcctccgtggtcttcatccgtataaccatcaattgtgtactatatattcccatcaatgtatatatatttccatcgtgatgaaaaaaattatttatatattttctagcaaactgtgaacacaagatcagagtagtcgtcacttgccttcgacggtcttcagcgatccggcgcgaccatgcctctgttcttccgccagcaactagcacccttcttccctcatcaacactctctgtttctccggcgagctcaacctttctctttttggctaatctccagtttggggcgccatttttgttcggaaattccaaacaaaatactcgaccggaaccgtgccagatctggttcgaatcacgaacgacgaagacaatataggagctaacatcagtcattagagctaaggtcaccttctccggcattagcatcctccgagccgtttccattgacgcagaaggactatgaatcgatataccagccgagtgatctggaggtggcaaaatcatcgtaattattacctccaacgaagccagaggtgtcttctccgacttcagtgatcttcgagttgccgtcgtcatcgtagatcgaaccggaattgattgcgatcttcctggattggattcagttgagatgtcactgccgacaaggttgagagccttctccgatggctt

SEQ ID NO: 235736 - DNA, 1221 bp, Cannabis indica
agtacataacatgctaatacaataatcctaaccttattttttgatgattcatagaaaaaggaaaagtcaatacattaaaaataattaaaataatcatatcaattaattaaaataatttgaatttatttttggtatgtaattacacagtgtaattacacccaattctcatggagggtatgagaattggagagaataattgaggcctcccaattacctctaattacacagttactatgtaattacgtggccacacaaacacgccaaactgtataattacctccaattacatctaattctaattcccaagtagctttctaaacgcgcccttaataattttttatattattcattaaatcaatctttagaaaacctcaatattcttttaatatacaccaataactaacatattgttatctctagtgtttggtaccttaaaatattcttttaatatttcttaactactaattctttactagacataaatgatatctaatatcaatatttaaaaaatatatatatgtacttttaagatttatttaaacaattttttaaaattttaattgatacttatactatttttcatcaatattcacctttttgtttttacgtaaatttatttttgaaataaaaaaatagttaccgaatacatttattttattttccaaacataaaataaaaatccttcagtttctatatttaaaacttttgagaatgcattaattctaaattattaaaaaatatatatgaaagaatatattaaatatatgactctcatctcatcatcaccaataccaattaattaatatacatataatacaatacaatctaaatagcaaatcacgaatgatatcatgataatctttaattaccggtacaattgtacaaacacacaataatatgattaagttatgcccatgaattatcgaaagccgcagcggtgatggcagtaacgaactcttcaaaatcaatgcgaccatcgccgtctctatcggcctcgttcatcattccagcgagttcatccacggtgagtgggtggccgagcttagccatggaatgagccagctcagccgccgtgatgtagccattgccgtcggtatcgaacatctcgaacatcattctaagctgttcttgcttgtagggagagcgagaggagtggaggagttcaggttcaaccatggccacgaactcggagaactcgactaggccgttgtggtttgtatc

SEQ ID NO: 235737 - DNA, 845 bp, Cannabis indica
atcacaattcacaaaacataaaaatcaagacaatatacaaataataaagaatggaatgtgttttctaatcctacttatgtacacacacaaaaatgttttaaaattgaaaaaaaaccattataaaactaataaacaaagaaaataaaacaaagcaactacaccatgcaaaaaaaacattacatacactaatttatggcaaacccataaaaaaaaaatcacaaaatataaaaagaaaaagaatacaaattactaataataaaacaaacaataagaaagttgcaaaattgaaaataaccctaaaaataaaaaaacaacttaaatctaaaaaaatttcaaaacaataataatatttctaatcaaacattcaaacataagaaaaaactaaaacctagaataaaatcaagtgtaaaaagacaacccataacatatgtaatatttaaaagcttaggcaaaacaaaaatgaaacgaaaataaaagtttaatgatttcgtctggttgcttcttcaacttcttagtctcagggaaataagttttttcatcctcaataatttttgatttcttctaaggagaatgacgatcacatttgctaatggggagagcaaaataattagaatcattgtctttattaatagagcgtttacctttagctttattggctagagatttaacactcattttctctaatttttttaacaatggattgggggaatggagatggtggagaagatcaaatttttaaaaagaaaaaacgattttggtttttgattgtggagagaaaatgaatatcaaaactgtagttgaaaaattgaattgaaaactgagaacaataaagaaaatggtaagaa

SEQ ID NO: 235738 - DNA, 1086 bp, Cannabis indica
tttgaggagggtatttttctaagttttattacaaatgctctcaatgaaagaactaaattgttaacacatatttttgttaactaaaatattagcctttttataataaataaattgtagaattgattatatagcaattaattatctaataaataataaataacaaaaaagaagattggtcgtcccttttaccctgggttttgtccctatttatagatgcacggggtgttagttattcccttaggatctactcattcataattcttcatgaaatgtggacattccccatgtttcatctttgtgcacatgggataatattaaataaccggtcaacttttctttatctttattcatagacggttatgctgactgtgttggatggttctcgccatgtacaagttatctttcttaaccatcttttgtaggaaagagtgttaagtactgagttacaatgcatcttgcggttctcctttgccgttgagaaatgtattagcaaggtggctacttccacacgtcaaaagctaggtgaatgaatgctgaagtttcttccattccttgaatgtactcacgagtatgtagatcaatgagctgtaagctctttgtttactcgttttgaaaagctttcattgtgcattatgtttattctaagatggatatgtttgtcttgttgatctctttagttaataattattgctcatcatctcgctattgcctatatggtggcgagttcaaatatttttattaactgtatttcccgaggcgagtaatctaatgtgcatttaataatatgtggtttgaactggttcatattctagccttgatacacatgtagtttttatgttggtcgaaatttagctataacaatacttttgattttatagtgtataaatatctttgtaaatagctagagttattgtatagttatatttagggtgtttttttgacagcttagtctaggttgatttttttcctaatttccttgattgttgcctaattctattatgtaatcagcctatataaaggccacattttcatcaataatatcaaattagaagtatcattcccaaattactacatggtatcagtagc

SEQ ID NO: 235739 - DNA, 1036 bp, Cannabis indica
aaattagagcatctagacttagccatttttcaataatccatctcgtgagaataaaaactagaagtagacgtagctccattactgtcacgatacagggagtgaactactataaattattgtgtctctctttttatacttaacatatatctcattctcgttaatccagtgagtctctgcccaaatttttgagttaatatacataataaacaaagattgacatgaataaattaaacatatatctattaaaaataccattaaagttacccaaaacaaccaaataactacactaacaaaaatgagaacaatcaataataaaaactaattacatatgaataaaaaattacaagtcaaaaagttacatattaatctgaaaccagttactaactatatagaaaccagttacgaaaccacaatccaaacttaaaataaatttaagtaaaataataataattataataataataataataataataataattaaaaacataaaaaaatttcgcaatacactcatcttaaaatataccaaaatcatagcacctttacaataatctaaacaaataaaacaaaaataaaaaccaatttctaaaaaaacaataaaaaaaaaaagatattataacatatctcaaatttactaaattagaagaaatctaaaccgcaacaaacaattatgaaccacttagtaaaaatataaaaattatacataataaagaaaaaatagttatccactgaaagagttatccactttaataaaaaataattactgaacaaaaaatacctaaataaaaaaaataaaaaactaaaaatataataacttaacacccaaacaaataaaaatataaaaataaagatagagaagagaaataaagggtaaaaaaaatgaagaatacgaaaataaaaaaaaaaaaaaaatcttaatcaatataaaataaaaaataaagaataacaaatttttaactggtagaaaattaaaaaatacaaacaaaaaaaaaatagtttggaccttcaaactgaaaaataaataaaataaagtaaa

SEQ ID NO: 235740 - DNA, 1502 bp, Cannabis indica
ttgattttgtaagaaccgacaaaaaagaacaaaattctatggttcttggatactggatgttgaaagcacttgaccagtgatccctcaagatttttaagctttaaaagtaatgaaagtagatttgtcacttttggagataattcaaaaggaaaaattttgggcatttgtgatattagtaatgtatattctccttgtattaaaaatatgtttcttgctgacaaccttaaacataacttgcttagtattagccaatatgtgataaatgtttttgtgttttgattgaatcttcaaaatgctctattgagaatgcttcaaccaatgaagttattgttgttagagaaagaaaggataacgtgtatgttattgatgttgattcgtttgataggaaaaaaaatgtttaaccattgtgaatgataattcttggttgtggcataggagattaggacatgctagtatgaattctattgtagaattgggtagaaaagatcttgttattagtttgtcatctattccttttattaaagatatactttgtgatgcatgccaatttggaaaataaattaaagcatattttcattccaagaaagaaaattcacctactagacctttggaattgcttcctattgatttatttggtcattctagaattactagtcttggtggtaaatactgttgagcttaagtcaacgacagtgagtcaaattaaatcgattagaattagttaaataacaatgattatgacaatgataattattgacctcacttttagccaacaataataggttaaattaaagcgattgcgaataattaaacaatagaaagtaaatcgtttaaagtaaagaaaataccaaatttataaatgttcgaccgttatagttggtcatagcctactccctttttttgttatattaagttgtgagcaagaatgagttcttctatctcgaaggctcttacaatgacctctgagcaatttactcttagatcgtggtttctctcttgagtgttctatctatgaatttttttgtctccttgaatagtgagatgagaccactatttatatgaattaattacatgaaattttttccctaaatcaataatacatacaatgagaaactaatttatttccataattataatgaagaaaataggaaacttagactgatttcctttattctttgaagataagaatttatcccacaaatatagtgatagtatcgtgattctcaagcttggagatatatgagatatatctcagaaattactaacttgcatcccctagacggtgcatgcgagctacctgcttagtggagctagtcagatgtctattcatgatctgctcggacatcctacaatctatatgtaactttaagagtcatctgcacaggttatgaaatacattacacgtgtcacctagatggattccacatcatagtgacaaaatttggataacatttgccgcaattccgcacaagattttctggtcgcacgtggacttattcagc

SEQ ID NO: 235741 - DNA, 773 bp, Cannabis indica
aaaatagggcacgcattaggattttatgcatacgtgtcgcatctcgagaattatcagcattttttatgtcttatttttcatattttctttatatttatccatgtattgctgatgttgtgtaatgtaatggtaatgatagtagtagtaatataatgaaataatattggtaataaaaattaattttcgcatttaatttgttattaaaatgaatattaaaataaataataaattgataaaattattcattttaattttatatttatataaagagaaggtattataaagttattttagttttactttatttatatttttaatatttttcattatgtatactttttttaatgtgatataggattcaattatatgatataattattattatattataattaattccattatgtgcaaactaaatatatatatatatatatatattataatgggtaatttaattcaattacaatcactataacaaatataagtattaaggatgataaaaattactcttaaaattatagaaattcatccttaataattcgcgcttcaaagcactattaaaggtgtcaaaataaacatgaataatacaccaattttcgaaatttacttataattttaatacccttaaaatttgctcctaaaaaagcgtgttaaaaaaaaatctatttttgacttctaagagcgactatgtcactcttaaatgtcgcctttaaaaatttttacatttaaaaatatatagttttataatattaaaaatattgacatttaattga

SEQ ID NO: 235742 - DNA, 1896 bp, Cannabis indica
cttgattatcgacatattctcaatagtatttaattagtcttttagttgacatgtttggccctacgtttactgattatcgatgggttctctgtaggttctttataaatattgattgcaattgctcaaaagttttggaaattaatgataatttcttttaatttatgtatgctttattatcgacgtcttgtcgatacattctcgatagtattaattagtctttaagttgtcatgtttggccctatatttactgattattgatgggttctcggcaggtcctctataaatattgattgtagttgttcaaaagttatgaaaattaatgataatttcttttaatttatgtatgcttgattatcaacatattgtcaataagttcttgatagtattaattagtcttttagttgtcatgtttggccttacatttactgattatcgataggttctcggtagggtctctataagtattgattgcagttgttcaaagattatagaaattaatgataatttcttttaatttatgtatgattgattatcgacatattatcgataggttcacgatagtattaattagtcttttagttgtcatgtttggccctacgtttactgattatcgatgggttctcggcaggttctctataagtattgattgcaattgttcaaaggttatggaaattaatgataatttcttttaatttatgtatgcttgattattgatatattgtcgataggttctcgatagtattaattagtctcttagttgtcatgtttggtcagtatttactgattattgatgggttctcggcaggttcttgataggatttagtattttttatcatgttttcctctttacgtttttttttttttaattattgtattgtttatcttttacagatggctccagagcttattattcccacttcatcccacttttcaggtcgtgtgagatatagagggagtggaaattcacttcaatcgtccaaaagtttaaaaaacgtgaaggattaattgaaataatgaagggaacccagtatggttttacattggaagaaacgaggcaagatttggcatggttgagttagctctcataaccaggttgaatttcacgcaaggaccatccattgaggagaaaaatgctcacttgggaaacgaccggttgttgaacctttatttcaacaaatcttggaatgtgaagatggaacatcttaatgcccaattcttaaactgtgagattgccaaggacgtttacaagctagggttaaaatgaaggctaacatgaaggcttatgtattcttttcagaaagacatggttaaaatgaaggctaagttaaataagaaggaagtcactgagtcggcggggtacacaatttatggctacaacaatacaatattgggcctacgatgcaattttagaagttggaaagaagttcgttgttaatcatgggatacaagattccagaatgcttagctggagcagtaaggatattgatggaagttatgacattctaaagaaaatacttgcttcaatattttctaaaaggatatgattttttctattattattgtattatttatattttattgatatcattaataagttggatttttttctctctgttgtattctgtttatttttttttgtttgcgaaatgattctaacatgtttttttcaacggcaactgattgttttaagagtgttactttctcgctctaatgaagaagcgtatgccagaacaatcacttacaatgatgttgaaatagtgattaagatgggtgtcaacgagacccatcctgaatatgatgcccaggaccctagtgttcttcaaagccatgcagaaaaagtcgcataacatatcaaatatgctactgttgcattttcttcaggcctcgatcgtgtgg

SEQ ID NO: 235743 - DNA, 1870 bp, Cannabis indica
atgatgaaatatgacatcaggtgtaaaaatctctattactaatgctattagagttttttagttaaatttttgttacgatagtatctgttatatttatttaagattatttataaatttttttaatattttttaataatttataatcttaaaaataaaatttacatattttattttatataattatttttttatacagctaataaataatcaattaaattttatttttagtactataatttatttagaatttttttaaaattcataaataatcataaatagctttaatataagtgattatatatataaaaattaaactaatttttttattatgccgaaatagagaggtgtacagaaatttcattagtctttactagcaatacgtatcattatagggcttatatataatatgtagttttcattgaataaggcaattcaatcacattcatcttcccaaaccagtaattgtcatgaaaaatatatatctatatctattgttactatagaagaattgaaatatgagacaattttttgtcattttcttaatcttttaattttattattatacatttaatcaaatttatatgacactttggggaaatgtgttttctatttttgtctttttatctttttcattttcatcaaaaacttgattgtttgcagaataaataaatcatctctttgtttttattttttatatagactttttaaaacattataacatataaatgattgtataatgttagcctttatttaaataatactttaagtttgatctaaatatgccaaattaaaaagtatatgtcctatactatagtgctaaattaatgcatataaagtagaaaactttaagtttgatttcttttattgacaaactttaagtttgatttaaatatgccaaattaaaaagtatatgtcctatactaagaagataagttaatttacaaactagaaaatatttaattgtgtgaattgagtccaatgcatttgaagtggcatatgataaataattttttcttttaataattttttctaagctttcgaggtattttaaattgtattcaattttccaataaattttcaagaaattcaaaagataatttaggattccaaaattataagaaacaatttcagcataacatcttaacctatgtgtaatttttcaaacatttgtaataattactctattactatattatacatcatcataattttttaaaaaaactataattataataacaaaaatataaaatgtatctataaatagtaattaaaaagttttttaaaaaaatgattaaaaacaaaatattttctagacaaattttatctaacttagatccctactaaataaattattacgaagcatggattattaacagatgaggtgtgttttatttgtgattctcatttggaaactactcatcatgctttatggtatttcccttcttaatcggagtgtcctaagctttgggatgtctttctaggggatactatgattacgtgtcgtgatttttatgacttcattcataaatttcttgatccattatctttagagttgattttggttatcatgtggagaatctggtttagaagaaacaatataattcacaataatacgctgctttagccaaacattattgtttcatagggtcgtgattttcttactaattaaaagaaaatagtttatcagttgactgagattttacttgtaagtcactgtgatttggttggctctacttggatgtcgcctactattggaatagtggaagttaatattgatgctgcccttgattctttacatcacaaatgcggtttgggtatagtggttcatgacttttcagaatgttctatttgaatctaattgtttaaatgt

SEQ ID NO: 235744 - DNA, 942 bp, Cannabis indica
tcaacctgaaatcccttcagatctgatgacgaagttgacactgaactccctttcagttagaactcagcaactccaggctctgatcttttccgccattgatgactatcttcaagctatacaatcaaacctgtagatacaacaacaagaatagcaataactcccacgatgacaacagaattaacaaactttacgatttaatggataaactgtttactgaatgagaccaactatatatacacacaaaacagtccacctggcactaactaacacttaacaattaaccgactcaacaaaacgctagtgcagatataacagaaaaaaacttcagacacgactagacattgtacataactaaactgtcacaaaataatgacacttacagtttataacataaaaaaaatatcattatacaactaatatatatatataatcaagcatcaaaaaatatatatataatcaaaataaaaattaaaaatataacttaaatatacgtgcattgcatataatattaacttattgttgttaaaaagagtaacaaacgaaaaaaataagtatattccatattattatataggagatttttttttatatagataataatatctttgtaggtggaattaactatgttttatattatatgtggaagaatctcttatctttctccattatctttttttttttttttgaagaaaatcgtacttatgataaatagcaaatcagttagatctcttgatcattacataatagttctgcagagatagttgaaagcgaaatacaaccaaacctcttgtgagagaacgcccacttagttacattatgggcaacaaaattattaattctactaatattagcaaaaatacagctaataaacgaaggagaagacttagtacaaaaagaggtatagttttcaagtgcccaatgagactccttcccattaagagc

SEQ ID NO: 235745 - DNA, 1222 bp, Cannabis indica
ttttttttttttgaacaaaaggataaaattattcaaaactgaccaaatacaaccaaagcaaggctcagccgaagcaacaaccaccaaagtctcaccagctactaattacattcatgattctatcattagcttttgtatttttacaagcaaagtccattaccctaaacttgaccaaccttctgatatctctacttataacagcagtagaaaaacacatcaaattaaacacagctatttctatttttccacacccaatacaatatcccagccaagacagcattagtaatctgatgctttaaatcaaacacagttttgattccaatcctagagctctatgatgtccctcagccaactatacaccccaaatcctgctaatttctctcaacaactttgtgaagtggcagttcatgaagagatgattatgagtctccttgtccggttcacaaaccgggcagaggttggattgaataggaataattctttccaatttgttcctggttagaagatgaaaattgcaggcttgccaataaataaacctgcgctttggaatgataagcctatgccaaacagccttggtgtaatcaaccacctgattatcaacaagagaagcatagaaaagtttagcccatgtttaacaaacttcaacagatttgctttattagtgtactcccttatcttcaaaatttttttgaagtaccaactcatattttgatttatcgggacagtccatatgttgaacttcttgaggtagatagtattcacccatctaacccaaaggcaatcttttttacttgaaacagcccgaacaaatttggccatcatagccaagttccatttctttccttcatagaagccaatacccctaaatttcttaagaaggcaagtcttttcccaagagggaagatgaagcttactcttattacctttaaaaccccaaaggaaatcacgacaatatttgtcaatagtcgaagtgattttcttatgtaatatgaataagctcatccaaaaatttttaatgccaagaaggacagaatggataagttgagacctccctgcaaaagaaaaatttctactagcccagcaattcaactttctattcagactatccaagataaccccacaatcggatgctttccatctagtaggcaacccccaaatattttaaaggaaaagaatcctcttgcatttggactaacctgagaatttgaagcttagactcttc

SEQ ID NO: 235746 - DNA, 1436 bp, Cannabis indica
actgatgaataccaaaattaaggctttcccactcaattcacaaatatatttttacttaagataaaataatcaacttagtctttcaaacattctcttaataataaattaagttgttattttataagcaagtgacagcattcctaacgaatttcccgaactccatgacaacaaacagatactagcttacatcaaggcagtaaaacaagactccactgaacgatggaaatacaacatcacttcattccttgatacaattccactctcaaatgaagaattaatctctaatgcttcaacttcccatcctaatccaactccacttgtgactcttcctgaaaagaaacacaaagttacaactcacgatgaaaagaataaatatgaagctactaacgaagataaaaacaaccacaaggcttctaatgaagatcagatgcagtagaaagcttgggtgtgcatctcttctaaataggcttgctcttttgttgctcttttgaaaattattttgaaagttccatgatggaatacatatgtaaataggccacttgttggaacactatatcataggcttccagttttgaaagctccatcactactagattttcaaaatctcattctatatatataaatatttataaaataaagtatatacataaataaaaaaaattaatgataaataaacatatacaatatatatagaagttgataactttcatcactaaagtagaagttgagatttcagatctccttctcctctagttaagtgttaaattatgttgaaattattttattcatataaattttttataaataaaaaatttaccacatttaaaatttaatgtgtgccttaagtagaattgtagtaatatttctattttgataatatagagaagaaatttgaataatagaatactttttattttattttagcattttattatagataattttcgacaaaagaaaaaaattattttaaattttagcattgaatataaatatgtactacaaaaattttatttgatactaaattaaaatttggcctctttagcattcaagtcctggcttcgcccctgactagatggaatgaatatgtaaataaataggccacaccttgggaacacttaaacaatcttttgagttccattacaacttgaaatgaacgtaaaccacaacattaaaagctactattatattgcaacattaaaaagttttatcaccgtaaattactatgaagtaaattattatattaatgtcaatattttacgtcttatatgctatccacgtggtaaagcctcactagtatagtatataaaacagcattgctattaggcaccagtggtgcctagcacctccttgacatgtcacgttgcaattggctagcgatactcactacaaaaaatcttacttttagtcacaacaaaatttgtgaccaaagataaaaa

SEQ ID NO: 235747 - DNA, 738 bp, Cannabis indica
gcactaatcaccttcaccggagaagaaggtctgggcagtgaagtcattttttccattttagtaacttataattatcctttttaatatttagccaggtggaccaataaaataataattaagggtatatatgaatgctttttcattgaccaaatcaactaaataataataattcaaatctaattttaattcaatacactacaacctacaataactttctaaaatttttctatgtggaccaattatactacagcatagtgaaactattaatgagtctattttatgggtgtctattaaagaatttcccaataatttatattattgagtcttacacataactactcacatcacaattctcagtattggattttttttatggaaacaatagattcatttaaatttgtagatagtttaagtgacattttcaatttattaagaggtttagaaatatttaaaaataataatctaactatgcggttaattagtagttgtcctaaaaaaataatagtcatctttcatcttttttaatttgaaaaaattagaacagcttaagttttattttcttgaaatatcattattcaaaatttccacaaaaatcattaccaacaataattaatgtatgctttggttattcatattcttattcttattgtaatcatcaagaattttacttcggtatctataattatactacttatataaatattatatgtaatatatttatttataaaattaatttta

SEQ ID NO: 235748 - DNA, 979 bp, Cannabis indica
acttaacagcagatccttcatataatatcataatttgtttggagagctataatttcattttagccttggtgccacgctaattttttacatttctctgtacttgttctcaacttgtattataatttttttttcctttaaatatatcatttcttgtcttcttcagtccttatctcttgcaagttatatgtatactttttttaatggcaaatagtcatcatattaaaacttcctgcaacgtttttggaaagaaaaattcttgctaattgtggatgtgtctaaactgaaggagttttagattatatatggaactaaatttgagctatttctattggtgaaactgaaaagatcaaaatgctctagtagaaaattttgtcaaaaatcaccaatactatctaaaaactgtcaatgtcaaaaatttatttccattatttatctatggttagaacttgtgaagcctatgccaaaaatggggtcagacccactcattctgattcatttctgatgcctgtgcttttatgtatctacacacttgaaacacatgaatgatgttatgtttcactgtacaaaatctacaactacaagaatatatatacgttatataataatattataataacatatccattgcatgggttggtgttgtggaagacaaaacaaggcagagccctctttttcctttcctacctatttttttaatgaaattccaaaagataagatcatataaaaggaaatgatatgaatccaaaattcaaattcagaggctaactaatgaatcggtgcgtgtccacctatgattttcttatgaaggatccaaattgaagttacttgatgaacaaaacggtgacaagtttcaaaagcccataagtgtagtgatgtcagattcagagccattatttttattttgtttgaaaagaatttttctttcaaattaattagaaaaagcgtaatgtggtgggacaaaggaaaatatgcagaatct

SEQ ID NO: 235749 - DNA, 756 bp, Cannabis indica
ttatatagaatagatatacacattgatttaaagtttaaactagtttaactgatgctcactaattaatatttcgaaaaggaaaaaagaaataaagttccgtatacatagaattgaaatcatggtccgtacgcgtattcttcacaaatttaattattaagacccagttaacgccatgccaagaataataagaataaaaagaaggatgtattatataatatgggacatattttatagtatattagatggatctcagagtacattaaatcaatatcagtgtaaattactattttttaacatatctatcctgcctatataatatatagtataattatagtacagttggaaatggatattaaagaagcaattaattgggtgagcacaaggtcaaactaattaataattcattttggttaacaccagccacttattatcttaattagtacaatcaacaatgtatgatttaactaatgatttcaaattgtagtgtaaagtcggggaccatgccaaagaacgtggaacaatttgttctccttttcgatgcaatatcattgacagaaagttaagagaggctcttctcaaaacttcttcctatcaaggtaacaattaaatcatcatgattttaatcttctcattccatctctttcctccattcaaagagaaatgtttctggaagaggtaagattgatggagataagatgaccagcggccatagagatagagaggtaaagcttatatatgatttctcttacatttatg

SEQ ID NO: 235750 - DNA, 1546 bp, Cannabis indica
atatgactttaaaactaataattaagtatataactttatattattatatatttaatcatttatattatatataataaaaactaaaaaagttaaaaaaaaaaataaaagtgcaaaatcgggttggtcgggttggtcggtttaattgggcgggttggacctattttcaacccgcccaattaacagattgggcggtttgtaattttttcgggttatttcggtttgtaatttttatcggttttttcggttcggtttgggcgggttattcggtttaggcagtttacaattttttttgtacagccctaatgtctcctactgagactctaggactaagcgggaaccttttccttgaagaggccgaagttgcgaacactgccaaagtcgcagatagtactgccaaggtcgcagaagatctcaacacccttgatacttaatttatttcctttttatccaaacttctcttttttttagcgatacatgggtactcgaattttgtacttggtttttaagataaatctgttcatattttgatgtcagtttgtatgaacaacatatccttcaaggatattcttttgtttcaaaacttctaagtatttttatacttgtgcattttcatgcgtttataattgcaacttggtgcttttaaatgcgtattcacttagctgctattttatttatgtgaccatctttcacaacttggtgtggcgatgtatggacatttcgatgttcacattataaatggaattttcaaaatttctaagtatacaactgtgaaaacaatgaaaaatttcaaaatttaatgattcattggataatcaatagtacaattcaagaaaagggaaggcagcatatatacatatatattcctcctaaaaaaattgaataagtatatacatgcgggtactattggtaataatacttcaaatgtttgtcgttctaggctctatcaaagactgagtcattaagattagataagcagtatgttacattcccaatcatttcagtgattaggtaaggaccttcccaattgtcactgaaaaccccatgcatagaattgtgcgtattgggtaggactttttgtaataccaagtctccttctcacagacacttttctttaactttggagttaaaatagcgtgttgtgcgctattgataggctatgtttttaatctgagcatgattacacctctcttccagtagatcaagttggagtagttggtttttctcgatgttttcaacattaaaaacatctcttctcaaggatctagctcctacctcgaccggaaccatgacttcgcacccataagaaagtgagaacggggtttctctagtcgtggagcaaggagttatattgtacgattacaaaacttgtggaaattcttttggctgaacaccttattgttcttcgagcttgccttttatggtgtgtttgataattttgttgattgcttctgtttgcccgttactttgaggatatgaaattgctacaaaagccttttgtatccctagatcatcgcataatttctgcatttccttgcaatcaaattgt

SEQ ID NO: 235751 - DNA, 886 bp, Cannabis indica
ctaggggtaaacttcaagtcaaaaaaccaatggacctcccgtggagacggcacgccccatccttgaatggcatagagggtgaacagggcagataagtacttaatgcccttgggagtgaactaggtttgacaaaggcaaaaaatagtctaccaccctcttgaagtacgggtgtaaaggcaccatcgccccttgtttagtgtgagcacccgaccaagcacaaaaccctttctgtgggttttttgcctggtgcttcgaagaagggacgtaacactccagtctgcccaagtacccagccttatccaagaccctcatgcgcgcctcacttattttggatggagggctcacccatcttgcaccaaaggcactttgcctcttctgaggaactgcttcagtaagctcctcggtgacatagtcctccccttcaaccaagacttcaccctccgcagacacctgctctccgacctcattatacctccaaaatttggaggttcagccactccttcctcctcgacctcggaagggctaccaggatggacgtcgtcctgctcatctatctcatagacctcaatgtccccctcatggtcttccacctccatggcgggcagatcctgctcggaacttggcaatgtggcgagtagggtcacatgatgatcagatgcgttgacttttcgcatcgtctgttttgtgcgggccatcatcctcctcccgaacgggtactaatatgtgtgtcgtgcaacagtgacggcatggacagtaattggaatgccaaagttaccagcacttggacggccaacaggaagggtatcaacaacacttggccagacaatatatgtccagttggacggaagataatgttgggttttgtgccctaaataaaacccattac

SEQ ID NO: 235752 - DNA, 732 bp, Cannabis indica
ataatactcatattttactttagccataacacacactcaaaaaaaaattaggcccattattactcagggtcgaccctgagaaaaagaatatcatgtataagatctataagctatactcctcttgttgacctcccttctagccaataacagtgagtcaaaataaagtgatcaaataagataaataaaagaaaacaaaaacagtaaagtaaaatgaacaccagatttaaagaggttcagccccgcgagtatggtaatagcccactccccttgtatttgtattgataagagagaaggaataaagtgttcttcctcttgaaagctcttacaatggatctttgagtaatctctctcttagatctctgttctctctcgaatgtttctttggattaattctctgtccccttcactagtgtgatagtgctactatttatagaagcttattacatgaagaatggtttcccttaatctataataaatgagataggaaactacatcaatttcataattataatgtaaagaataggaagataaagcatattgccgttattctcgaactaaatcccacaattatagggatggtctttgtgtattagaagcgacgagactaatctctggaattgacaacttatataccctgcttggtacagataaagttgcatcttggcctgacatcttttaattatcttgttgggacatccgagtgtgacagatatttaaattaactgttaatga

SEQ ID NO: 235753 - DNA, 656 bp, Cannabis indica
atatatttgcattaatttttaatgttgtacttcaatacacaattataaaatttgattcatgcaaatttatgttcaattaatacatctttaaaatacaaaagaaaaaatatttatcactaattctattattattttattatctaaaagaatgtaaatagtttataatataacgtcatggtcaatagctatatatattaataaaatattaaaaaaatttaaaaataaataaataatagtgtatttataacaatataaattttgtattatgctgtattatgtgttaaattgagtataatttttgaaatgtatcaattttggcacaacttttaaaatattgccggagccagttttttgcaaaataaactatacgcatacactactacaaaaatgtgttttcctgacgtttttaaatagtcgttcaaagtattcccgtcggtttctataaccgttgcctatacgatcgtcgtaaaacgggcattataggcaacgattcaaaaccgtcgctaatgtgggtttctcgacggtttaaaactatcgcctgtaactgggtataggcgacggtttataaccgtgccttattaaaccgtcgcctatacgatagggcacggtttaaagtcgtcgcctataccctgttataggcgacgcttttaaaccgt

SEQ ID NO: 235754 - DNA, 501 bp, Cannabis indica
aagcctccagatatcatcctacgcaacgtcctcaagacatagggccccaccatgtcaggggtttgtcccctatgtcagacctaagtaatgcgcgcaacaccaaaacaaaaccacctttttgtccaacactatattctttgacattctcggtaccaacatagttgcacacgatacctgacatcaccaagtcctccccactcatatggacgaccattatcttgtgaattgaacttcacctaattgaccaaaaatcaatatatagtgtattttatccaatcggtgggcctagttgacacttctaaatcttaacgggtctaggttcacccgtacccgattctagcatataaatataacattattccttcatgcaaaaggttgaaaatgattttttgctatcaagatctaagaattagaatttttcagctagggcaaaatatgtaagaatcttttgaaggttttttagttcaataatattgagtcgtggactaagattcattaacg

SEQ ID NO: 235755 - DNA, 2660 bp, Cannabis indica
tttaaactattttgttaattttttctagattatttattattttaacgtaaatatcacattacaagtgtgttaattcttcttaattgttttcttttaaaccaccacgagcaccatttaatttctcgaagatcacaaatctatatttgataattactatgttattatcaatgttcgaataaatatataaatataatcgatattagaagatatcaatggcgcaaaataattgtggtatggttaagcttccaaatgaaagagtctccaaaattatttcgagaaagttatctgtctcccggaaatatgttcctagacagctaacctgtcaatctggaagaagtcttgtagaatgatagtttccatccggaagggagttcccggatgactatcatgtccactttgggtttagtccataggaactaagctagccttcctctggaaaggagttcggaatggctagctattcctcttggaagggagtcctggatagacgagtccaactagttctgtcttatctggaaggtccttcagcgagtgtctgggtccgtgattccaaaagccctcatacatgctcccagatgcactcttacttatgctgacgagatctcgctcaaagaagagtcggttaagttggttattttctaattaacttaataaccttgcttcttgcagcgaccgactttaggatcatgatcctaagcctataaataccaccaatacttatcatttcaaaaaatgtcagattgacgagtttcaagaggagactttgagtttgaaagagaaagatatttagagatagacaaagagaggtacttaaaaaatagagagactgggtttggatttttgtataaagaatcttctgtagatgaaaaaattattgggcaagaatgtgagagttgaaacactttgagagatccaacaaagaattctttcgattgtattgtacatgttctttctcaatcaataaagagactttggtggtgttccagaactggagtagagtcataattcacatagatttatcgaatttgaaccaatatatatctttgtgttgattttattgtttaccgctttaatcgtttttgaatttttaatactctgttcatccatattttctttaattactgttttgtgtttgttatttgtcattactttggtgactaaattttagttgatttaattctgtactttagtcttaattttccaacaatacataactcacgcgcctttcccaagcaaatgacaggtcatggactttgtgtgtattggagtgcgcatgtccattgagtggattcttgagaaattggtccagtttagtcttgtattcgtttccattaaagtgagctaaagattaagaaattctacattgagcccagattagtacgactcatcatctggttccctataaattaaggatcacactgtaatttataaaaagtatctgagttaggaaaaattctgccaaattgtatctaaaacctctattgctgtaacttttttgatttaattaatacaagtgatttgtgaattaattatgtcttattaacggtctaaaccatgttatgtctgatatgtttttttttctaatttttatttagctcacttattctcttctatcattattgtcatatttttttagttgacaaatattttagtaaataattattattgttatttctttttaatattttgaataatgacacatgtatttattaactagatttttctaattaatttatttaacattagttatttgagttgtataattcatgaaagagtacataataagcaatttatgagcactgaaggtaaaaaggttcctttcaaaaaaaagaagaaagaaagtaaaaaggttggaagagagagctcttgccttagaagacatcaatgttggtcttttcctattctttgtctatatattggcttaattaagcatccaccaatgaagtactcaatttggtcggttatataaaaaatttggttaacacaaatcacttgagtagaacctaagaagattaatggtcctctactaaactttatgtcatcaaagtttatggtggaaagcttagtacatcactcgaaagtatgattattaaattgatttattagcttttccctcaataacttttagcgaaattgctaagatgtgtagatagtcaataaattattacaatatagctttctcaaaaaataaataatataactcattattacaatagtagtagaagggagttagttaatggttaattataattagtgaaggattttagaaatggttttgctcttctgcttgttggttgtttattctggggctgagccactaggttttgatcagtcttttgacccttttgagatataaatttaaaaaagcacacacacacacaccatgaaaacgttggcgttttggagaaagacaagtcaaacaaagctatattgcaatttgcaagtgagtaaatatgaaaaggagttgtctgtatctctggtcccttggtttggtttatcttttggcaagcgtatatgactggagatggtgttaggcatttcttacatctaaccgcatgatttagctcctttcaaattttagaaaaataaatttttacactctctctgacaaaaatcttacaaactacttttgctatttaatttctttccatatgtccaaa

SEQ ID NO: 235756 - DNA, 2536 bp, Cannabis indica
tcacacattattatatatacatattttttctttattaaactattatatatgtatatatattccacctttaatttttcattgtaaaaaaaaacatagtatcatgataaacccccagtacacttagtttataccaggaggccacatgttgaacataagtcaaaagtgtaattggttaaacgggcttgttaagtatgtaagggtcttttagtatttttatcctttaactttcttatttgttttagtggctgctgtactaaggaggggtaggggttgtaatttgttgtttgggccaaatcctataaataggaggctgagaatctaacttaggacagttgggaatttagatgagtttttgactcaattgggagagacaaccctctcgaatggttgaattggagagactagcctctcgaaagctaggtgtaatattggccactaatatcaataaagtaatcattcgtttttgagggattaattctctggtgtgtgaaattatagatggaaacattctagtctcaagaaagttctatcaatttggtacggtgagcgtggacacgatgcctaagaaaccagtagagaaaagtgatgctaccatggtgtccgaagaggatcttgaggccctaaagtcagaagtttcaggactcaaggattctctccatgattcgcttaagggattggctttgcagattcaacaacagcttcaagaatcgcttcaagaaacgattcagcaacagttcaaggccctattggaagttcaagaaagatcaagaacagtccaagaaaccaggaaagaaggattagcaactgctgagagcaaggaggaaaatgagagagaaaggtcagcaaatagattggaacttccgaatagtaccagtctccatgaatctcgccggacagccatgggaacgccattgatgtcggaattccgtttgcaacaaggtgctgcccggagtactttggacaaggatcgtaacgatactcgatatcgtcatgagaatcgactaaaaaaacttaaaatgcctacttttgatggagaaaacccagatggatggatactacaagcggaaagattctttacctgccctgggtatgatgacgaggaaaaagtagaagcgacatttatctctttttcgggcgatgcccttctttggtaccaatatgaaagtaacaagcgaacgattcatagttgggaggaaatgaagcaattactacttcgtcatttttgcgattctcacgaagtaacattatacgatcagttcttgactatccgacaagaaggtacagtgtcggagtacaagaaacaatttatcaagttgttggcaccactaaaaacggttgatccagttgtgcacctaagtacttttatgaatggactacttccatcgctgaaagcagaattgcgaatccatcgaccccgaaacgtggaggaagccatggaaattgtgcaagatattgaggataagaataagttaacaaggcagcgataccccaactcaagtcgcctcaatagtcctgacattatgacaagggctgaaagaatcataagtcgaacttcccttgccaattccacaacggagattcgtaaactgactgatgctgagattcaattgaaacgacaaaaaggactgtgtttccgctgtgacgataagtggtctccgggacacctctgcaagaagaaagaactccaagtgattatgatacctgaaggcattgaagacgatgaatcaacgcaagactccgagaaggaagaagaagagactgtggggctggattctactgaagtacaaaaaaaagttcaagtatctttccaatccgtggctggtctctctacaaattccaccatgaaactcaaaggaaacctcgggaccaaagaagtggtaattcttatcgattcaagagcgacccataactttatttcaaaggctctagtatcaaagttgaacattcccatttcggaaactaaggcttacaaagtgactttggataatggggacgcaatgaactgtgaaggaatttgcaaaaatctgaacctacacttccaaggtgtggatgtttgggacaatttcttgcctttgcctttgggaagtgccgatatcatcttagggctacaatggttagctacactcggaatgaataatgtggattggaagttgcaaaccatggaatttcagattggcaaacaaagggttctaatcaaaggggacccctgacttgatcggtctttggtatctctcaaaacaatggccaagactcttcaagctgagcaccaaggcataattttggaattcaacttcactggccatgataccaacggtttgagccaaactgtaccagaatatttggctcaaatacttgctaattttgctgatgtatttgagatgccgagaggactacccccgatccgctcccatgagcatgccattgtcctacagccaggaacaactccgattagcgttagactgtatcgctatacttattctaaaaaagatgagatggaaaatttaatgtctgacatgcttacggtaggaataattca

SEQ ID NO: 235757 - DNA, 975 bp, Cannabis indica
cattcaaaatataaaaattcacataaagctcgaaacgagctttctaacggtatatagaactcccaaatcggagtccggatcacaaagttatgactatttgaagttcgcatttggatctgcccagaaaggaaagggcgggccgcggcatgcaaaagccatgctgcgtcacctgggttcaaaaccgagaaaattcaaaaaccagaaacgattttcatgcccaaaactcatccaattcaacccaaactttaactaaacctaaaaccattccccaatatataacttatcaacacaaagagtttaaaacataaattcatgcattaaaatccaataatataactctcaaagttcagcttaaaaatcaaccaataacaagcttctcacatgagcatataccatcaaaactcaagccaaagaacttgaacttcaagcaaggatcaacctttttttgtattttttctagaaattaaaacaaccaataaacttaggataaaaacataaaaaaacactttaatctcatccaaagtttatcaaaataaaatccattataagccaaccatttgttgacttcgcttttagccaacgacaatgagtctttttgataagcgataaacgatatgtcgtaataagaatacgtaataaagaaaataataataagaagacacagaaattttatagaggttcagccccgagcagttcggtaatagcctaatcctcgttagttgtattgacttaagaataaggaagaagattccttttcttatagctcttacaataatatctctgaatatataattcttagatagccttagcttatagcgtttcggcgtatgatctctgttttacagttttcgatcgatctcccttgcccagtgaacattcctcactatttatagggcaggaaacttgaggaggaagagtttcctctctcgttacaaagcgcataaacacaaagatcgtgtgatcattgctgaatgc

SEQ ID NO: 235758 - DNA, 1019 bp, Cannabis indica
aacacgtttatgatctatttatgacatgttaatgtactaaggtaactttaaataagttaataatgaattaattttgtgttagccatttgaatctgaacccgacatgtttattaagtctaacgttaatatataccgaaagtaagtcatttaagatgaatttaaatcccctactgactctcgtactaattttgagttatatatgttcatgtttgactcaatgaccccttttgcccaccttagtgtgtggaagaagttagtgttgtgtctcatccacaaacttaatttcattttctaataataataaattcacatataataaatatctaataaataaatatgcttggtagatgtgtggacacatgaaattgccctccccctctcccacgtacccaagggaattaatgccacatttattaataattaatgatgataataagtcaaaatttaggtattattattattattattattattattattattatttaaggtgtattgctattggatattagcagtgcctaataattttataagtggcactttataattagttaacgatatttgttaaatattaaaagttctttttaagttatacaaacctaatacttaattattgtaatagtaatatgacactaaagataatattagatactagtattactttttagcaattctcttatttaagtatactagcccttacctctataatatgtgtacaattacataattattatcacaaagattattatgtttatatttattacatttaattataaatatagtataattaaccaaaatatcacattatactacaaaaatagttttttctacgttttaaacagtcatttaaagtactatcgtcgatttttataactgtcgcctatacgaatgtcgcaaaatgggtaaaataagcgatggttagttgctaatgtgaacttctcaacggtttaaaattgtcgagaatgtaaaaagaaaaatacagatttttctacaattaaaaatctgtattttcccctatt

SEQ ID NO: 235759 - DNA, 667 bp, Cannabis indica
ttaagaacgaatcaaatcagattgttctatttctcaatataattttgccgtaaaaaaatcaacttgtggagtaaagtatcacacattgtatagttcaaataattttgccactaataatcctacttttaaaatacggtgataagctcttcaatgttatttttttttagttaccatgtttgaatgtttttcagttattttaaaatttatttatagcgtatcactagttgatttacatatttaagtgtttttgatgtcgtgccatattttcgttgtttttcaattattttcctttactgttttctcttaatgaagaagtcttatttttgtaatttaaatactttaaaaaattaaatttgtaaaattacaaataaaaagttttagtaaagccataaataatatctataaatatatgaatgtatttatgaaaaaaccccaaataaaaaacctcaaaagagaattattttttggcaaacagtagagatatgacagaggtatgcaatcagttacatgtccaacagcctaataaagttcacccagaaggagaatctacataagagcactcaaacagcacaaactaaagcctcaagcagccacataataaaagtttttccctctcaatttccaaaataccatcacataatacttttgtgtggctctccacatggtg

SEQ ID NO: 235760 - DNA, 2597 bp, Cannabis indica
attccattgattttagtacttctgacatggtcgtgagcacagtaacaaccccttgctcaaaccttttctgacgttattgatctaatgcataagcatgagccaagtttcgaacctcagaaagcagtttgacttgccaatgagcagagggcaagcgagaagtgggcgatgagctcactagaggaatctctgatgcagcaggggcagatgtggtaaaggcaatcacagaggaatgggcttgccaaacactggttgaaatgtcttgccaatagagggcacaggcactgtaacatcctgctcaaggaaagtcggattacctcttaagaccaacctctgaaccaaactaggataaagaagtgtgtgcttaacccctttagccttagcagagtccaacattcgggtgtagatcagtgacggtaaatcaatagagacaccagtgccaagagcatatagaaaccaagcagtattgtagttgatagtggatgtatgagaattggcccaccaatttgacaaaacaattttatgaagaacccgataaaactcagagagtatagtgacaggaaactcctttccattccacacaaagtcagatcgaccagtaacttcagcaccacatccttaaacaatggtttatactcatcactgaaataggggtgagctagcctaggtattttcagtataaggctgatggtagacggagcacacctaaactaagacccatgaatatatgcttgatatttgtgtttacttttttcatttacaatactttcatctagattagcataaaactcacagacaaggttcccattgggcgattgaaggtgtatcagggatcgtgtgtatctgaagggagttcagattgcattgctgaagagagttcagctggatagacacaagggagtcttgccttgtgaagtctaaggttcttagatgattttctgatttgtgtgtgttcaaatcagttgggtaatttctgtatgaattaattgcagattacttttggtgtaattgtaattgaaactggatagtgtatcctttgattcatagtgaaagttattaccctagttcaagggaatccaagcaatagttgcctgaaatgagttttcagggtcggatgaagcttgtaaatctgagtgttctctgtttagtttcttgcacattgagataagtataactatgttaaaacaactttaaagaaatcaacactgttagacttttcaattggtatcagagcaatattctaatcaatgaagaagagttagttaaaaaaagcggtaatccctgattttataataacaactcttaagctaacaaactttaacagctcagccaacaaagaaggacagctgtcctcggtttgagattactaagctgacttgtcaaagaaacaattagactacatggttagatgaaactaacaaccaggcagatgacaaaagcagcataatttgccacaaataacatctgggtcttacatccttaaattttgaacgtccttaaaatattcctgaattattaagattattgaatttaaaaatttttgtcaaattttagtaaaaaaagtctaacatgtatgaaaatttggggcatgatttagtatatataaaagtttgagagacatgatttgatagatatcaaaatttggagagtatagtttaatacgtaaacaatcacgtaaaattgaatgaattagacaaaaatccttaaatccaacaatcttaatggtataaggcaaccaaaaaaattcaaaaaacataatttagtacatactaaaatttaggggcaaaaatcagcctaacattattttaatataaataaagctttcttctgccattaactaacttattatccgagcttcttgtagagaagaaagaagccttcagtcgtagcttctattcaggtttttatttcattcaattcaattcatgttttctttttctttattataatcaaattcatacctttaattttcatctttgataaaaattaagttttgtaagccaaaaagatgagtttttttctttttaatttgcgtatatatgtacgtatgtatatgttgactgaaagtgtaagttgtttaagccatgggcagttgcagttgggtaaccctaaggtgggcgcaagtacaacctcatcatcaccatcttacatcactatcgccgagccgtacaatcggaggtggatgcagtcgtcgctcaactgctggaatcgcatataagtataatcggagagtcagaatctcgtgcaagagtgatgatggtgattatgattatgattatgagggagaaagaagtagaacaagcagaagagaacctgctccttctgcaattcaagtttattcggacattgagaggttggtagtagtatgagttgtatatatctatctatctactatattaaatcattcctttttacactttttttataaagtcaatatctttttacagattactcatggagactgtaaagcaatctcaacaaaattcttggggaggcttaaggaacgactggactgaagttgaggtaaaagcaatatccaatggatgcttaacactcacccgtgaggagctcatctagctcatcacgggctagcaggcatg

SEQ ID NO: 235761 - DNA, 813 bp, Cannabis indica
ctcaaaatattttaattatttatttgtttattttaaaaaggatcaaactatgtaccagaaaggcttcaaccataaatttaatgtacattggattgggagaagaaaaaaaaagtgcactcctcttgtttttttaattttttctttaacattggtaattgggaacctttttaccatacccaaaaagtaacttctttaccatttttttttatgaattaaaagatttttctttttacagtacgtaatttgtttaagatctacatatgaaaaagtccatatttgatagcatttttactaaaatgaaattattcaaaatagatatttatattatgttaaaaaaaatatttatactatttactaatcataaaagtaatatttataattttttttaattacaaaaatacaattaagattttaattctaaatgcaaaaagagagagtgaaatacacatgtggataagacgagggagtgagactcacatgctagtcgggagggtaaagtaaagacctatccaaaactatagcgtcataatgcagcagggactctgtggctacaacgtggcaatttaaacgaagtgagcttggacgtgtagtgttgttttttctccatgcaacaattatgcaaaaataactagctagcaacacaaaacagcttaacaagaatcaaacttcaaaataaatttatttaatcttaacacattgcattaacaaaattaaaatttataaataacactacaacatcctacaagaaccactaattgaacatataaaacaatatttacaaatttgcaataaatataaaaaaagtgtgaaaaa

SEQ ID NO: 235762 - DNA, 1213 bp, Cannabis indica
cactatataattatttttaataataaatttttttaattagaaaaataatatcatatttttatatttttttatttaattttatacttttatttttagataattaatgatataatttaattactatataccaaacttaatatgttttaatttgactatatataaatcgtaaataaaaaaaacactatataaaaacctatataataaaaatataacaatatatatactgaattaaaaaacacatcaaaaatttataaaggacataaacatctaaaatctctaatctttaaagaaaaaaaatacaaaaattaatagaacaaaaacctaaatacaaatcttaagttataaaccagatcttaaacatagtgtgggaatatgcatatccataatctggagcttccaagccttcggatttggatgttcttaggacctgaaaacaaaaaaaaaaataaaaaaaaccattattactaatagaaaatctaaaagaaaacacatacatagaattatcatgaacacaaaataaccatacccaaaaagagaaatctatacaatcttcaaaacccaaaaagtaaaatagaatagaaaatagttacaatcacatcgcacctgcccaagaacatctttcactgaatccatcttatttgatcacaaaaatatgaaaccccaaacttgttatcaaatatttccaaaccctcggatcacaaacaacttttacttgatgattaataaatgaaatgaagggcataaagataaaaggtatgctcacttttggcggaggaggcaggcggcggtgcaggaggggccacgtagggattggactcctccggcatcgaggtggcggcatcggcggagattggagcccgatcttcgacgtgtatcgccactggtggtggaggaggaaaagcagaaggggattcttggttcgattaagaatgggatcggggttgtctcgggctgtagaggaataccgatgtcgtggggttggaacttaaggtatggagcgtagtcagtggtggagctcgttcgtcgtctagtaagaagaaaagagagagtttgagagaaagagagagttttgagtgtgaagttctagggttttttaaaatgttacctcttttaattcattttttattattatatttattctatactttattatttaatttttttgtattggctgataagggagctaatattttattttaattgattgagattt

SEQ ID NO: 235763 - DNA, 820 bp, Cannabis indica
gatttgtttaaaaagtaagagttattattattattattatcatcatcatcataatattattatattctctcttacttatatattttattattttattattatataaaataaaaaccatacaaatttctttctctctccatcttattcacatttcattttctaaccctaattacctgccgcctccctctctcttttgatttatcattcttttcatcatttctcatatattttctaaccctaaataacctatcgccaaggagaatttttgagtgagtggagctccaatcagatccgcaccactactccgaacaaccgagactcttcggccgattacaagaaagccatcgattactcaagaatagggagatgggggatgagaagaggcacgagaggatgcagaatttctttagagatcaatgtgaggaagaaggagagatcgatcccgagcacgagtctaacccccaacccaattagatctctgtaattttttcttcctgaagtattttttgctgagcttattggaatcttaagctatctttttcgactacattatttagaaggttggggttaaggtttttgggcttcgtttgggctacagagaactagaggtcgccgtcgtgcatagaacaaaggagagagagatcttgaggggaacggacgaaagaggggaggctcgtttttgcttagacgaccgaagaaaggccatctccgtcaaggggaggctcgtttttggcttgaaggccatcgccggcgctacaaattgactttaagtttttttattcaatttcacttagttataatgttcatatttaataattat

SEQ ID NO: 235764 - DNA, 619 bp, Cannabis indica
tgttagtgtcttataatttgggtcactaaaattttgaagtgtcactaaaagtgacgcgcgaaatgtgactggataaacatgtagccacacacttagcgcgtcactatatcataaccataataaaataataataaacatcatcacggtatatatactaaaaaataaattaatatatatttttttcttgaaaagaatgatatatattaattaaattggtatttttatttttgaaaaaataaaataattaatgctcactaaaaaaactgaaaagacactgtacttttccctctctctttctcaataaatcttttcaaatcttaatttttttaaaaaaatcatttagggtaatagcttaaaaccctaataatagtctctctctcctttctcaatagtgcctctaatcagatctatattttttttttctcttctcgcatcccttctcgcatctctctgtaaaactagccctcatccctttcagatctatagccttcctccattgaagacgacgaccttcaaaggcgcaaggcgagctccaccgacgaacaaggggcacttccaaacttcaagcccattgtttgcctcacaggacttcgaaatagagtttgaaccccaagtcgtc

SEQ ID NO: 235765 - DNA, 1338 bp, Cannabis indica
acccgccccaactaagttttttgagcctgatgaagtaacaaggcttccattagaattcccatttggcccacttgaaatatcttcagcaattcttttcctttttgattcaagaatcagaagatcaccatcaataccatcattgatttcttccctcatattagtatctcgtatactataatcatttggagatcccaaataatcagccaaggatttactaatattgatgtccctatcagctccactaaatcctccatccaatcccactgatcgtggaaacgattgatgcatcccttgattaacgccaccattgaagttcccagacattgtgtctcgagcagtcgtactgcctcccatgccgtcgccggagctttcccctctcgccattagaccttgccgaagccacttagtgccgatcgtatgttgtcttctccttggtacagcctttaagtctaggttgtatggtttctttatcagatggagtggtgtatcaaacaacttaggacaaattttttcagagtgtccaagaattccacagataaagcaaaaagttggaagatcctcatacttaaaattggcataacatatctcccctcctttcttttctagtttcatccttcttttcaaaggtaaatcaatacgaacagaaacacgtaccctaaggtaatctcgccaaattcccatgaagttattcttatccgcttccacaaacatgccaatgtagtttccgatgtctttcaccacctttgctgacatgaatcccgttgataaaccatgaagttgaatccagaaatccagcttattaagagccactgcccttgggttttcaccttgttacaatttcgaaaaaatcaggggaaccctgtcaaacgtccagggactgccttccacaactctttccacatctatctgatgataaaactggaataaataaacattatctcccaattctttcacaaacatacctctaccaggtctccacagagatgccatcttgtgttgcatagccatgaagtccagttctctttcagtaaggaaacgtcctacgatacaccatcgatcgtcaaagtctgataattccttattgttcgtgtcgtataataggcctccatcatcatcctcttcgcttgttatcgtgataaaatccctctcactttccaactccatacgaccatcgtccgccatgaaacagatcagataaaaacaaaacaaaccactagagccaaaagagcactttacactatatcgaataacaacaaaacggagaaacacaggtcaaaggaccagactgttgtgaattttctgataggctaaaagttctaattttttctcttaattggg

SEQ ID NO: 235766 - DNA, 729 bp, Cannabis indica
cttggcgggcctgtgacacagaacccgccccaactaagttttttgggcctgctgaagtaacaagacttccattagcatttccattcggtccacttgaaatatcttcagcaattcttttcctttttgattcaagaattagtagatcaccatcaatgccatcattaacttcttccctcatattagtatctcgtatgctataatcatttggagatcccaaagaatcagccaaggatttactaatattgatgtccctatcagttccacgaaatcctccatccaatcccactgatcgtggaaacgattgatgcatcccttgatttacgccaccattgaagttcccaggcgttgtgtctcgagcagtcgtactgcctcccatgccgtcgccggagctttcccctctcaccattagaccttgccgaagccacttagtgccgatcgtatgttgtcttctccttggtacagcctttaagtctagattgtatggcttctttatcagatggggtggggtatcaacaacttaggacagaatttttcagagtgtccaagaattccacagataaagcaaaaagttgggagatcctcatacttgaaattggcataacatatctcccctcctttcttttctagtttcatccttcttttcaatggtaaatcaatacggacagaaacacgtaccctgaggtaatctcgccaaattcccatgaatttattcttatccgcttccacaaa

SEQ ID NO: 235767 - DNA, 675 bp, Cannabis indica
acatatcaacctttacaaatatatataggagattttcaagatgatattaattgaaattggaattcaaataaaataataatttatacctaacttaggaaattaggtgaaaatcaaacaaacgaaattaatttggcattatatttttctgaagtttagaaaaaaaaaaaaaacaactaactttaataaaacatatttttgcgtagctaattattgggcagtttccacatgtttttttttttaataaaacaaatcaatctttagaaatatgtataaaaaaatacaagataataagaatataaattaggtgtttaacaacttttgtaaatatctaggtatgaagaaaagctgagaaaaagtagttgtagaacttaaaaaaaaagctgagttaagtgtttgttaaattataaattttaaagtgctacgagttgttaagattctattataataatgataatgttataatctaatcaatatatatagggacaaaattttgtcccgtgacagattgcaatctgtgatgtacggtaaccgttggatgggtagttaattttatcttaaggctggggttcatctaagggtttatgtaggggtaattagggttaaatgaatggctacgggttacttttttgaaatttaaatttatttaaaatggaaaagtgaaaagtgacatccatc

SEQ ID NO: 235768 - DNA, 1134 bp, Cannabis indica
ttttttttttcagtttttttttgtttcccgtttttttttagttagtctttgttattgttagtgtcatgtgttgatattagagctggaatattgatataactactgttgtttacttgtgcaatggattggaattttaaccgtgtgcttgagtcatgaactctttgaattgaactggatgtcgtgtaaaggttgttcatttagatgtaaagcatttacttttgatgtgtatcacttttattctacttggattgtggaatgttggcttgacatggaatagaacttgtgtgacatactctcttgaagcgaaatccttgatgattttttcttggaaaatgatttaggcaaattttctttggatcgattgagcctttcgagcttacctgaaaagttttttccttagtttacccgaagttgagccctaacctatttcaaaattctcaccacttaactaagcttaatttgttatctttaactactttcattctcaatgtaccttattatgccataagcttttaatcaagttttgggggggaagggggcggggaatgaagtgttgtaagtgggaaatattttgaaagtaagagattaaaaaaaatagttatgtgaagtgcctatactataaagaaaaaaagaagaaggaaaaaaaacaacataaataaatgtgataaattcttcttgacaaaacaaatgtgagcaatgaggcaggtacataaaagaggaaaatgtaatatcttactagtttctttgggatgaaagaatggataattgtgggtgcttgttcggcataattttgcttatggtgtaatgtagcctaaattacttttcatctacccattttacctaccgtgatattgtaaccgaaatagaccttttgattccaagcaagaattgttaacattaggtgagaaaggtatgtcattcaagcttattgaacatgggttagcggaatgtcggagagtgtagaatggttgtgatatgggtgtcaaaagaggtgttttgtgtctatatgaattgcttacttctgaattgtgcatccaagttaattcttagagttattgagttaaaattctggttattgatttgtttgaagttgtgcaggcggtaatgtagttcaatcattggaaggtttagtta

SEQ ID NO: 235769 - DNA, 1131 bp, Cannabis indica
tctatctcaaaaatatattacattttccctcttaatctcatcagcatatcaaaatttactcgtgataatgatgttagtgtagagtttaactctgattgttgttgtgttaaggacaatcaatccaagatccctcttctttagggaacaattaacaatggcctttacaagctgcccactaatgttgctccttaagaattcaagcacttagttgtgaatcccacctccacggcatttcagtgtcaaactgtgacaactctcatgccttttctcataccagaataaatgtttgtaataaaaatacttctcttgtaaacttgtggcactaaagattgggccacccttctcaactgttatgaataaagttttgaatttcaatacatatatctcctacatctattaatgtgtgtcattcttgtcaatatggtaaattgcatcaatttactttcttatcttcactacacaagactacttccccatttgaaatcattcaagccgatatatggggtccttccccttatcccactagtgaagattttaagtactacatatgcttcatagatgattatacaaaatatacttggagttttcctcttaaatccaaatctgacacaacctcaaccttcttgcaatttaatgcctatgttgaaagaaatttttctaccaaaataaagagtgttcaatcagattgggggggagagtttagacctttagcccctattcttgccaaattaggcatcattttttagacacccttgtcctcatactcaccaacaacaaggtagagctgaaagaaaacaccgacatgtcactaaaatggttctcacctttcttgcacaagccaaaatgccacttaaccattggtgggatgcctttgtctcagccacatacctcataaataggctacctattcaaaaaataaatatatctctccctttgaaagcttgctaaacaaaacacctgattacattttttaaaagtgtttgggtgtgcttgcttcccttttcttagaccttacagcaaacataagttcaatttcaagactactatgtgtgtctttcttggctatagtccatctcacaaaggatataggtgtgttaggctagaattagtctaagtttcgggtcgtatttt

SEQ ID NO: 235770 - DNA, 578 bp, Cannabis indica
agtcatcgtgtcataaagatatcaaatatcaatattttggtttgtgtgatagggttggcttttcgtgctccacgtatcataagaaaagaagggtgatagaatagaagagagtaaatatatttatctgtttccaagattagacaacgcatgcacgagtttacaaataaatgatgactaaataagccaattatttcgaaatcttaatcgacaattaccatatatgcttaattacatttttaaacgtcttcaataaaataaagaatactaaaagaatactaaaggatattagtggtatttaatattctcttatgtgttaatatccttaataatcaaattatgtatcaggtccatacagtttaatataatagtttttaaaaaatatcactagctaatcgcaacacgacatgttgaaaaagtactcagtagtaagcactactaattactactaatttagtgtttaatagcaatactcaataaaatattgccaaagctagcttagctgtagctagttctcatatatttgctacgtggaaatggaaacgaaaccaccgttccatttaaaatctttttatggatta

SEQ ID NO: 235771 - DNA, 1511 bp, Cannabis indica
agttagatgctgccaaaggtagatggttcgacgaattacctcaagtactttgggctcatagaacaactgagaagacagcaacgggacatactccattctcgctagcatttggctcagaaccaatgttacttgtagaagtaaatatctcaactcatagacatgagttttataatcaagaagaaaaccaagaactcttaaaactgtccttggatctacttgataaaaattgtactgagtcgtagattaataatgcagcgtaccaacatcgagtaacaagatacttcaacaaaagggtcaaaaagaggctattcaatgttggagacttggtcctaaggcgagtatttacaaataggagagatgcatatgcaggagtattcaacccgaactgggagggtccttatgtgattgaaatgatagtagaaactaaggtttacatatgggctcggttgaatggctcactgattcaacgagatgattcgaccatgcccgagtctagtcgcattcgtatggctcacataatgtaggaccaatgaacaatttaagactcgcatgtaccaggatatatgcgagtatccccgagacacgtgtctttttaataggagtccggtctcgagtttctaggtgagaaaatctcactataacatatgcccctagtttaacgactgacaaatgaggtcatgagggaaactataagcgagaggcaggcaaagagatgtcacgagatggtgacctttcgttgtcccttcgagggtttcaaaatgacggctgtaattatttcatttaatccattttgggtgccacatcacaaaactctttggaattcgtgtagtcgtgctcacggatagccgttagatgggaagaccataggcattccttctgcgacgtgtcataatcccaattaatgagggataatggtatttaagccccctgatatgaaccgattccacatttttccctctcagttttgctcttcttttcttatttgctctgaacttttgaaattttaaactctttctagatttcttccccttttcctctataaactcaatcctcactagtttcagagactaacggattttatcaaagagaaatcgacaatctcaaggttagttcaaaactgtttgcaatttttttttattctgtgttttagggggtagaagatgtatgatataatagggaattttcataaagccttatttttctacttaaaactgggtagttttctggagaaaataggcctgaaatttgcataatcgcgagtttcaggaagaacacgttgagtattcgcatctttcttatttaccatcttaaatactcgcgagtattgagatgatcatctcgaatactcgcatttatatttttataaaatctggggatttagccaccccaacccttgtttagaacttagggtttattattgccttatgtttcatacatgttttttgtttggaatactggttaggtccttcaaatgttgggtgtactgccgtaacttaatgttcatgtgtgca

SEQ ID NO: 235772 - DNA, 690 bp, Cannabis indica
gattacaaccgttcccgccttgtctctcctcccctttccgccacacttcccctctgttctgccgtcttcttacttctccactggtgtatctccttcgtgcagccctgttccgatatggatcctttttcggattcattgcattccacactttccctcacagatgaagaacgaaatattatctcccttcccactgctactgaacctaatgcccttcacaaaacccctttctccctgattgccagagttatctcctctagaccaatctacaaacctggttttttcgaacagatgtcgggtcattgggcaggccgttatcccgtggtcatcactgagtttcaatctgatatgttccatatctccttcggctgtgagggagatagaagaagagtacttaataaggagccttggcattttcagaatcacttgattgttctgcacataccagatgctcgactaaatgtctcaaaggagaatttaatatacactccattttgggttcagatatatcgcctgcccttcctcagtaaaaccactgcccttgctgaagcccttggtaacacaattggtgaattcattgaagtttttgaggattccacaaacgaaggttggggcccttttctccgtgttcggatcaaaatttgtgttacaaaacctctactccgtggacaaatgatacgattaccatctatc

SEQ ID NO: 235773 - DNA, 1541 bp, Cannabis indica
gtttttatattttcttatatacaactgacatttgcaaaaacacggtttttcagaaacggaccacaccagtgcgctcacaacctctagaaaccccttatctcgactccctctcattgtcactctcatcactcgactatgcacggatggagctaactctgaccccatgggtccaaacgaatgccatatagatggattagtaaagttttgaagaccccagatccataactcttgaaggtccctcattgttctcttgccgtcaaaacggtcggattactggagctgtgagttttgggtctgatctgggcacctctgggtctcaacgagccaaacggatggcagtaacagttctcatcatcaaaggtttctagatcttgtagcttttttctcaatttttcttttcttttaatttctgccttccatcttcgtagttagttacaaaaatacacaaaaatatttttacgatttttttttattatatttacaaaaaatcaaaaatacggtttcaaaaatacacaaaaatagtaaaaaaattacaaaaatatagtttcacaaaattttaaacttttttatgatttttttgattttatttacaaaaaatacggtcttttatgttatactattgttaatttgttattattttgatgttatttagatgttatttttcatgttacttttttgtagttttcttattgttttcgtgttggttttatagaaaatcgtaaaaatattaaaaaaaaactttaatcgtaaaaatgtattttttttttttataaaaaaaatggtgtgccttatgtaattattcatatcaaatagactatggttaataaaagttgttgtctttcgaaaaaaaaaaaaaaaaattgtttaagtaaattttgagagtaatttatttgtgttttcaacatttccaaaatatttgatccttatattgttcaaaacaaaaattattcgtattttaataaataaaaataattttaagaaaaataattttttgaccatatttttacttattaattaataaacaaaaaaaaatagtgtttacataattcacccatcatatttgacacaatgatactttaaaaaatgaaagtctatagctggatatgtattatttgactaaaaaaaaaaattgtaggtgcatcaaaaataaaaattgaagaaggaccaaagtgtaaacaagagtgatcatatatagagatactatattataagtaatgatctcatatgagcatacacacatattggattaacaacaaataagtaattgggcctatgaaaatgatatagtcattagcccaactggattttctggttagccatgtgcccatacttaaatataaatatactgtcacaacatataattaattaattttgcactacttacttacctctactattatcttttcctctctttcttcgtgcttagctcgagattattattgttattattttaataataatgtgatcatcaaaatcaaactatatacttaaccttaacaaacaatacataaaactgaatataaaataagcatcatgtcaac

SEQ ID NO: 235774 - DNA, 895 bp, Cannabis indica
aagtccataagacggtattaagttttatgatcactgtctaaccagcctggcttatgggttcgtaggctaagtcctataaaatggacgcccagcggaatacaaaaagtcacggtaatatggttgagaccagaggcggtcagggaaattaaattccccagaatccccgtggccgtggtagagtctagggtggtcgtcctgtaagtcctccacaagctcctccggattgggagcagaggtttgcggaaatgcaagatcgaatctaccaacaagaagaagaaattctgaggttaatgcagcagggtcctcctaccgtgcctccgcatcaagctcaagccgttgtagctccagcggtgccaacaaaataacctgttgccggtaaccgtatggagctgttatacgaaaggtttcacaaggaagcacctccagtgattctgggaggtccagatgtgatgaaggctgagcagtggctcacagtgattgaacgaatactgaattttattggtgtggttggtaatgatcgggtgacctgcgccacttttttgttctatgaagatgccctagtgtggtgagaattggtggccctcactcgggatgtcactgttatgacctgggaagaattctgggagttgttcaactccaaataatataatgaagtcgtccgcagtgctaagcggaaatttttcactgagttagtgcaaaccaagggtatgtcggttattgaatatactacaaagtttgaccgtctggccaagctcgccatgggtattgtaccaacagactttagtaagaaagaaaagtacttggcgggtttgaatgtgaagattaggcatgatttggtgatcactaccaacaaagcaacatcttatgcaaaaatggttgagaaagccctgcgggc

SEQ ID NO: 235775 - DNA, 579 bp, Cannabis indica
cccgttccccatttagacggggatccccgccctattagaggcaggttcccgttgggaaatgtgcatccctagatgcaacatgatagtataatattagtctaatgaattatttactgcaaaaatgtacattataatgagaattaaatttaagataattatctcatatactagtttaattttttttaaatttacgatctagattgctccgttggtttctatatcagttgttatatggattttagttgcgatttaggttactccgttggttgttatgtggattttaattgcaatttaaggtgttctgttagttgttatgtgagttgctgtgaatttctgtaaaaatacaaagaaaatatatcttaaagtgtaaaaataaaaaaaaaatacattgtcaatttccattatacaatgagatttaaaatttaaataaactatttataaaaggaatattggcggctaaacatctgaacatgaaattttttaacacttaataaaaaaaattatttttttgagggcaaaactacctaaactcccattccatttttctcagcgcccctccgtccaaaaatcacagttaag

SEQ ID NO: 235776 - DNA, 935 bp, Cannabis indica
gttattgaaatgcaagtgcacgggccacattgagtatgtgctgatgtttcctctcgacaacattgttttgttgtgggaggcctacacatgagttgtagaggaggacaccctttgtggcataaaaagtagtaagtgttagctccttggcgttatcagtgcgtactgatttaatattaattttgtattgaatcagtatgtgttgaaagaaattttggatggccaaaggggcatcataatttgcttttaaaagatacaaccaagtgtgccttgaatagtcatctactatggttaaaaagtacctataaccttcaatggaggggacagaatatggtcaccatatgtccatatgaacaaggtcaaaaacagtgagagagatgttatttaattgaaatggcatttttttggctttgcaatgtgacatattgaacaattaaaaggagtagagattttagaaacttgtaaatgtttattgatcttattagtaatctttacagaaggatgtccaaggcgagtatgccattgaatttgatttagatgtacattacaagtttgtatagtagaattgtcctcagaatcatgttgttacagatagtatagattgccaagacgtttagttttcccaatcctcaatgtctgagaaaggtcctggataaagcaactgttagtagtgaaagaaattaaagctcgattgtcgtatgtgagcacactgcagacaacagattgtattgaaaataagttacaaagaacacatgtttaagggtgatgtgagagttgaggataacagtaccaattttctttatactaagtttagtgccattaggtaattggacaaaaatagccttagtattagattgactggaagaaaaacattcaagatgacagcaaacatggtgtgtggcaccactgtcaataatccaagaaaagggattagaaat

SEQ ID NO: 235777 - DNA, 1327 bp, Cannabis indica
tgaagtaaacgaggcttgcttagttgcctctggctgtctcattgatttcctggcacgtgcttcgggcgcgtgggctgcatttatgacagtcatcattaaaatttattgcttttgcaggcaacgattcgcttcccgtccattaatgatccagagcatttaattggtgtcagacaaatactcaagcgtttccagctgccctgaagagcattcatcccaaccgttagatctacagaatacgaatcgatttgattcccaccgttcgatgacgcctgatcacagttgctttgcacccgttctagcctataaaagccaaccttttcccttcatttggttactttcactactttgccattttttcgcaagagctcttttgagagaaaaaatttcagacaccatagatttcttgttgctcttcctccgttgttgtcaatccaccctatactgtcgaccgacgccgacccccagctctcaactttcatgtaagttccctggatactttgtgtcttttatcgtctgtttgcatgttaggatagaacttcttggttgagtgttggatttctgggaaataactctgactgagtttgttgtgtaatgcgtaaagtcttctttatttggatctttgttattttcctccatttttctttagaattgacctttttgtcgaaagactgtttagggcatgggccgatttttgttcccacattctgcgtttttcgcttttcttccgctttcgctgcctttgggattttcgcacccgatatctgctaaggaaagtcttttgagtttccatttttggcaaacatccggagggggcctctttccagcagttaggggacccccattcccttttttaacattagggtgtggtttggggtctaactgctggattctttcttttttcagaaccaaacatgtctacccctgcgtcaggaactaagtcttctaagaagggggcggccgctctggccaccctgaaggaggttatgaagggctcgattgcccaggagaactacacgtgccgttctaacggctgggaagtagatgaactccgctctaccctgatctgtgctcatcaattggagaagatcgtgacggttgttgggattaagccgtccgcgtctggggttttccatcgcttacctcgggacgaagagacgcccaaccacaattacaggggttttggagcctggagccagacccatctcatgtccggagccatgcttccccttcaagattatttcattaatttccttgtatttgttggcctcgcgccgtaccaaattattccccaagcttaccgcctgctctcaggcctatttatttttta

SEQ ID NO: 235778 - DNA, 1286 bp, Cannabis indica
gcttcacatcatccaaatctgataattccctctttatttaacatacatctacttcagttacacttattctagtgtatgtagatgatatcttgatttcagggagtgacaatgctgctattgagtcaattgttgcagcacttaacagccagtttgcacttaaagaacttggtcctcttgcatattttcttgggatcgaagtgatccaaacagcagctggtattcacttgtcacaggcaaaatatgctaaggatcttcttcttaaagctcaaatgagcaatgccaaaccctcaccaacatccatgaccagtggtattcgattatctgcataccagggggagccattggaagatgttcagttgtatcagtcaattgttggtgcactccaatacctgaccattacaagacctgaactctcgtttagtgtaaacaaggtttgtcaatttatgcaaaagcccttgtctacacattggtctgcagttaagcgaatactcagatatgttagtggcacaatagatcacgggttgcatctgcagaagtctaagagtttggatctggttacctattgtgatgccgactgggcatcggatccagatgatcgaaggccaaccacaggttttgccattttctttggcacaaatctgattgcttggaaaagcaaaaagcagcagaccatttcgaggtccagcactgaagccgaatataggagtgctgcaagtgttacaacagagcttacatggctccaatatttgttctctgaactcaagattcaactcacacaacctcctacaatatggtgtgacaacctaagcactattatgctaactcagaatcctctcttgcatcaaagaacaaagcatattgagcttgatttgtacttcattcgtgaaaaagttctcagcaaggttattcaaatcaaacacatctcttcctatgatcagttggctgatgggttgactaaagctatttccagtcaaaggtttgctgagtttagacacaaactcaaaattgaagattgttcaattatgagtttgaggggaggtgttgaagacagttgaaaccgttacatggttgttagctgttagttgtgattgattacacgtgtcattgtattgtgagttagttaaaaagtctgttatggatttcatttactgctactctataaatgctgtaacatttgttcataatcaatgagaatcttttgctaagtctttccttctctttcttctccttcctcttatctttctttctctgttctgttatgttcttggtgttcatcaatggctaga

SEQ ID NO: 235779 - DNA, 1182 bp, Cannabis indica
gagtagatgtcgattttaagcatgtcatgatccaagtgatgaatctgcccggcaagttaaattccttcagaagcttctccaaaaactcccaattgactgtgtcatatgccttacttatgtccaccttgatagtgcatctaggtgaaatgtttttccttttgtagttctttaggagatcttgaagaatcatgacattatgagctattgatctcccttgcacaaaagctccttgattctggtttaccaatcctggaagaacttgagagagcctcaaacaaagtaattagatatgcatttatagattgttgtacagcacacaatcggcttgaactccacaactttagtcgggttttctgtcttgggaataagagtgatcatagttgcatgaagttcccgtggcatgatacctgtcaagaaaaaattctccactgctttagtgaattcagctccaatttcaggccacaatgtcttgaaaaacccaactccatagccatctggaccaggtgacttggtgtccggtatactgaataaagcctccttaatttccttggtagagaaaggtttgattaaagccaattgttgctctctgtttagcttgttccccatctccatacactccttttttaagtcttgagtaggccttgtgcttgtccccatatagccttgaaagtgctttatgaagtgcttgacaacctcactgaaattatcaacaacctctccatagtcattggtataagtaactatgctattttccattcttctttttttttcaggaaagagtggaaaaaggcattgttctcatcccctttgcttaaccaagttacattgctcctctgtctcaagaagctgtggtacatcttctcttgggtattaaagttcaaggcagtctctttttctatctgttggacagtggtatcacgcggttgatcttgagcttgagttctagcttgaatgtacaggtccctcgcttcttgataaatttttccaatatccccaactctctctctattaaacctcttgatggagtgtttcaatctcataagtttcaaatacaagcctgtcacaccctctcttctcatcggtttctgccagctatcaagaactacatctttaaattctgagtgatcagcccaaaaattatagtatctaaaaggtttgtacccaatctccacattagtcgta

SEQ ID NO: 235780 - DNA, 1299 bp, Cannabis indica
ccttttggagataactaattttctaccaggcagtagggttccgaaccctttatcataatcatcacatggcctacccaatttatcaattactctggccgctgcataagaatgagtggcccagagtcaaacaaaatagagtaatacgagttgttgatcgagagctgacctgtaataattggagggctatctttcgcattagcctttgtaagagcaaagacccttgctggaacgggctttacctctatcttatgtacttctttctgtaactatggacagtctcttttgttttgtctagttacaccattctagaaacatccttcacctctacacttgcccagatgatgcttattacagttaaggcattctgggtaagtgtattggctctcaggccttccctaatagttaccacgtccttggttcccttagaaccttttgttttggcttgagccaccagacgttgatgtaattttctcttcagatcattgcttaaatcacaactaaccttgcataactagaggtaggaggagcagtggcttcaccaacaatctgagtcccttagggctcctgaacacactcaactgcgccctcaacttgcaatgcctttcctacgatatcaacttaagtagttgcatcatccattgtgatcaacaaatcatgtttaatatagaaattcaacccatccatgtaattttctttcttgttaaaatcagttggcacaattcctaaggctaaccttgccaatctatcaaactgtgtcgtatactctgtaactgacatgttctccttttgagtcaactgtgtgaactcttttgttttttagccattattcaaatttcataacgtccgaacctcctaggaagactggaggtgcttgcttatggaacctttcataaagtggttccattcgttttgcaacgacaaccagcaccacttgcataacaggggtaagagccatctacaccttaggagcaggcattgtaggagcaccatgctttctcaaatgtcgaatctcttcatcttgctcactaatcctggcttgcatctcaacaaacatatgttcccaatcctagccagtctgcggtgggttaacatcatcgtgaccgcatgccctacctcttgagcatctgccacggctgtgaacattaagagaactgaacaaagcggtcccatgctttctccacaaggcggtcatgatgaagaagatgaattattctcgcgaaaagtcatggatttgattcctaaatcgctaaaatggatggttgctgaaattctgaaactcaaagtgttgggttttatgcc

SEQ ID NO: 235781 - DNA, 2350 bp, Cannabis indica
gagtactcgccattataggtcgaatactcacaattgttcttcaagcaatttattcctgtcattaatattgttacatacatttggtgttgcgaattttgctcgacaacagttgtgttgatggattacacagttggttgagctgtttttgttatattattttatagaatataatatttaaattaaatagttaagtgtgataaattattaattttattaaattgtaacatgcattatgaaattataaatgtgttgatactgatcataaaaaaaagagttgtaaatttttgagaaatgatgatcataaattgtgtaacttttctctttacattattactcttaaattagtaaaacatgttactaattgtttgtaaatgtgaatgaatgataactattgaaaatgtagctgttggggactttatttattcatttataaagtgtataaatggttcaaaattaagtgggagtagtttggaacactttaaaaaagaattgaccaaagctgcaaaaaatggtagtagtaactagttactatttttttagcatacaattagatgtgttaaactccttcaaatcacccaattaatatcataaataccaaatttatggttgttacattcaaggctttatagtggtcatttatgctcatatgtgagtaaaaactctataaatagaggtcatattgttcacttgtgatattcttggttaaaattacttttgttgtggttagaaccttatgaggatatgcccatccttaaataatgggttgagcatattaggcttaataattcctcaagatcttccttaatggcatgtttacttaaagggaatgagaatgaatggtattgtattgattcttataaaattgtttactaaattttggaaatggagaaagtagtgggacccacacaaattaaggagaaaacaaagagaaaggttctccccattttaaagggaatactttttcctttcctaacttaatttattttaattttaattttattaattaaaaatgaaaaagacaaccctttaaaaatttataaacagaaaataattacattatctaataatggcaattttgtcaaattaaagcattccgattacctttcctagttatgttaacaaaataatatgattatgattttctttccggaccgtttagtaaacagcataataaaatattgtttctaattattttctattttaaaccgatatatttctctcattgattattctaattccaattacagtttagtaaacgcgccataaatgtctatgtgaggaagaaaatgtgtaacaccctaactaattagctaggtacgccatgtgttactattctaatatcgataaccaggatctgataagccaagtgaatttaaatataactgataaattaaaacaaacttgtaataatttaaacttaaaaacaaaataatatttacatgatcgggatcccgtaaaatcttttctcaaaatattacaagttgtttacaccaaaagctgacctcaacggtaaaatcatactttacacaaaaagtcttccaacgacctataccacaggtcacaatagtcggaacatgtacatcgtccacgcaagccctccaactcatggttgactagaagcgaccttacccttgtctgcatcacagagagcacccgtgagccaaggctcagtaagaaaaacaataaagacatccacaatataatcacataacataatatcacatataatacaccaatgcgttaataattgtgccattgcactaatacaacatcttaagtctattttatatagacaccacgtgttacgctcatacgtctattttactataaggccttacttagggtttatcctggttggattaccgagtgtaaccttatcaaggtttatcacgattctagtaactgagtataactttttttatgctttatttacaattttactgacggaagtatttatttataaaaatacgtttataaagttttaaaattacaaaatacactttgttctataaaaagtaaaaaaataactgaaaaatatcgagaaatcaaactcacgacaactataaaatcaattataaaataaataaaaacaactagaaaaataataccatgacaactataatacaattatagggatatgatttgtctcggtactttcacggaatatattctgtggtacattagatgggtctttaggtacattaaatgagtgttagggtacgtttctactttttgactctaactatccctagatcaatcttagccgtcagatcaaataactttctcatctgacagctgtcgtacatcacagattacaatccgtgaaagtacaataacgggataaaatcat

SEQ ID NO: 235782 - DNA, 708 bp, Cannabis indica
gtctccaaaactggagagcattgtcatttccttgtggcagcgatcacttatttctcttttcttgtgattttagtgctattttgacttaatacataaacccaagtcattttaatgcctaaacaagtcaagtccttattggttttcttggcggattgaggtctctagggtgaaaacgctcacacaggcccatgaaccctgttttgggcacacttgggtgtgtgagtcccggcaccaaatggttggttgacattttcaagccttctagaagtgtcatgggaccctcaagaaggatttcttgatttatttgacatttatgagtcttggtcaaagtcacaaggttgatttttttcgatttttcaaaaatcaggtataacatagtttatttaaaaagaacaatcaaaattattatttggactaataatttatcaacacgtgacattttaaattagtaaacagatcgattaaaggaatgtggattaatataaaaaaatttacataaaaaatacaaaatgcaatttttattacacaattatcactacacggctatatcaaatttgtttactcttcttctatattttattactattttaccacatcaacactcattccatgcatgagtacacgtccgtgacctatgacccctatcaatcaaccatccatcatttccctctcttttttcttctttttccttttattttccatttcttt

SEQ ID NO: 235783 - DNA, 1623 bp, Cannabis indica
tatggaatgtggtttccaatgatgtaagagtagaagcttgtttctattgaataatggaaatatagtttccattggaattgtcattgtcattccattattaaatttacaaaccaaacactggaatggcctctgtactagaatgattgttccattctaaaggcctgagctacataacaactcccaactcccaacaactataccaactataacaggtattgaattattaaattacaacagctgtattatgcaacaagaaactaagagctcctttttcatgtatccttagtaattatggcatgactatactatatgtaagaggtatttatacttaagaaaatacagatacatacccagatgccaaccgagtgattatcattaaattgttttccatgaaacacgatctcctctcaagcccccactaaacataagagataattagattcatcaatacagttattgtaatcatgaaaacagtacaaaaaagaaaatgaagaacttgtcttcgaatagtatggaatgaaattggtctgtttattgtttaatgtttacaatttcctttcatcaaaatttaatgcgatttctaattttcttgtttataattcacttttcctcatcttgaatttctaccctccaagtgaataaataaacaataatatgtaatgtttattccaatgtgatgatattgattaaagagaacctattcaagcttaccaaggaccagataaatgtggccatctcaaaggcattctgcataagaaaaaaaaataacagatactaagcactaaaactcttgaaaaaaaaaatgttgaatgtgagtgtgacatgagtgaagaggcctagatacctgaaatatgataaattgtatcaacctaagtaatatcacaggctttccaaaccaaaacagatcatcccgaggctttatctgattcgctgctatagatggtcctgtctgctcaacaactccaagcgctaaacaagagacaacatgtcgaagctttgttccaactaccatgacaagctttggcatttgaaacacattgaacaatacaaattttatgtcatctttaagaagaacactttattttgattgaatagacacgaaagaaagtacgtcgtctgcttacaatggctgggatgaaagaaagccagaagtaaatattgagacctgcaacaacaaaaaaaggtatgacatttcatgaaatagatcttttaagacagattgttctgcctttttatattgtgattacattaagtagcttaccgtggatgtttacaaagatgcatattatggcgtaaccccatagtggccagctacaagattaaaatcgaaatgtatattgaatcagtctgccataatatgattaatgaaactatatttgaagtactaagcatcacatgaatagacaatgttatagtgctttttaacagctggtagaaatcttcaagggatataattgtgttaccattgtgttaccatgaatgagtacaatagaagtatgcagaaaataaccaaaagctaatatgagcaaaaataaacaaaatcaagatgagtacatgtattactttcttaaggaagtattgttaggccttagggtattatataataagggtatatgggtaatt

SEQ ID NO: 235784 - DNA, 1210 bp, Cannabis indica
agatcagcctggtcttccgaagacaaaacttctcggactaaattgtagcaattaggcgccatgccagtgtccgatccagagaagatgccttggaagaaatccaaaaattcagccccaacaagctcccttttcgaaatccacacattgtctttgttcaggatgctctcaatggcattccttctcccttttatggaagcggataggaagaaaaattttgaacacttgtccccttcctttagccaagagaccctggctcgctgtttccaatacacctccttcctcacacgggcttcgttaagggaagcgcgcaaattcctttcaatttcccactgcctagatcccacgggcaaactctgaataaggtcaagcttacgttctaggtcccgaatgagggtatccattttaccaaactgggatctattccaatgcataagggcaactcgagtcgccccaattttcttgaagatcctagcaggggcccaagggaagataaccgattccacgcagaatcaaccaccaatttgctacgctcatccctagtccaagcttcctcaaacttaaagcttcttcgggtcttctcccccagaccatcagagaacagacataacggtcggtgatctgagttagaagtttggaaagagcagagaacagccttcggaaaaagacgcatccaatcaccattaattagacccttgtcgagggcagatttaacatggttggacccagaacgatgattgtcccaagtcaacctctccccctggataggcatattaatgagacccctggcattaaccaaactggagataactgggacaaattgatctctacttttagacccttcacgttctgagtcacttagcacaaagtttgtgtcacctaagataagccacgagcctccaaatctatccccagttgccattaaggtttcccagaaagttttcttagcatggaagtacgggggaccatagacacaagagagaagccaggggtgcgaatggggatctgaatacacaataccagttatgtggtgttgggagctagcaatacactcaaactcaaaaccgaatttccaggccaaaataataccacccgcagtacccactgccggaacaataatatgaaaataaaagtggagagaatgaagagtacgtaccaaagcagtagcggcgaccttaagctcggtcaggaaaatgaaatcaggagaacgcga

SEQ ID NO: 235785 - DNA, 892 bp, Cannabis indica
gtgaagttttgagggaagtttcaaataaagacaaggtcttgggtcactagaacaagttggcatcaatctacatgaagacatctcttgcaaacaagttgtatctcaagaatttgtacacactttgaatggatgagtcaaaagaattgagaaagcatctagatgattataatagaatcattattgatttgaataaccttagggtgaaaattgatgatgaagactaggctataatcctgttgagttcacttccaaagatgtatgagcgactttgttgatataatcgtgtatggcaaagatactctgaccatgacagaggttaagactgcattgaattctaatgaaattcaaaagaatggagatgagaaagaagagaccaatggagaaggattactcacttattaagggaaaattcccaagagggaatacagggaaaatcagaactcaaattgctacaaatgtaaccattcaagatctaattctagaaactccacaagagagtcaagctctaatgagttgcaagaaagcaatgctattactgcaagaaagagggtcactttagagatgattgtttgggttagaaggctaaagtgaagagaaaaaatcatcataagtccaaaaggcatggagttactgatgttgctgatggctacgagtcatctgtcttgtattgtcatctgatgcacttgtgatgtctagattagatttaggtggagattggattctagatttagggtgttcatttcatatgacaccaaacagagaactatttgggactctttcaaagagtaatgggggcacagttcttcttgtgaacaacaaaacatgtgagatcaaaggtgtgggaacaatcttattaaataatcatgataaagtcatgaagtgatgggatttt

SEQ ID NO: 235786 - DNA, 1615 bp, Cannabis indica
ctgaaaaacagaaaactaacttttaaccaccatcagttagttggttatcatcccccctcaaatgaaaaggggaagatgccactttgagtttgtgtttgaggtagtgaaaccggtctttgggcaatgacttggtgagaatatcggcgatttgatcaacagatggaacatattgaacagagacctcattgttgagaatctgatcacgaacaaaatgttggtcgatttcgatatgtttgcagctaaagttgcagcaccttgattgtcaatccaaataatgggaatatcagctaagaccacctgtaattcagtaaaaagagattgcagccacttcaactcagcaacagtattagctagagcacaaaattccgattctgtggaagaccgagcaaccactttctgtttcttagcagaccaagagatgagatttggtcctaagaagatagcatagccacctgtagaacgacgatcatcggggcaacttgcccaatcggcatcggaataagcttcaatagataatctagctgctggagacaaaaacaagctatgcgagagagtcccttttaagtatctgagaagtcttttgcatgcctcccagtgagtgtttgttggggcatgtatgaattgtgataacttgtttatgataaatgctacatcgggtctagtaagagtgaggtattgcaatgccccaaccgtgctcctatagagagttcgatcttcaaatggagttccttccttaagtgacaacttatgggagctgcttgtgggactagaacaaatctttgcaccttcaagatgaactttaacaagtagatcggttatatatttgctttgagataaggacattccactttcagttcgatgaatctcaaccccaagaaaatagtggactgcccccatgtcttttaaagaaaaggctgcattaagatccttaataaacctttgtatgagacttgaattaggacccgttattaatatgtcatcaacatagaccaagaggataatttgtgtgtgacccgaaccatagagaaacaatgatgtgtcagcccgagaagctttgaaaccccagttgaatagagtagtttaagcttgtcattccaagctcgaggcgcttgttttaaaccatagatagccttgtttaatttgcacacatgatggggatattgagggtcaataaaacctttaggttgggtcatatacacagtctcatttagatcaccatatagaaaggcatttgacacatctaattgccttacttcccaattaaaagtaacagcaagagtgagaactaacctgaccgtgacaggcttaaccacgggactaaaagtatccttaaaatcaatgcccggtttttgaagataacctcttgctaccaatcttgatttacatttgtcaaggctcccatcagcatttaacttcaccctgaaaacccatttgttgtctattagaaccatatgagattcataaggtactaatgtccaagtacctcttgctttgagagcataaaactcacttgacatagatttattccaaataggatctttgagagtctattgcatagttttgggttctcgaggtattaaagactcaggtagtctatgcttagtggccatgtaag

SEQ ID NO: 235787 - DNA, 1058 bp, Cannabis indica
ggttttttcaatgctttatggcctcacataggagctgaaatttgcaaagcagtagcagatttttttgaaactggtgcaatcccgaaggagatgcatagaactatgatctctcttattcccaagattgagaacccttctagagctgttgattacagacctattgcttgttgtacaactttatacaagtgtatatcgaagctaatgtgtaccaggttggccaaagtgcttccgtcaataatcaatcaaaatcaaggggcgtttgttcaaggtagatctatagcccataatgtgatgatccttcaagacctcctgaaaaactataaaaggaagaatacctcgcccaggtgtgctttgaagattgacattagtaaagcctatgatacggtggactgggatttccttgaagatctccttaatgctttcaagttgcctaggaaatttgtggatagggtgatgatttgcgaaacacttcttacaccttactaatgaatggtcggatgcaaggtagcttcaatggggctaaaggtcttcgacagggagatccgatttcccctctcttgtttgtgttgatcatggaatacttgactcggttacttcaagttgcaactcaaaacacaaaattcaggtaccatcccatgtgcaaaaatctaaagcttgttaatttgtgctttgctgatgacttaattattctgagcaaagggactagacattctcttcatgtggttaaaactgttttagatgagttcagtaacacaacaggccttgccataaactcccagaagtcccacatctattttggtggagtgaaagatagagaaaaagatgatattacagctgatttgactcttattgaagggacgttcccccttaaatatttgggggtccctctgcgcccaacgaagtggaaaattgaagactgtggtatcgttatctctaaaatcaagcaaagcttacacacctgggctagtagacatctgtctcatgcaggtagagcccaacttattcattcggtcctgcttgggctccgaaactacgggatgagtatatttgtcctccct

SEQ ID NO: 235788 - DNA, 763 bp, Cannabis indica
agtgtttcggctttgattgttagtgctaaatatagtcttgctaggagtgtctcatattccaatttgttgttggttgtggtgaactcaaatcgcaatgcactatgactttgaaatccctttagagtaattaagatgagtccagcaccagaaccgtgctcgttggaagagccatctacataaagtttctaggaaggtcctcctgagttgcagtcttaggcgtgtggacctagaaatcacaaatcatgggattgtcttcttcatggccagtacattcagcaatgaagtatgctaatgactattttttaattaatgttcgaggcttgtaggtgatctcaaactgaccttgttcaactgcccacttgagtaggcgccctaatgcttctgggttcatcaaaacttacctaaatggttggttagttttcaccttgactgtgtgagcttggaagtatgaccttagctttctagaggccacgaccaagcagtaggctagcttctcaatggggatataccttgacttagccttgatgagatgcttgctgatgtcgtagacaaggtgttgtatcccttcttcctcacacaccagagtagcactggctacatgctcgatgattgccaaatagatgtttagttcttcaccatctattggtttggataggataggaggttcggctaggtaatgtttgagatcttagaaggcttcctcgcattaatcagtcctttcgaaccccttgttgcttctattaagtaaattaaagaagggaat

SEQ ID NO: 235789 - DNA, 853 bp, Cannabis indica
aagtaaaagtttaattttaacgtacttaactacactccttgtgagatcgacctcattcctagtgagtctactactttaaacgatacgtacacttgcgtgtgctaaatattgcaacaattgtagaatcaccctaaagaatattctattaagtaattgggatatttcgttaaagttaacatagaaaatctaaaaacaccgttaaactaagaattttgtcacgtagccacattttgtatagaatattctgttaattaattgaaatattctgttaaagttaagtaattgtgtcggagtgatcaatcattcaatgtctcttggtggtggaggccgatggttttgggggtttcaaaggtttcaggctaatggagaggaagagagagagtcgaaagagttagagagagaaatgtgtttttgaaagggtaaataccattttgaaccctacgctttgcaaaagttatcgattggactctctgttttgtaaaatgacaaaaaaagactatatatttttcaaaatagtaaaaataggatcttgactttaatttttgacaactttttttttaatacaaccaacttaaagacaatttataatataaacaaatacagcacatataaatattttgtcataacacttttagatcggattacgattaaatttattttgataaaaaaaatcaattcatggtcctatttgtatcattttagaaaatacagggtctattgtgttatttaacaaaacagatggtctaattggtaacttttacaaaatacagggtctaaaatggtatttaccctttttttaaatgcaaaagtataattggaaccaaaatataataatagcataattttgatgatg

SEQ ID NO: 235790 - DNA, 736 bp, Cannabis indica
tttctaagtaagtctcgctctttggctaaatcattggcttccatcttgggtgaattcctggctgtccatgatgattctttgaatgaaggttgggggccttttttaaggttccgggttaaaatggatattaccaaaccactgctgcgtggtcggatgattacacttcctaagatcaaggacgagttttgggtggagtttcgttatgaacggttacctaactattgtatggaatgtggtttgattgggcatctttatcaaaagtgtaatgtgtttcttgagaaattggaccaaggagtggaacctgatctaccatacgggcctgaactaaaaggatcaagattaccaactaattcctatgatcgttaccgaacggattttccaaagggtaatgcttggcctttactcactcgattggcaagaaatactttgactgacactctccctactcttcgatcaatccccaaaccgaatccacatccttttctattaggagagtcttcaaacactaagcctcaaatatctgcaccagtttcatctcatattgttccacaagtttctggtttggcatctgatttgtctaaaccacaaacttctcattctataccaatgtccattttcactcctccttcccttaacaatttttcctttaacaaagccacagatatctcatccaccaatacctctgccactaccgatcctatcatcaaaaataaaggaaaagcaattcttccatcta

SEQ ID NO: 235791 - DNA, 1073 bp, Cannabis indica
gcttctagcatcacaacttggttatgagggtctttttttcgtttgatgctcaggggagggtgtggtttagcaatgttatggaaggataaggaggatgttgagattgtcgagtattcgcaaaatcatatagatatggtggtacgatatgatagctctcatatctggtgccttacggggttatatggagaacctaatcggtcattgcgggtcaatacttggaatcttatgagggtgctaaaggaagagaatgatctcccttggtgtgttattggggacttaaataatgttcttagccaagatgataaaagaggtggtaattcttatcctgattcgcttatagatggctttcaacaaactgtctctgattgtaatcttgtggatcttgagcttgtgggtcatccgtttaattgggagaagagtaggggcacggatagttggatcgaagtgaggctggatagagcgctagctaccccttcttggatgagtctgttttcgaatgcacggttgattaacatggtcttttccacatcgaatcattgtcctcttttcttggatccatctttttggttccatgcagcttctaggagggtgtttcggtttgagaatgcttggctgcgtgattttaattgctatactattatccaggagcaatgggaagcttgtgtatcaggtaacattgtggacaaagtggcggctattcaggatttgcttggtgtgtggggtaggagcttaactgacaattttaaggagagaattcaaagatgtaaagccagggttggtgttcttaaaggctggttggatgtggagtctctttctgaatataaggaggcgagaaaacaacttgctgaaatctatcattaaaaaaaatcttttggaggcaaagatccaagcaattgtggcttagggagggtgaccaaaacacgaggtattttcacgctgctgctagctcaagacggaaaaataatttcattcatgagttaaaagatgagaccggttcttgggtttagtgggggtcaagtttgtctcaggttataataaactactacaccaatatttttcattttatggggtcg

SEQ ID NO: 235792 - DNA, 661 bp, Cannabis indica
tgattgtatgaaaatttcaatttatgatgataaatttttatttcattttgaaaatattttttttggaaagtagaggaaaaatttataaatttagtcttttacagaactcaatttggattttttatgaaatagttatgattttttgaatttagatgaaaatatctaattttgggagcaacatgtgtgcgcggggatgaggttcactcggccaacatgcatcttcaaacaagtgcctgaccggggatacttggacaaggccctgtatgaagggctgctcatgctaagctccctcagccaacagaggctgcacacagccttttccctcgcccattacccttcatgcgcgtgggatgcatacccctgtgcccaattttatttttgtcatatcttttgattcaaaaattattttttagttaaacaaaattgataatatcctaaccataaaatatcttattttcaattttgtttatttttgttatatttaatttattaaattataagattagaaatatctaaatttttaaattaagatattatattatcttattaaatatttaattaatttaaattatttagataaactgaagatttaaaaattagttagatatttgaatttcaattaaaattttagatatttgggagatttgttagattttaaata

SEQ ID NO: 235793 - DNA, 665 bp, Cannabis indica
atccttcaacgtagacataaaaggcgtacctgaccagacctttttcatatccttatactcaaacaaagcatgttgcacagagtcgttgtaaaggtgacaacgaggacaaataggagagttaagacaattcctgctgtagagattttctgcagtaggaatagatttctgagagagtctatagatgaagtgcctaattttaggaggaatttgaagactccatagggagttccaccagcgtttaagggtagcagtatttgaagaggatggttgtgtcaagtttatggacgtttttcgccacatggtaaccggtcttaactgaataatgacctgaggaggtgtgctaccaaaagtaggagtccatttgggtaatatctggtgggggaagagatagtatgtcatcgataatgtcctaggggaagtggctgcgcaacaatgggatgttccagtctccatttggaagttgcaaatcagagacatggacaaggtgacttgggaggtgagtgggaagaaaacggtagttagggatccaagtgtcttgtaaaattttagtggtggtcccgtttccaatcctcttacaaagaccctctttcagaagagatttaccccagtgaatgctctgccaaacataagagggagaatgccccaaagatgagtttaaaaaggtt

SEQ ID NO: 235794 - DNA, 982 bp, Cannabis indica
ataatataaccgaattcagttattgatatttatatcttatatccgattgagggtatctttcaaccacttgagaaaaaaactcaactactttttaaattcaaatatttatctattgaattaattaattaacctagaaagataaaactaatagggacacctataatagtggcgcctactttgtgtttggacacaatgtaggtggcacctttgctgtcttggttaagacaaggaatgtgcattttatcttgaaaaattttgtcttttccctatttaattaatttgaaaaataaattatttattacaaaataaataattactattctgacaattcaaaatagatttttctaaactttcatatacaacttttatcccaccccttgataatatttcaatgtagcaatcttgggaccatggacctataattctaagctctaataaactaaattatttattaaatctcatcaaccaaataatcttatttattaattctatgattactaaactataaatatggaatcgaactcttagtaattatagaattatatttactatgttttactgcagtatccattgatataataaattctagtaattaggcctcctagtgttgtttgtaattagttttggtcaaaatactattttacccttctaattacttctttatcttttaatatcgttaattcactagcgaaagtataattctgatccaatttgaattggcgcgcaagttttaagttctagaattaaagagaaccaatatttgatccgttaggaaagttaggattctataattatagatcatgttcccatccattcacgttattaaattcctaaatcagaagttgtaagaaccaccttctctgagaaactttaatgagtgagtcaaagaaactaataacatgaacaagagttcatgattactcaggatatgacgatctactattgatctgttgggttttgtgccctaaataaaacccattac

SEQ ID NO: 235795 - DNA, 725 bp, Cannabis indica
ttttttttaaaaaataaaaaacttagatttaatttaatttttatttatggtatatttatttaagatgacgatatatcaattatatgtaccaaaatatattatgaacgaaataaaaaaataaatagaagaaatgtcatatcaaatgtaatgatatatcttattttatgaaatgtgaaatatcactatatgtcataataatatcaaaaacaacacaaataattatcatataccagagcttaaataatatatatacgttgaagttaaatttatatagcatatacacagtagtagaaaataaaaatagaacaacaatgaaaaaaattatcaattaaaatacaaataatttagaaaataattttaccaaataaaatgatatgctacaacaaataaatttgaaaaagtgtaagagagtagaacaaaactttcatattctttggagcatatgtattttttatttgaagaaaccaattatgttgcttttgtttagttcgaatcaatttcgtttggaagaaatggctattgttgccttagtttggaagaaattaggaggaaatggttgaagaaattcgataaattaattaaaaaaatttgatgagagggtagaagctttaataattttttgggaggaatcacaataatttagaggaaagttaaaaaaatatggaaatccttcattcctcgtgtagtgtggaggctttggtttggtttgtgataattgagttttt

SEQ ID NO: 235796 - DNA, 502 bp, Cannabis indica
ttcttttcatttggtctataaggactagcttcaactaggcatccccaaacataaaagttcttaagactaggttttctccctgttcaaagctcataaagtatttttgcagctgctttagttggtaccctattcaaagtgtaggttgctatcttaagtgcctctccccatagtgattctggtaaggttgaataattgattatacgttttaccatatctttaagagtacggttttgtcttttagcaacaccattcatgctaggagattctagcatactgtactataggacaattccacactcctctagatatctggaaaaaggtcatggacattgttcatctgatccgtcatatctaccataacactcacctttcatcactaccaaagaacctttagtgatcttcaagcttctgtgcatggacttgtattcatatccttcgtcttcaagtgcacccaaggatatgaggtttcgtttaaggttcgggatgtgccttacgttcgtca

SEQ ID NO: 235797 - DNA, 1947 bp, Cannabis indica
tggcagagatctgggcaacattcacaaccctttaaagctcaagttgtttttttttttttttgccttttttgtattttttttctggatttcgagtatatggtgttggtcttgtcattttgattttgttgttatagaagttgatgagtgataaagtattagactgtatttgatgttgttggtacaggttcaaaaggcaaggagaaatttgggaaaagaataatttaggaaggggttgtggaagatgattgacgatgaaattattagagttgggggttcgaaattatggttgaaggcagatgatgaagttaaaatgattattaataattatgtttaatttattttttatataactaattgactattaataattttttttttcttaaaattgagtgtaaaatgtttaaattgatttttaaataagaaaataaaaaaaattaagtgattatatttattttttataattttaaaatcatttttaataacatttaaataattatttaaaatcataaataacaaatttaatgaaatagaccaatgaacgagtggcacgtgaacactgacctgacacataatgatcaaatacctacggaagtttcatactagtgacggcatgtatttttgccgcaaaaaatatagctcaagcatttattactcagcataaaacttaggtatttatgccgcaaattactcgaaaaagatattatgttgtcttagtatttaaaaatatatattaaaagaagaaaaaatagaaaaattaatggaattattacatagaaaataaaaattgacactttatttacaaaaatacctccataaggtgtggacaacatttatacattttatgtgattttaattaccaaaatacctcttacactatcgcttacacaatcagacgatggttgcagggtggttgcttgcgcggtggttgcatcagacaaatgttaatcaaacaatggttacaggatggttactggatggttggactggatggttggccggaggttgcatcagacaaaggtttcaatcagacaaaagtttcagggagcaaaatgtttatgtaactgttatgaatcattaaaaatcagaacaatgtttccacgtatgtaactctatctacatgtttctttatgatttaatatgaacaaattcaccattagaaatttagaaaacaatgaaaatacatcaggataaatattctactatagtattgatataattttttttttggattatacttgagttggattgtttgggaactcctattcaattttttgagatctgtcttttatggatctgaaaattgaagtcgggacattagttttatgcaaattaaactgcatttctggttgaattttagtttcatagtaggttttctacacttttttttttcatgaattcgaagcagcccctattttgattgattttgatcatcttctcaggtgaagtcgccggaattaatggtggttctctttccggctgaattttcgtttgcgttgggttgctatgtggttgcacaatagttacccaagaaggatggatcttgagttgaaggtgtgtataaatagtatttgtgtaatatttactcaattaccaaaaatcttaagatctgttaactataatcaatcgtattattgttagttagattaaactaaaaatatacccgaaggcaagttataatacataaaataaaaacaagcctcaacctacacagaaatactcaacctacacagaaatagtaaccataatatcctcaatacaatatatatatatatatatattatatataaatttcaatgattatatatattcatagtatttatctaacttttaaaattattttatgaaattatagcttggtatttatgaatgtaatataaatctcacaaatcattaaataatgaaacaaagcacacacacaaaattcctttctttttattttttttttta

SEQ ID NO: 235798 - DNA, 1246 bp, Cannabis indica
gttagattatttgttttgggtttaggcatatgatgtttatttatggttgcaatataatttacctactggttatgaattaggtgtattatgtgaatgatttcttattagttttagtatagtctcaaggtagttttgaaacgtttccattatcattatcatgtttatttttgtttgtttatctctgcaggattgagaatacaagttctattcttatgattttttcaagtccaagtaatacctaactttgacttacagtgttattgacaacattaaggaaacaaaatatgtgatgccaatatttcgtactactcaattctattttttcttggatatttctatctgagatcaatcgatattcttctctgaccccatatattttaccttaatcttacaaaaaaaccaagtccatgcattatacttttctaaatctacaatagagaataataagagaaatttgtgaccatttgcatcttgtgtgcaagctgagaacaatgtgcttccaaatgtagcttttacgaaagttccatcaataacgatgattgatgtttatgctgatatttacagattgttgcaatgtagtttggttttattggcatgattttaattattctatgtgaatgtattttttaagtatatttctaattttaatatatttttgaaactatctatgttttaatattcatgtttctatttttgtgtctttgtaaatctatgcaggattgagaatacaaatttcatctttatgattattacaagtctaagtgtgtcactacttgcacgtactgtgttattttagttgtagctgagtattttcttggtttcattccagcacctgattcaatttgtgtattggccactagcttcctaatttatataatttattccttgatcaaattgcccattgtaaaatatgagaaaataaattgagtcattttccttacaatttgaaaattcaagcatgataagtcaactatgaacaatctgtctagaaactgtaatgcaacaaatatatttcttgttaagcgtctagtataaaaccttaaaacaacttataaccccatatgtgaaacaaataaacttaccacaattaagttttttctgtacaagtcgtgtattgccaattacgtgccctatttttaatataataatattatagtagcacaattattattcaacagatttacaacataatcacaactatgaatgaaaaatgtgtttagacatcgttaagtaaagatttatcaat

SEQ ID NO: 235799 - DNA, 1452 bp, Cannabis indica
ctttcctaacagattgaatattacttccctttagtttaaattgtgggagtgttaaaagttggatccaaatttataataagttataaattaattattcacattgattaatggtacataaggagtcaagagataattagaagggtaacacggtaattttgaccaactctaattatgaactaataattagagagcgaactacatatattaattatatcaatggattataagtaagaaatctgtaaatataattctatattgttaaagagtaccattctatatttatagtggagtaattataggattaataaaatggattattctattgatgagatcgataataatcaagtgtttattggatctttaaaatataggtttatggtccctgagtcacctctatgcaacgttttacatgggaatgttttatttgatgagtaaatttgaatgatgttatacctggaattcagctgtatttcagagagtgacacatattgaacaaatggaatatgaaccaccagatgtaataacaattatgtcattaaatgcaatatggaataacttattaaatatagaattaatagagtatattcataacttcctgactgtatagtcttaggaaagacaaggatacagaaactatcaattcgtgtattaatgagaaaccatactgcatcagaaagcatattcccgagggaactatggacaatgcatagcgagacatctacctcacaacatgtagggaagtattgacgaggcgaatcgactgtttgaacacttagcgtataatccatattatataactaagtgtaatagcttgggagcatggaggacatgattgtccagtctacaaggccttatggtcaaagagcagctcttaagttttctcaataaactggtgctgatgccattgctagaaagcatatgaataaaccaagtcattcatctatgtacaaagcgagatgattctagcgagatgctcctatcccacgtaagtgtccactaccttgaagattagaataacaaacggttatgtagatttttagctctacacatgttaaaatggaacgtggtcatagcccacgttttgtgaaaatagttatgtatttcaaattcaaatatgaataactaccaacctatatccctataagtaggggcaggcaaaaaaagggacgaaaaatctttgagaaaaaaaaaagaccactaattgtaaaactataattttgtatccagaaatatcttgaataagatagactcatagactatgcagagttaactgcaagaccatgtaaaaaacatggtttcattattactattattattcttatcgaatttcttataatttttgtgcttaatttattacgaaaaaggcttattaattagttgatgaaaatctgcgttaacaatatggtactttcattgagagcctatgtgatataaactcaaaaaaaaaaaaaa

SEQ ID NO: 235800 - DNA, 2728 bp, Cannabis indica
attgccaattggtttttgagatggatcctcattcatcttattctcaacttctaacatggtatcaaaaccaccaaagtgttgccagtccaaacagatacttccgctgtctccccgttaacctccatttgggacatttcggccaatgtgccagttttcagtgttcactacaagaaatatcacttttaccagcacagttcgctactgatctggtaaaagtaacttttaccagcgcatttcgcaaactgagctggcaaagaggtcaaagttttaccagcatacatttgcagtggctaaaatctaacttttaccaacgcatttacgtgctgggaaaagtcatctttgccagtgcttttcattttatgctggcaaaagttctaataccaacactgatttgccaacccctttttgccaacgcaggacaagtaaattctattttaccagcgtaattctaacttttgccagcacaaaaatgtgctggtaaaagtgacatttcttatagtggttgggtctttgacttatttcaaaatccactaatttcccgacgtgtacacaccttcaaatttcttaatatttggccttgtggaattatttcaaatatcacgttcagtcctgtggtctcttaaaggtcgttcgttataccaacactttttcaggcacaaacgtgaggagggtgtattaagagttagtcccacattgctaatatgtggaaataaattgtgtgagatataagatgaatgtgctactcttcccattgccaattggttttgagatggaaccccattcatcttattccaaactttaacaaattttttatcaaaataaaacttaataataattcgataagaaaatattaggactagactagttatatttcctttttacatatgttcatactaaaaattttctttaagtttgttattatattaaaaaaattgataaaaattaaggtagtactatttttttttttggtaaatgagaaaatttattgcccaaaaaacctttacaattacaatttagctgagaatacttaacttctgaaaccaaattctatcttctctttataagttttctctataaaatgagaaaacttttcacaaatatcttttttaattctatttataattatatgaacactatacaatttttgcatctaaaaaaagtattccttacatcccatacattgtatattattttatatatgtcattctataattaatattcaaggtctaagttattatttaataaataaatattctactaagtaactattacaaaatataaggttcaaaatagtttaacctaacttaaaaaaatagtttcttagcatttttttttggagagaaaatcaaattttttcattaattaagaaaatcagacaaagtccattacatgaagatatagcttataaagcaaaatcaacaataataataagcataacaagccgtttacaataaaaatgaagaaaaccctaatatcaacatcctcaacgatagatccgatgcaataagccaccaatgatcaagcataaaaaagtgtaaagcaaactagatttttaacccaaatgaacatctgacaaagttcacctatcaatggctatcagccaataatcatccaataaaaattaggacatatcaacctcattatttacacacgaaataagggaaataatcaaatgaccaactatggctcaaatcaatcaagggggcttcaacccttactttttagaaatagatctccataggtacctagctgtgatagattattacgatagggtagacaaaattgtaaggagtctaggacattttcttccaccacctgagtccattagggtagatccttttactcttatgcatatcttgacttcaatcattgcaatatggtagattcttaagccgagagaatgtagctttatttactcagagaaaaccaaagtatagcagagtcaatagttgttcccaaatcagtcttctttgtatttttactaactttgcgtcaaccactttgtgtatgtccctaactttattttgtttaaattttgcagagaagccccattcggtgggatttggtgttaaaggccgccacatcatcctagactaggtttgcgggacacctcttggaatgcccttccggatgtatatcccaaatgcttattcgaagggtctcttagctactccttcttattaaggcgggacacccttctaaatctggagagatatggtctttgagataaatatcttgggtctcatataggttttaggcccatcctttcgtacaaattgagcctgttatcttgttaaagccttctgaccagactttagatgattaattttgaattggggaatgtcacgtatcccccttcaaaaaatatggataactctcaggacccaatactagccaaacccctaccggaatcgagaaccaccctagcccacaaccaccgcgccacctccaccacaccaaactggagcgaagccaccttctgccgaacgaatccatacaggatcagagatcatacccaaaccaccaagaaaccagaggaagactatgagtgaaggaagatagcaagaggaaaatcaattcatgaaggctgccccaaggtaccaatcgaaatgcctgaccaaagctacacctaagcctaggaggggctggcgcgcgggccaggccggactgagagatcaaagaagagatcctttacgactaggcttcaaagagagagagagagagagag

SEQ ID NO: 235801 - DNA, 3619 bp, Cannabis indica
tcatcctcaataggaaatcttctgcctattattgaacgaacaggaatagccttggataggatacaccaccaaagaaccttgagcctctcgggaattttactgttccatagtttgttccacatagaaggggcaacctcgcaaggattcgttctttccgccaccaaggctctaagggtcgatttgcatgagaatttaccattacgttccaagatccagaaccatctatcctctccatcaccagacgggtggccccctttcagtatagccgagatagtctcattatcaaacaaacttttaagtttttgggtattccatccaccattgtccaggagaagctctgcaacttttgtctccccattcaacgagggtcctcttgggtggggaagaaatcccttcaaatgcgcaatccacggatcatgccatatgacaatattccgaccatccacaactcgcttacaggcacccttgctgataataggtcttgattttgccatattcttccagaaccacgagtccgaggcttttgggttgcattcaagaaaagacttacctctaagatattttgcttccagtattcgacaacataagaattggtttccagtcagaaggttccacccctatttagccaggaaagcttggttcatttctttggatttccgggagcccaagcctcctactgacttggggaggcaaagtttgtcccaggctctaaggtgaagtccgtgattgcccttttcggaaccccaccagaaatcccgagccaatccgtcaatcttagcggcaaggcgattggatagtttagttgtttgcatagcatacaggggaagagataagcccactgacttgatcatagtcgctctccttgctttagagagagtcttagctttccagccgtgcaatttcgctgttaggttatccagaataaaattaaagtctgcattttttgtctcgatctgaataaaggaagccctagataattgaccttgccttccggcgaacctatacccacaaatcctgatccttgtttcatgctcgcaggtgtattcttactgaagaatattgaggtcttcattttattcactttctgccccgaccaagagcaaaacttttcaagacaatcccaataaccttttgattcctctaaggtggctttgccgacaagaatgagatcatcaacaaagaagatatgagaaatgacagggcccctcctactaagtctgatactgctaatagttttcttatctaaggcttcattcaacagccttgacaaaatttctgcagcctagataaataagtagggcgaaagagggtcaccctgacgaagaccacacgccgggttaatcttgccaacagggcctccgttaagacagatattgagggaggtggttgtgatacactgagagacccacttacgaaactcaagaggcacctcaaaacactcaagcacatgatcaataaatctccaactcatcctatcataagctttcataagatcaatcttaattgcaaaccaaccttctctgccttttttcctattaaacgagtggactatttcctgggcaatcacgttattgtcctgaatattcctccccagaacaaaggcggcttgggtggggcatatgagcttaggtaacaacggtttgatcctgttagcaatgatcttcgaaatgaccttatacaccacattgcaaagagagatcggacgaaagtgattcgatctcttcggattctggatcttaggaatcaggacaatattagtagcattgactcctttgtgcatacaccctgaatggaagaaatccaggattgcatcgcagaagtcgttccctacagaatcccaatagtgtttaaaaaagaggactgacattcatcaggtcccggagctttgttactgctcatagcaaacaaggtagccctaatttcctcaagagagggtctccggataagctctgcctgatcgtccattgagactttatcctggattaagtcatgacaatttagatcatggccaatctccacaccagagaatatgccattaaagaactccataaattcattgccaatcagctctcttttcatgatccacaaattatctttattaaggatgctctcaatggcgttccttctacctctgattgaagcggaaaggaagaaaattttagaacacttatcccctttcttcagccaagtaaccctggccctctacttccaatacaaatctttccttactctagcctcgttaagggagctacgtaatgccctttcagtcgcccaatctctagatcccacaggcagtttttgaatgaaatcaagtctcttttccagatcacggatcagagtatcaaattttccaaattgggatctgttccagtgcataagcgcaacccgagtagctccaagcagagtccaccactagtctgctccgatcatccctagtccaggcttcttcaaatttaaattttcttcggatattttcctccatcccttccgaaaacaggcaaagagggcgatgatccgagttggaggtctgggacgagcagagaacagcttttgggaaaagtctaatccaaccaccattaacaagtcctttgtcgagggccgatttaacatgattggtcctagaaggatgattatcccaagtcaacttgtctccttggattggcaaattaatcagaccccgagcattcaccaaacgggagataaccggaatgaactggtctctacctttagatccgacacgttccgagtcacagagcacgaaattagtgtcacccaatataagccacggccctccaaatctatccccagtcttcataaagttctcccaaaaagttttcttagcatggaagtaaagggggccgtagacacaggacaaaagccaaggatgcgagggggggtccgagaaaacaatacccgatatatggttttgggaacgcgcaatacattcaaactcaaacccaattttccaagccaaaataatacctcctgcattaccaaccgcaggaacagtattatgaaaataaaaatggagcgagtgaagggtacgtaccaaagatgaggcatcaactttgagttcgatcagaaagatgaaatccggggatctcgaccgaatcagggacttcaactcacgaactgtagaggtctgccctaaccctctacagttccaagcaatgcctcgcatggctcctgtggaggagtagagacctcctccacaggggtatgagagtgagcagacccaaaggaaccggtatcctccaccacgaaagtgccaaccataggccttgatgagatcacctttcttcccttagtattccacacattcgatccactgaaaacgctaatggataaagagatatcctccgatggttcttcctccgcatctttggaagcattagcattgacatccgtgtcccaagggaagtctcggacaacaccgggatgatagtggggaaccttccatggccgtgaacaaagggaagtggatgccccgtccaaatttctcttcttaaaaggattagttctagcatcggtctccaaggaagacggaaccccaaagtcaccgccaatggctttaatctcagattagtccaaattggtaaacttctttagctcttgtaca

SEQ ID NO: 235802 - DNA, 1470 bp, Cannabis indica
ttttttagtattttatttacataaaatatgatcttttagtgtatttttatgttctactcttgttattttgttgttgatttttttattatatgtatattattttttatattgctttgatgttgtttacttactttcatgtggttttcttgtttttattatattttataaaataccataaaaatattaaaaaagaaaactttgaatgtaaaaatgtaaaatttttataaaaattggtgttttatctaattatcccgagggagtttggtttttcttggaccgatttcgggtctcttttctttgacttttggtctttaaaaatgtcatttcttcatagttttaggtcatttatttatcactttttatttttttttttttccaatgatgccacaaatactatttttaactccaaacaaagataaaattaaatccaaacaaaatatttttaacataaaatatatcaaattaatttcataaaaatatttatttaaaatttaattaatttttagttattaataataaacatgtattttctttgttacttttatttatttcattatcttatttgtgtcataatatgttatttcacctataaaattaattaacactataatatttttaaataaaaatatattacattaattctatgaaaatattaattatatagaattaattttattttatattttttactaataaatatgtattttttgactacttaacaacagaaagtgttgttttcttaaaattcggggaatttttaagtccttaaatctaacaatttcaatagttcgaagaaaatttttaacgaccaaaaaattttagggggcatgttttggtataaatcgaaatttagggggaaaaattactaattagcctatttttcaatattacaatttaaatttaaactcattaatggcatatatctaaaaaaatatatttctattattactgttttacccaatattcacatatgcttcaaaaaatatctatctattattgtttttttaaaacaataaaattaaaaaaagtgtttatgtttcttgaaaatcttagcatcttttttttaatgtttattgatactcatagattaataacacgactctggacactatgctagaactaccaatcctacacaatcaattagagttcaacaactgccgcaccttcttagcaatctcagcagcaaatgtacaatatcaaagttctcaaataatcattcatattctacactttctcaactgtttttgtattaataatctcattttgtcatttataattttagcaaagacatcctaacacattgcaccaactcagtgaggaattataaactatggggttagcattaaaggatatggagaagtattttgagtaatatggagataatatcaaaggcatcaacctatactattttgatatgttctatgtgttgttgtgaatggcatgtatttatatgcagctataatattgact

SEQ ID NO: 235803 - DNA, 719 bp, Cannabis indica
aacttttttcaaaccaaggtggtgtgattgttccaaaagatcatttagagtatcaaggatctcttctatttcagatttcacaacagttaccttaaatggattacttgttgttgtgctttcgagttcatctttctccatcttgagtcgccgagcttcagtattgatcttgtccgtgacgtgatctgcttcatacagtacttgtttaagttgatcgagccaattcctcacgttggtgtctccaagttgtttctcctcagcatcattcagcagtgcagtagccgataacaacatattattcaactttctgagcagtttttcaatgagttctttcccttgaaacaattgacggacgtcctcaggaacaagcctctcaaaggagacattgaggatactagagagaacagctcctcccaccaatgcagcagccatggttttcaattgggatcttgagagaaagagagagaaagaagcagtgtattggtagagaatgtgagcacaaaatggagtattggaattgtgtgaaaacaagtggtatggttttgtatggtgggaaaagtgatccaataattcaatggacattattattattgccggctccaacacgttcataagatgttgatattttagtctgctatcccttcaagaacttcaaattcgtttttgatactgtaccatattaaaacaaaaaacttataggataatattataactataataaa

SEQ ID NO: 235804 - DNA, 560 bp, Cannabis indica
aaaaaaaaaaaaatagagaataatatttattaagggaacaaaaaataaaattaaaaatcatcctctttgttttggggaatttctgaattgtcgaaatatgattgtatgagatccatattgtgagtgtaatcaagaagaataaggaggagatatagagagcgagaaaaaatgatttagggagaaaatcacatgaatgaaggaaggaggaagtgggtacagaaagattaagaggaaattgctaaccttaaggagaggagagaaagagggccttgaggaaggaatctccaccgaattcggaagctgctaatttcgctcttcacattttctaatttgcctttcctttccgttctactcactaacagacaacagtacacgttggattcactacacccgcattactctacatattaaatattgaattgaataaaagattcacgtcattgtaaaaaaataaattaaagattcaattaagaaggattacctctcaagttttcaatgtctttttaaaagaaaatccatctccacacaaaatttggtgtccaaaaataaatattattttt

SEQ ID NO: 235805 - DNA, 1102 bp, Cannabis indica
tttttatcatgtgaggatagctatattacaaatgctattaacatgtcatccttttctgatcgagaactagatccacatgtcaatcatatacaaactgtactcgtatttctaagtgaaaaattcatcctataacgatagggtttaaattattatttaagttttaacaaaacagatcatctaatcagtaatttttgtaaaattaagaatctaaaatagtatttatctatatagcatgaagaaattgcaacgacatttggttagaaggaatgaaaacataagaattagaatatgaatggaatagaattaaatttaaaatgtaaaaaaaaaataataaaaaaattattaattttttttttcatcttgcattggaatgatctttgattccattttaaaatgaaatagtcaatccaccaaaataataaaaaagaatgacattctaatactttaaaatacaacaaaacaaataatagaataaaaattatttattttctatttcattacctcctctccaaccaaaccccagatgacataatcttataaatgtacaatatttttagaaaaatgtttacagttatatttaaaaaaaaaatagagttttgtcaataaaaaaaagacttaaacaactaaaatctcaggaaaagcttatgctaaaaacctttaatttagttttataaattataatttagtactacaggtgtaatgacaatacaccctgaagcaaaatttgattgaagaataaaaaagagagagaaaaaaaaaacgaaagcattatttatcaattaaattataaataaacctaaccgattttcctattcatagagcattaacaacttttgttaaactttatttgatcaattatgacttgagaaaaactaaaatgaacaaaatctaaatagaaaatgttggtctagacaagaatgtactcggatagaaaatgacaattcataaacaaggaatcattttctcattcaaagtagccacaaaaggcttcaaggtatccaaaacctctgccacttatattgaataacaaaaaattgagtgtaaataaatattatgacatataataaatactatttatgacatctcaagaatgaaaaacata

SEQ ID NO: 235806 - DNA, 803 bp, Cannabis indica
gcccacaaatgaaataaataaaacatataacatacttaaaagtctaaaacagtaagacttttgttttgctggtatttatttttgtcaataaacaatatgaagcaccatgatcaagcatgcgcaacatgataaggaataacatgcagttatgcatcacaaaatgagacaaccaaactacaagggtatttaaagacatggtatattgttagaccctttacttaattattacacctatgcacaatatgattaagagtccagtccaaatatgttggcatcacagcacaagagagtcttgaaaacctgctgtggccatttataaattatataaacaacagtaataacaaaataaaataaaggacttgtgagaaatcctcatgattcaatctctacacacataaatacagtacacaacaatatggcttcttccacagaacaagagttgaggtaatatgaataaaaaccaatgacagatatattacacaaaatctataacacccaattaatgttcttactccaacaactaaagcttcaaactaaactatctttaacccccagacccacaaatacagttcagttaaataaagatgagcctataagaacaaagcaaagaaaataaacaaaacaaaatttgatgaacctgatatgatgcaaaagaccatctcccacagacccaccagtgagtttgaaaataataaggtttattccttcaaaacaaaatgtattttcactgagtttgaaaatcaatattttatttccactgagacctgaaaattagatacccaaaattatattgattaataaaa

SEQ ID NO: 235807 - DNA, 892 bp, Cannabis indica
aatgcatgcttaaccgtttcaggatgaaatttacacagaggacatagaggggaatcaatgacacatcttttatgaagagaaaaagaaacaggaatagcattagaaagcattctccaaataaacaccttaacttttggagggattttcaaagtccagagttttgtccagaattttttagagccagcaaaagaagaagaggaaggaagatcatgagaagagaaagcaaaatgataagcagacttgacagtacactccccagaactatcctgcccccaaataagctcatcctctccaaaatcacccagaagagggacactgaggatatcattaaccagagaagcagaaaagcagtttgaaagtttagaaatatcccaatccccattctcagaaataaagtaggataacaaaggggaaggaggcctatggttagaagaaaaaaacttgattctgttattaggaatccaatggtcttcaatcgtcctaatgtgactaccatttcccaccttccataaaagacccgactgcatcaagtccctaccccagagaatacttctccaagtaaaagaagggttgtgaccaggtttagcctcaagaaaagcattgcgagggaaatatctagccttaaggacagaagctaggagagaagaagggtttttaaaaattctccaggcttgtttagccaacatagcttggttaaaatgaataagagaccggaagcccaaaccacctaagaatttagatttacacaaagacttccaagatttccaatggattttatgggaagtccctgatgatccccaccagaatctggccatcacagcttcgatgcccttacagagtttgacaggtaagcgaaaacaagacatagcataagccggaatagcctgaataa

SEQ ID NO: 235808 - DNA, 862 bp, Cannabis indica
aaattttataattatttataatggattttagaaaattatttttgaaaattgaattaaagttgaaaattaatttttaattaattctggatcaacttaaattatgtaattttcattattaaaatatacagattaaaataagtgattagataaaatatattttaaataatgagctttaatcataaagatattcgatctccattattggttctacatagttcttgttttagtaagattcatccctaatagatggacgttcattagcaatttaacgccgtataatctcgaaagataagtattattgtaagtgatttattcttagtaacgaccatccgaatagtgcctattaagaataggacttacaaggtatgaaataatggtagaagctcatgagataagaatgaccttgactctcgactaaaatgaagcaacgtcggattctcttttcgatcgaataaaaggttgctataatggtttccattttagatgagttgaatactctatttaatggatgatatctttgactctcgactaaaacgaagcattgtatcagtttgttgaaaaccttggcaaataattgaatatattttaatttggtatttttgcaaacatgttaacttacctgttattttctgaacttgtgtatgaatttaagtgaaccaaaaatttatttctgtttattgatatttgtagtgtcgaaataaataaaccacaccccgaatctcaccttttacatgcctttgcaaatgaactctatagtgtgaaaatgtctcctggtaagagcattaattcacacttaatgatgatgaatatgaaatttcggaaagaaaatttgctaggaattgatttatcaagagaacaatgg

SEQ ID NO: 235809 - DNA, 1434 bp, Cannabis indica
tgagatttaattattatttatagaatacatgttgtggaaatttattttaattaattaattaattatgctatatgtgaatgtctcgttttctgtgcttgtgttcagaagcggtggaaagcaacgttaggcctctagagagtcacattttgtatgatttggaatgttaatagtggggtaccattgttaggttttgattatcggggattttgtcggaagtttggtttgaccattttgcccttgttgtgcatggttacttttgttttatgttaagggtatattagtcttttaccttggggaattttgtcattatgtggggatattagttgctgtaaattatgttaatattaatagaaataatagggtttgtgtttttaaggaaaaacctagaaaattacttctctctccctctttctctcgaattggcaagaaccagcacaaagctggaatttcctcagctcaaaccagtgggtattagtaagaattggtgtgttatttcaaggtatggaaccctagtctctttctttacatatttttgttagtaaagaggggttttgactcatgattgtaggaattttgatgttatggtaacaattggtctttgaattagattctggaacttatctatggttgtttagggttgatttaggttgtctttgtggtctatagtgaagttttggcaaactcaaaccttgacctctaatggtgtctttggattttgagttaattgttgagttcttttggtttgtttgggtctatttgagtgtttgtaggtatactggagagttttgcaaagtttggcttggttttgaggtcatcgggtcgatttttgggttcccagcacagaaccggtcgaccggttttgggggaccattagaaccggtcgaccgattggtacccaggaaccggactttcggttgggaaccagtctgtcaattgggtcattttcctagaccctagttttccctattttgtgttgtttaaggtgttagtatcctttttatcgatagggttatctttaattttaattttaaattcccgttaagtattttagcgtgtctctcattgagttttgaacgttattgtttaaggccctgtaaaacgtcaagctgcgtttccactcaggctgaccgacacacttgagcacggaacgaggtaagatagcataataatatatatgtgaatgtatgcatgagttaaatgtttacactactaacactaacggttatatgattttaagggtgttagtacagtgtaggacatccggatgattacagtgttaccagcacgagtaccagagggtacgtcgtgcctgtggtacaacacttagtaacttctggggttacaataatggctctaccaacacgagtacagatttggtactttagtgcatttgatacagtggtcgtacttcccttaagaacgttcttcaccatt

SEQ ID NO: 235810 - DNA, 1335 bp, Cannabis indica
caatattttccaaattaatgtgtcgaccttcgtaatcaaagaattatgaaaaaactgtatttttgcaaatgccaataattttctttaataacaataaagaaaaaatagaaataatagtgtagaatttaaaccttgacacaagagaattgtatgtgatatcagtgttctttcaaacactactagtccaaggggccgtgcccaaagaataaaatcaattagtaaagtatcaaatattacaaaagcaattgacttaaacaaatttagactccctctagtgatttgtcgcaaccctttgtagtctaccttgctaatctgatctctgaagcacaccaagtagtgaactcccttcagctattgatgtatgcttacttcctctcaaagtaaggcttaaacaaatcttctctcgtagatatatactcacttcttgagattggaaaagtcttttcccaaagatccacgcttgttcaaagcttctcttcaacctatttcatgaatagtatgggatcataataagaaaaccaaaacctagttgaacactttaagtttttacaaatgaaatactcttcacataaagatagatatgaaaatatcagattagaagagataaaattgtttggctgctctctacgtcctatttatagaacatagcaaccctagagacagccacaaaaatgatttcccagctgtacaaaacttttttaaaaaatttcctgatttgtagcatcataatcggtctctgcagcaacagattaggaccagaaaggaaacattccaaaatggaccaagatcatgaatttggacttcaaacttgtcaaataaagtttatttgatatgctctaattaaggcaaaattgaaatcattaattagaaaaagggaaagtcaagtttcccaaagttagacaactttccataagagaattcattctcttacaagaagttttctaaaccaaaagagactagctgagaaggaatattttcttagaagaaaatagtaattagaggcacaaaatcaatgtaataaaaataatttaaatgctcaataaaaatgcatattaattaaaaaaaatattttgacaactaaattaccaaaaaaatacctaaaaatctctccctttagcactttagataatcaaaatatttttaataaccaagaacctacaaaacaaagttagaaaaacaaacatataaactcccccctgggaagcacaacgttaaactaaaataaaaagctaactttaactaaagattaacataaacacaaacctcaactcccactgtacaattgagtatacaatctaaattaaaatattcaaattactccccttttttgtttat

SEQ ID NO: 235811 - DNA, 745 bp, Cannabis indica
aaagatatctctgtaacaacactaagaaaaaatcatattcttgaatggaatccattactatatcaaacaacacccaaagcattaaatttatgaaccaaaagcaaaatcagcaacattagacaaacccattaactaattaatcaatatatacacataagaatttcttcttcaccaccaccggtcgcccttcaggcctgcaaccaccgtcacgtcagtcacagacctctgccagcaaccaccgtctgaactgcctgaaaaccttcgacccctaccagccacgttcgacccccaccagttaccttcgacttcgacccccaccagccaccttcgacccctaacttcgatcagccctaaccatctttttctcaactcacagtgtaaaaatggtacttttttcaattttttttgaaataggagttgaacagcccatttaattttccaactcaactcacgtttcattttattataattttctaaataatttttatatattaatatttttagaataattggttatttgataattaaatagtaatgccatgtcattacatagtttttttacatgaaaaatgccacatcatcagttttaaaccaaagtgaaacatagagtaacagaaggatgaaaatttattagtttaaatagtttgaggactatttttgacaagcataatattataaggcgcaaaatttggtaaggtaaaaagttcggaagcaaaaaatgctatttattctatatattagtata

SEQ ID NO: 235812 - DNA, 3400 bp, Cannabis indica
caatttttatattttagttattgcgataatgatataaatataaagattgaatttaaagttcaaattctccgctataaaaaaaaaatatagtagtttgaacttttaattttctattttttataaatatgcatataaattatataatatataataaaagcatatatatttatgaaaactctcttactcgggttggtcgggttagttcgagttgattggacggattgatattattttcaacccgctcaatataaagattgggcgaattatatttttgtcaagtttttcggtttgcatttttcgtcgagttatctcagtttggtttgggcggattgttcgaattgagcggtttacaaaaatttatgtacaaccctaatgtatatgatcattgtctcttaagtcattcaggtaagtaataaatgtagcatttcaagttacaaatctagatataaaatggaaagcaaaacaaagaaagagatgacaatgacattctcaagagtcatcatcatctttaaattaggtcagcctttatttgtatatagaataagtcttatttcagtctcatagcaacatgcactaacaaggagttaagaaacatttttacaggaaaactaactaaggtgggtcaattcaacagactagcagaagtcatcatctctagaaactaaaatcagaaaaggcttgagaaaaaaataaaataaaattatttcagctcatataatacatgcacatctgcaattcatttctctaccagtgattttggctttaatggtaccgaaaccattgcaaccaaaaggatttagagaaacatagctgttattctcctcacaaaagatttcttcagtgcctcattgaactacaggtaaacagaaaatcacatgtcaatgacaacatagaagttgacaaaaagtccattattttttggtttgtgctttcttcatgcaaattcaagtagagaggtttgtgcactttccagttctggttgttgggtcaataaacaaatgctcatttctttttggctgaatggtccagggtatagcctaatccactatatagggcagacctactgaagtagttgggctgagcattgaaggtgggtaatacaaactatataaagactggatttttacttggatgtcaagaacagtagaaatatgtctagagaaataccttgcaaacaaaggaccttgtaaaacttcataactcatgtttaatgcaaatgagagcccacaaaacagtgagcttcaattgagtattcaaatcacgaagcgcatgtatgattaaatttcactatttttctttgtcaatttttatgttccactattcattgcttagagaatgatgattcccgtgtgaagactcttaggaaagtttaaaaaagttccaacctccaaatagaatctttcttcttttatacggctacaaagaagattaagccatgatagtagaaattttcctcaacttaatgggcaatgccgaagatttgaacatttcatgaacaattctaccatataaagcataaagatccaaatgacaagtcttttgtgatgataattacacatcatccatgttcatatgacattctaaatcagaaatattatactaattcaagttatttattgtttttttaattttatcaatgcaaattcatttcatctccacaaacactattgaagaatagatgaaacagggcatacctcatcatgtagagagaagagagcaagtgaatccatcagacacaagcttgttaatggcatccctaagtttaatatagtcatcaactttgttatacacctgatgtgaaatgcgagcataaccagttagggaaccaatctctccatctttaggaggccggtaatagagaggaacttcaacacaaaactcttccctcaaataagtcctcaactttatagtatctttctcactagaaacccctaaacaagcaggcaagccaatcattatcatgcttgcacacatctcaggagggcaaccaagatgagttccccaagcattagacaacatcttccccatcttaacaacttcttcatggtttctcttcttaatcccctcaataccatcttcaaacctattgatgaactccaaagcagaaggcaccaccaactgaggactgtaatcccttgttccaatccaagcactttctatagccaatccattaccatactcatgagaaacaacagggtggtgtaaatcagcaaccttgggagactttctacagtacaataaagctatagaaggtggacaaaagaaccatttatgtaaattactagcataataatcagctccaatctctttcatatcaacttttgtacacccaataccatgagcagcatctataaaaacctggtcaacaccttcttccctacaaatcttgaccaactctttaatgggtattaccacacaaggcattgaagtaatatggtcgattacagcaagcctaaccctcttaccattagccttacctctctctaaagctcttctaaactcagtaacaatctcttcattagagtttacaggaaaaggcaaaggtacctcaatcacgtgcccgccggcgcgtgtgatataagcctcgatggatttcttgacggcgccgtaagcataatggagcataacgacggcgtctcctttgtcgtattttccctgggagaaagcccatgaggtctgctggaggacgatggcggcagcggtagtggcattatcaacgatggagacctcatccacgtgttcggcgttgatcaaatccttgattaaagtcctggaatgaagaatccctttcttcagtccattgaagtagaaatcatcaggctgagccagaaaccttcgttgccatatcctctgcgcatccataacgaaagccgggcaacaaccaaagctaccgttgttgatccgggcaacagtctggtcatggtgagcgaactcggatctaatttcggattctgtgatgaaagaagatagcttgggctttttgggaacatgggtattgcttttaccgtcgccattgaaaacgagatggtggttttcgtcgttatcgagctcaagctcacggccatggtggttgtgcggcgaggaagccatggatggtgaaagtacaagaaagtggtaaaagggttagagaattagggttcggagaggccgaggatgaggaagatggcgagcattacagagaagagagcgtgtaagggtgtgattggagaggtttttgggtaatggaaggatgagattgaaaagttctacagtctcaacactgagaaatgaataagagaataaagtaaggggttttaaataaaatatgttttgtttaattattatgggaaatttgattttttatgcttacatttcgttaaaattttttttctaaacaaataataactaatatttgtaaaat

SEQ ID NO: 235813 - DNA, 1332 bp, Cannabis indica
caagaaattcacaggccatagtcacattagcccgcccccgagcatccacaaaaatcccccacttcatcctctcaatttgggctcaaattgtctcgaaccgtggttgacgtctcaaaggatttgtagggaattcattaccctggtcttcaatgtaagccctattttttatcctcataaaacgattctgggcctcctcattaacaaactgggttctatcgaaatccgtagtcgaaacccgtagttggtgggtttgatgacgaaccctcctcaacatgcctagttcttttaggtgccatttttttttagcaataatagaatatttttttttcttctttttttttttcttcttttttttttcggatttattttttctttttttctgatttttttttctaaataatgctaagaaaagaaaaaaaattgggcagcacctccccttagtttttctacttcccaaaaattcaaaatcactcaaataatatttccaaatactcaacaccacaataaaatattaacaaacccaatatcaacaacattttttttcacaacacacaattattaccacccaaaatctataacaagtaaatcaaattccttaaagattgtaggaagtgatacttacaaacccaaagaagctttactccacctccattgttgaatgttcttgaaagcttgaggttgaagatgaagacaatggtatttttggatttggggtattatgggtgatttttggtatggtttttgatggtatgtgtagattgatgagtgaaattgggtttttgaatggattgggtttgagaaattgaagaaaagatgagaaaattgaagattggtgatgaaaatttgaatttttagaagagagaatggcttgggcggctgaggagaatttgaaaaagtttgaatttggtttagggttgaatgagggggaaaataggatattatagaaatcctgttagctagtggcgactttccctaaagctagtcgcaactagcttaaagtcaaattttaggcgtttctagaaaaaaggctagtcgcgactggggtcgcgacttccagacaccctagtcgcgactactgggaacaaatttttcgtggtttctgtaaaacctcaggtcgtgaccagggtcgcgacttccaaaaagggtcgcgacccaggaacccggtggtcgcgaccattgggctcctggtcccgaaaaatatatttatttttcacgtttttcacgattcaactggaaaaatttaatgtctggtactcaactaaaaaattgaaaatactaaaaatactaaagcaataacataatcagaaagactgaaaaattaaagaaaacact

SEQ ID NO: 235814 - DNA, 863 bp, Cannabis indica
ggttgctagtgtttgccctcttcccgcactacagctgcactaattgcatcttttgagatggctaaataaagaaataatgtctctccagttattggttttgcataaactggaggcgttgcgagatgcctttttatgctctgaaaggcctcttcgaactcttttgtccactcgaactttttgttgtctcgcaatatgttgaagaatggcacacacttatcagttgacttcgatatgaatatgttaagtgtcgccattcttcctatcagggcctatacttctttaggctttgttgggaatggcatgtctattaatgccttgatttttttaggatttgcctcaatacccctcgtgttaactatgaatcccaaaaactttcccgaggagactccagaggaacattttttgggtttagcttcatgttatacttttttaatatcaatccgtgaggtctgaggtatgatccttactctttatcaatttcaccaacatatcatcgacgtaaacctccttgcgaacatttcgtttactagtcactgatacgtagccctagcgttcttcagtccgaactggatgactttataataatagagtcccatgttggttacgaagcttgtatcttcttaatttgggacgtacatttttatctggttatatccaggacatgcatccataaacgacataagctcgtacccattagttgcacccactaactggtcgatcctgggaagtggaaaacagtcttttgggcacgccttattcagatcggagaagtcaatacaagttctcaaagttccattaggtttcgtgatgagaacaggattggctttttacgagggataaaacacctcgcgtataaaatcgtt

SEQ ID NO: 235815 - DNA, 1604 bp, Cannabis indica
tttttatgaattgttaaaatttctaaaatttccatttccaaaggataagaaaatttctgcaacacactatgaggcaaagaagaaactagataaattacgcccagggtacgaatcaattcgtgtgtgcaagaataattgttgcttattttactattagcatgcattgaaagatttctgcccggtgtgtgggaccaatagatggattaatacgaacacaaggggataaaagtagcgcataagatgatgcattactttccgttgactcctcgattaaaaagattatatagttcaagatgtacagccaaagaggtggtatggcattgtactgggcgcatgaaagaaaatggtgttatgcgtcatcctgtcgattctgctgcatgaaaaaactttgattgcagacatcctaattttgcaagagatccgcaaaatgtttgattaggtttacctgatgatggatttaatccttttagaaacatgagccaatcgtatagtatgtggcctgtagtgttggcaaattacaatttgccactgtggatgtgtatgaaggataataatttcttgttgactctccttagtcttggacctaaatcacctggtaaggacatggatgtatttttgaggccactagctgaatgaattgtggaataacgggattaaaacaagagatgctacaagtaattcaatgttcaagatgtgcgcaactctcctttggacaattaattatttcgccacacgcgctaggttgtctggatggagtggccagggatataaagcttgtcttacatgacacgaggatgtttcttatgttggccatagatgtttcttaccatccaatcattgtatgagaaagaactgtgaatttgatggaaacattgagaagagacttcctccaagatgatttacttgtttcaaaatattagaacaagtgtatgcgttatcacaacgggatatggggaaacgaaaaagaggtgacactaaaagtgattggaggaaaaaaacatgttttatgaacttgagtattggagtacaaatgagttgaaacacaacttagattttatgcacgttgaaaagaatgtttgtgatagtatccttggcaccctcttaaattatgacaagtctaaagacgccactagtgcaatataagatttgaaaaatatgggagttcgtcaatccttatggatttacaaagatgctcagaaaagattgctgaaaccccatgccccttatgtgttgactgctgaagataagcaagtgttttataaatttttgaaagaagttaaattgccagatgggttttttttgactttgaagaagagagtaactaataaaaatattattggattgaaatcccatgactatcatgtcataatgcagaggttacttccagtttgtattgacaagtttttgtcgaaggaagtatcaagccacataatagaattgtgtaattttttttttagaattttatgttctaggacattgaattttaaagatatgtagaaggcacaaggagatctcattcacattttgtgcaaacttaagaggatctatcttccaacattttttaatatcatgatacacttgggtgctacattggcctgaggaag

SEQ ID NO: 235816 - DNA, 1021 bp, Cannabis indica
ttcttctcattctctttctttagtgttctgggcttaaaaagggttaagacaagggttaggtttgagtatatcttctgtaaatttttattgttttttgttctttttttgattgttttttatggcaatcactaggtcttcttgttcttcttttgatttttatgatagtaagtttgatacttaaagaaaaagaaaaatatgtaggtcggattcttcgagtgatagtgagtatatatcagtagagaagctaggggttcaaatgtggatccaaaagagaacttaaaaaaaaacgtggcaaggagaaagtggttggtaaagatggcaatgatgagcatgggtctaagagaggtaagattggtgttcaaaaaaataattaagatgatgaagaggttgatgttgatcggttcaagaagaaaaaaataaataaataaataaataaaaataaattatgcaacctgatataggtgacaataggctcttttcaataatctttagggttttacaaatttgcttattatttttggggagaagagtctcattaaaagtgagaaatagagagataggtcaaaatgacttatctcatcaagtttcataataatactatgagcattactattaggcgctagtggtgcctagcatcttctcgacatgtcgcgttgcgatcagctagcgatacttctagaaagctattatattaaattatgtgggacccgatatttagttggaccaatagcgatatgaacacataggaggatgctacaccactagtgtcttttaacatttctctaatattattggtgtttgacgccgtatttttaaaacaaataataattagaaattgaatgtgcacccttaacaatatatataaaactctattatacttttattcataattatctataacatagttttattaataattataattctaatcatctatatatctatactagtatattgttacgtgcgatgcacgtatgctatgttttatattaagtattatattatgagttcggaaggaaat

SEQ ID NO: 235817 - DNA, 652 bp, Cannabis indica
taaaaaaaaaaacattatattttttgagattaatttgaaagagatcgaaagttatatgcgaatagagccaaaacatctatatattaatatatatatatacatgcatgtaaatatagaaatttatgcatgtaaatatgtaacatgcatgtaaatatgtaatcattgtattgaaatgaaatatagaaattcatcattgaaaaatgggatcaattagcaaagcagcaacagaatctttggtgacttttccaacatgtgtaaaaccatcaccatttttgtagagaagatccataaccctagaaaaattaagaacacgaagtaatatgggtgaagctaatttagttggcttcaaaaactcttcatttatttctttccatgcattaattataagcttattgagttcatcataggcttcttcttcacaaacaccatgttgcatcatatacgattcaatggcagaatcttcatcatatttgtctttctcaaactgtacaagtaaaaaaaattattatctctatgttaataattaattaaaaattagttaattaactatatgtagatataataataaattttaatttgtacaatactaattgtctaagctacaattaataagcctttgggacaaaaatatatatgtatgattttagaaaat

SEQ ID NO: 235818 - DNA, 1121 bp, Cannabis indica
gagagagagagaaagagagacttagagggagaacttgcattttcccattttttttctttctaatttgcttattttggctaaaaggattaaatgataagagtttatcctttttcttgtcttattcacaaaaccatcatcctaaaaattaaggaattaaaaaatttccaatttaaaataatatttatttaacttatgaagaaattacaattttacccttccattaccccaaggcaagctaaatacttaagagtaaaatgatcctatatcataaccttgagtaataccgacatttcaaatgtctaatcatatcatcccactatatctaaaatactaatccatttttaagtgactctataggctaagcatcggattccactattatcgatcataaaacataaaatttataaaaaagtatacatataacatatataacacacctaaagttgaattatatatccctaattgagaaattaatttcctatggcctatatcaaaaaataagccttaattccttccaaggggcacataatcacataataatatataagtctcttaattatctgctaattcccatgattaaactatgcgttcattacatctaactacatttaatatatcagacttctttttacaagataaatcttttactctatataaatttaaaaaattacgagcattaggctatggcccattaaaattattgggtatatatttcttttatacatatactagagaattataagccacgcttcgggcggtgttgttcaagtcttataattttttttttaaatatatatatattgtagctattgagtgatatactctaaaatataatattttaatatgtgtattataaacaaagtaatattactgaaattaaaaacataatttgctatttctaaaatgcattaaaagataacaattttgtgataaacgttaaatggtggaaaaaaattgcaagagtttttatagtaaaataatggaaaaagataatagtttagaattagaaaactcgacttgtgactaatgatatagttatttttaaaatattattcagactttttttctaaatagaaataaacaatttaacattctatttatgaaagtttttatattttgtt

SEQ ID NO: 235819 - DNA, 1176 bp, Cannabis indica
ttgcaccaatctagaccgaaaactgaattctagatttttatatagaaaaaaatggactaaacagattgatgcttggccttactcaatacaatgaatatttgattttaaaatataaagcaaactctttgtaataagataaaatataatatgaagtcctagagagattacaagcaaattagagaagataagaacaaatttagctcaagtgtgtgtagttagagtgtttatgaaaagataataaacctttagtttagaacacttagaatgatgttatatgatgaataaatactcaatcaaccttaatttttgtaagaaaaatcaatttatatagagttagaatgaaatatagttgttagcacatttttcgaggcctcttctaccgcaaactggaagtccatttgtgaaacagaattccaaaattaccacaaccgactgaaattttggttaaggggcagtatgcattttgctttttttttacttaaaatgtgcataactccttactcgtttatttgatttttaaaaaatccagttgcattctcttagttaaatgatatgtgatcttaaaataaatttaaaaaatttagatgttatttttgtgaaataatttttcgcgcaaattagtgagccaaacttttaacttatagaccttaatgtactatgcaaatcactttaactaagactaaagtaaacatataccatttaattgtaagtagtcttgatgtagatgagcttcttagcttgatttgcatattttgatccaaatgtgacttttctcaagagttgactttaattttcaggttgacttttgattttgagctttgaagtcctcttttggatagggttttgaattcttgatatctcaattaaatttttctcttatgaattataaagtagctgatatacttgttagatctattttttttgatttatgtttaactttatcgagcaaatattggtattttatgaatttacttgtaaaatggttaaaaaaaaagaatttgtaacaaataataaggggtttttctagttttactctttaaaagtctttagttttttttttttttgtttttttttttttttttttttttttttacgtaaaattctacatagaaaacctctattgcaactagcgctgcaaccgaaattacaacaaaaaaatcgtacaaaaaactccta

SEQ ID NO: 235820 - DNA, 1899 bp, Cannabis indica
ctacatttttttttagtgttagggtagaattttgttaataaatttagagatcaattaatgtactcataatatactcatcaaataataatacacgtattcaatccatcagtttagtgtgcaactttattcacaactccacctggagggaggaccttgtccaccaatggttccagccagaagacgccagaagaattttgaatatcaccttaccaaaccacccagtggaagactcttggttgtggactcccgaaagcaatggtaaattcactatccgctcagcctaccgaaccataaaagaccttgatcaaggaatcactggtaatgaaaaatggcgaattttatggggggctaagatgcacccgagactgaaaatgctttggtggagaatactctcaaattgcctattaactcgaggtaaacttcaactctttgttggccttaatgatccattgtcctctatgttctttggtaatagaagactcgttgcatatcttttggaattgccatctggctcgttccttgtggtttggctggtgttggagtattaggacttcctccttcaacttctccaattgggaggattggataaattggttcaaaatctccgataacaaaccaaaagacaccagccttgatgcattccttgagggggctgcaataattttcgaaaagatttggagcgaaagaaacaaggtggttcaccatcgacaaagcacgcccacaaagataatcttccagctgatcgataatcggcttcaggaggcttttcagacccttcaaagtggcccagctccgatgatgcagtggctgcctcctcctaagggatggtacatatgcaacaccgatgtagcgatcggccaaacccaatcggttggagcggcaattttcagaaatgacaagggggagatcacaagcatacacacaacccgaattcagtatagcgagcctcaagcaggggaactcgcaactctttgctggggagctgaaaacgcctttaatctcggccacaagaacataatttttcagtgtgactcggctagggctgtctctgcaatttcaatagatagcaatgctttggacaagctccactacaacatcaaagacattgcctccaagttcaaagatttatctactaagtttgacatgcgggagatcagttggatccccataaatcacaatcgtgtggcccacaatgcggctcaaagggccctgcactctcaactgtttgggagttttgaggcgcccagttttttcggtttcgcaccttctcccttggtggatggctgactcggttacttatcctttttattttgtctttaagtttagtttagctagtttagttgttaattcggcttgctgcttgtttcttcaggaaagttttttagtttctttctgtttgctgcttgttagcagtttctttgttctctgtttgagcgttgcgctctttgtttgttttctttggctgttattaggcctcttaataaaaaaatggcattttttaaaaaaaaactaaaatataggaaaagttcattttatttaaaaaagaatgtcataaaaaacctttaaaattgtgtttatttttctttatcttttttatcttttaaaaaatgaaacactaaaaataaaatatcaactgtagaagctgattttttttactgctatttttttaaattactattttttttttgtttttgtttttattttttatagaaattgatgcaatattaaaataattttatcaaggtaataaattaataaactaattaattctatatattaaaataaactaattatttcaataaaagtagtagaaaaaaaataagtttcatcaacagtataatgaaaaaaaaacacagtacaaaaaattataatctaaaaataatacaaactttaaaaatc

SEQ ID NO: 235821 - DNA, 1042 bp, Cannabis indica
agagatttgggagatacttttatatttagccatgaagctggtgagagtttagccttttatggccatgttaagttcacaggtggacctatattggtcgagctcgatggcccaggtgcttcaggttttggtgacacctctcaccatggccggtaggcatgcattgctttgggagttttagcagaagagtgaagcatgcacacttctcctccttctcccttagacttcatggcgtaagggaattgttgaatttccctttttcaccattattttggccaaaaccatcattgttgtgctagactccaatattctcattgttgaagaattgacagatataatctgcgctggtcggcacgttggatagcacttggggaaatatgatgctctatgtctattcaacaacttgccctcttgtcaaggctttcaagacagattcttccaactttatgaagccatcacctcgctcaaggaactccttcatgttgctcattgagatccttctaatatctttccagaattcacttaacggcaagatgcctctatgtttgtctgtatattagccttcttttgtcaggcctttgaccgtgggggcctcagcaatgaacctttgaatgtagttttttaatgctcatcttgtctttgcttcatttttacaagtcatgaaagtatatgtcttgaggcatagaatcgaatatagaattcttgggataattcttcccaagaattgaatcgtcctggtgctagcttgaaataccactcttgggtgatttcattagggttgctggaaagattcaacattcacacatctctagatatttgttcgagatctgtttggatctcaaagtattttaagtgtattaggggatattcactgtttacatcgtctaagttggttatctttaacttgggcaaggggaaggcattaatgtatagccgtagaaaaggtgagtccccttaacctatctagctcaagttctgatggtttcgggctagccaacaccttgatcatgtctcttattttatccaaattgtgcttgcacagaaa

SEQ ID NO: 235822 - DNA, 2801 bp, Cannabis indica
cgaacgcaaaatagaaaaaaaaaatatcgacagacaacgaaaagagtgagagcgagcagcggtgccaaatcacaataggcggtgatctcaccatactttaattaaaaattacaaatatataacaatattatatatacaatcacatgatatatatatacacatatatattattacacatacacatatacattaatacacatacacatacacgtatatattaatacatatatatatacacatatatacataactttatatattttcataaatatacttatttatacacatatatataaatttaaagtaaaaaaattgtaaaaagtaaaataattaatataaatatatatatacatatttaaccacacatatatacaaaaaattaattatacccatataaaaatataaacaagtaaatattttaaaaaataaattaaaattaaaaattaccttgactaagagagggggaggcagcagtcgaaaaggctcgagcaacaatggtggctggaggcaatctctttcaattgtttcttttatagagagagaagataggagagagagtgagagaattagagagagtgagagttagagacagagagagaaagagagtgagaatcgaagagagatggagagataaaaaaatcagagaaaataaggaagaatattcatcatctttgttttactcaaaatattttaaccgcacaattcgttgcgctggtaaaagatcataaaagcgtcggtacaaaataacaaaactatcgaaaatgaaatgcattgtttcaattactcttttaccgacgaaatatatgttggtaaaagttttcactctcatcgaaaagtcagacaggaatttttccacctactttttaatttgttggctttttccagcacatatttgtgccagtcaaagattaattgtcccaacaaagaatattcgcacgtgggaatttctccaccaaattatgggacctttactcgatggaaatatacgtcgataaaggtatacaaatcattaaaaattgtttgtgccaaaatgcagttagatttctcaattttacaagtgcaatacatgaattgtggtgatataggttacttttaccgaagcaattgtgcatccataaaagtgttacccaaataagttggctcttcctgcattcacccctttttttcgaaaactaatgccaatacatttggcaaaatgcacctccaaaagtcatctttcttgtagtgagtatctgaactaggaaaactcaaaacactcaccaactagaaaagctctgcctcaaccattcctttcttgggttcactacaaatggtttctctaggaaaactttccctttaaattaggggtgtttattgaatcaaattcaatattttttagtttattgagattcgatcaaattaatttcagttatctgagctgattcattggatataagatcaattttgtttattaaatgtatttcacatatatatttattgaatagattcaaatttatctaatattatagactcaatctttgttggatcgattccaactcatgtagtattttagatctagtatatattggattggattttggattcatccaatctaaaaaatatatatatatatatataagtaaaattctaattttaattttcatttgtaatattttacgtaaaacaacataaaatttaatttttcatttaaattaaataaaaatacaaatcacattaattagctagttttggagagctcatccaatatctaaattgatttaaataaatattcaaaaattatttaattaatctgatccaattataattaaatatctattatttaacagttagtttgttagtttgttgtgattagattgaattaatttatgcatatacctacaaatattaatgaatgaaatgatagtatggtgtctcatgcttggtcccctcctccagaaaattggatcaaaatcaactgtgatgttaaggttggtagcgagtccatatgcgtggaggcgctgggtaaggatcacgcggggacaggtttatgggtagcagctgacatgctcaacttcacggatctactgattggcgaagctgcgacatgtcgattagcattagaatcaattttcaataaagcaccattttgttttgattgagagtgattcagagaaagttatcaaagcgctgaaaggaatccagatcagttggaacattgataattataatatttttaatcaactctctaattattttttagggaaatttacaaaaatactgtaatatgggttaacttttacaaaaatactgtcacacggaaaagttttcaaaaatactgtgtttttataaaacactagtaaacacacaaaacataacaactcaaaacagcagtagaagaactacaaaacaccattagaacaccagtgaaaacttaacacagtatactgcagtatgaaatttataaaaaaaacacaagaaaaacgaaaaaaaaataccgcctgacggtatttttgtaaaaaattagcaaaagttagtgtaccatgtaaattttcctattttttatccaataatttttcatttattttcaaatgttgtaattttacgacccatatgtgattgagtgggcttttgcttagaatgtttcgggtatagtagagccctcctttatacttatcttattttttgtaatgacagaaaggtctaactcttctttattttataaacgctttattaaaaaaaaagtgaaaatataggaaaaaatgaaaaagttcattgcattttgaaaaaaaaaaaaagagtaaaatgctcaccaagggtggtta

SEQ ID NO: 235823 - DNA, 1347 bp, Cannabis indica
tagtgtgaaatataatttattatatgtgtatgtatatgtgatttttttcaaaaattaatctatataatttagtaactatagtaacttgttattttttttattactagtaagtaataaataattaaaattctaattttgttgtattttattatattgtaggttgtgagctaatttttaaggttcgaaataatttggtgttgaccggattttaacttgctataggtatatacattcactaactttttgttattataattaattatcaatgcatgtttagtggagtttgaatatcctaaatcttcatctgtagtgaagtaggttctgtgagatattgtactacggccggatgggtgtaataatatgcatgttagttgagtttgaacatcttaaatattcaaccatagagaagtaggttatgcaaatacatttactgcggtcgaatgggtggataaattttgtattgttaatgttattttgtttgttttgtattattttatatgttttgtttgttattttaggcattttttaaaaattttgggaacgtcgaattacaactgttatgctgctaaaattttggtagaattaggataaattttactaaagaagcataaatattgaaggaaaagtacatagcataaataactagttaattactagctagtcgtaagaaattaagtgacataacacaaataattatatacacatttatataaactttaaaattataaatgacaaacaaacaaatgaatgaattcactttagaaaaagtcattctattcttggatccattccaatcaactaaacactaccctagttagttaattacaacttatacaacttaataacgtgcactaaactaaaacaagaattatagtaatatttaagttaatatgaattaattgtgagaaacctagttaattacattatgtaagtagtaactagctagttataattagttactaattaaatactaaaatttttttgttaggatttttgttatggataaatcatgaatgcttgaggagagagacagtacgatttcaagtaggattcgatacatttttagagtttgccttaaagaattcaaaaaatccaaaacatattcattgtccgtgtgtagattgttgtaatagatcgaaaggaaatattacgatgattaagcaccatgtgtatttacgtagtttcaatagaagttatactacttggtattggcatgacaaatatttagcggggggtagatgatattgagggtaatgattttgatgatcatccattgaacttgcttgacgaagcagaggaggaatttcttaatgatcctaaaaatttcgataattttctaagtgatgc

SEQ ID NO: 235824 - DNA, 507 bp, Cannabis indica
tgaaaatattctaaaaaattaattacacaattactaagccttatcggttgtagttgttataaactaactaagccttggtagaatatcttttgtgattaaagaaaaacataaaatgaatctctggagtggagtctggtgtaattatcaaactttaaggatgattcatcaagtaacatgtcaaaatttatcactacgtgtcaagcccccacatcacacggtatctcactgtaaatgtaaaatgtaaatacatgcgtgggtcgagttagattataaaaaggggtaagtttgaaaaacactatttttattaatcaattaattaaattttcttctaattttatatttaattgaaacatatctctttttatatatattgtacctagaatattctaacatgagagagtcatatggaaagtattttggagtgacatgagtaaaattagtacaatattttaaaaaataggtaaaaatgatagactttaaaaaaaagaataaaaataaaagaggaca

SEQ ID NO: 235825 - DNA, 817 bp, Cannabis indica
gatggctgggtcaattcattcttttccctcgcgtttcatcgacaagaggggtatttgttaagaagccatatatcactttttatcgtgatagtgtgcgagatcaggcaatggtgttctggtcctcacatttaacttggtatttgttatttcccttattaattttatctactttgttctctcttttctcaacagagatgataggtgtttatatatgatctgcaagagtcagtatttgttttgcttcagctttctcaagagctaattagtttagttgtgagtattagtaatggaagaccatgtatttgttttgcttcagctttttcaagagttaattagtttagttgtgaatattagtttagttgtatttatatttgttttgcttctgcaagttcgttagcctcacaatcataggtggttatatattgttaaggcagaaataaataacctctcttaacagaggaggttagctgttacaaaattgctagaaacctatgaagttagctttgttagtgtatctctgttagtgtaatatacatatatgtttatagctcgtgagagccaatggctgatgcctttccatacatatatgttagtgtatatatacatatatgtttatagctaattcttgttagctttgttagtgtatctctgttattttttgagaaatttatagccccaattctatacagttcgtttctcctttaatatgtacatggccacaatttcaatatttttcttttgaccattatacctttttttttatttggtcacatgaggataggctttgtttcatgtgatcatttcctttgagaaactt

SEQ ID NO: 235826 - DNA, 1680 bp, Cannabis indica
agcaaaatatcaacatattgcaaagagaaggaagattactacttctactgctacaacagaaaaagaagcagagaattactacaattgacattgttggattaatgtgatgaaacaaataacaaatacaacaaggatgaagcatatagtccaagccttcctctatcacaaccacaacaacaacaacaagtagtcgcaaactaatgataatgcatatagtagtgaaattaaatcagtagaagaacagaaaaaagtattggtattactctagatgatgatgataaaaatccaactacactaactgaacaagactatctatgcacgtattcctagtagtggtggcgtagcttgctatataccaagccttcctctatcacaactacaacaacaacaacaacaagtgccacaaaccaatgataatgcatatagtagtgaaattaaatcagtaaagaaatgggataaaagtatgggcattactgttgagaggcatattgtactctacacagtgacattatgtatctttctgtacacaatcaaagactaaaggccagaggaattatgattttccaccaataaacgtaccacttgtaagaataccactgtctgcaccaatatatacattacatataaataaatacaatgtgtaatgtagtcaagatatagtgattacatatattaaattcatatgggcttaaaaattaaaatacatgtgactggtttgaccctactcagtcaccaaacagttcaatacccaatgcaatgtaaacaagaatgaaactacaccactccaatacaaataaataaacgatcgggctccaccatgactttagtctatgttatttcaatatttaacgaaaaaaaaagttgaaaaacatgattcagcatcaaatttcataacttgttgttttcctaaatatataataattcaaatctatactatctcctcttgaacataaccaaaatttttgaaatgaagaaaccaatcactggaaattttaaaccttgctatacaaggaagacaaacatatttatgttaaatagatatgtaataaccacaaacaagaagtgtaaaaaagagttccaatacaactctaagaataaacaacaccatgaaaaattttcaaataaattatctaataaccataaaaaaacgaaatggagccaaattcatgtgaaaacctacatgttaagctctattcaaatcccgagttttaaattaaagaacaagagcataataaaataaacaacaaagagtataaaaacaaattcaagacagtaaatagtaattagtaagcaatatattcatttaaaagtagtaagtagtaccatatttcttatatatgcctgagttggtttcaattactttaccaaatcggtaatttcattgttctttacatattcccgttttgcaacagatgaatttagagaatatagatgtgaaggtgcttgaatagtaatattatttatgtctgctttgttattttcagccattgacattgtaatttaaatgttaggttacttattaaagtaataagcattcaatattatataatcaaaaataatattcaatgaatgtaaattaatttatgcatgagtcgtaccattgatgaagtgttgttgctttggaattgtcaagattgatttcgattgtacttgattcacgacttgacaacgacaatcctg

SEQ ID NO: 235827 - DNA, 661 bp, Cannabis indica
attgcacctctccttggggaatggaaaaattggagaggagtgcccaagggatgaaacgtctcagctaggaagccacaaatgttgtggcatagccctttggaataacaaaattggagagaagtgacaagagatgtcatctatcaacaaggaagtcacacaattggagaggagtatctaagggctgacacttctcagccatgatgccacataggttgtggcatagctctcccaacaccccctgtgatccccaattagcataatttagtaattctcgagtaaagtgtgacaacttgtcctgtgagccaattttgagctagataactttagaattgtgtaatgatcatgagagacacttagattcttcttgaaaatacttttaaaataaaagttaaaccacgtcatttgaataaaaattgagagggttatgaatattttattgaagggtggtaatactttttaataaaaaaactgaccactgccatgtcataatgataattctcgaccatgcatgtgtttcagccctttgggtgtgttttgacttttttttaatggagaatcatatttttggttttgggctccaaaacctcatctcgacgttcgaaaccctaactagagaccattatcatcggttggaaccaaaagatggcagtggtcgaccatg

SEQ ID NO: 235828 - DNA, 1854 bp, Cannabis indica
atatatgtaaattaaattattatctttttagaagaagaaaaaaataaaataatcttttgcatttttacattctactattagtgcaaattagcattgtaatgccaaatttaatactgatttgcaccaataattaaatgtcccatcatatataaatgtgaggcatgttaaaatgataaacaaacaatgcaagaagaattttgaatttctttaaatttagaagaatttttatttttatggattttacagtataagtttataaaatatattttttctcaaagaaaagttattttatgtgaaaattttagaaaaagttaaaaaaaaatggaaaaataacataagatacatggttacctttatatggcaactcattacctctctagttactataagggtatctggttatttttacctgaatttctcatatttttaagtttcttcaatttttccaatattttttttaaaaaaaaccctatttttgcacaaaaatatagaaacccataaaatttataatggtctaactagtatcaatttgttaacacaagaggtagaaaaaaggcttacaaaatgtgttgaggactccaaagaatagaataggtatgaaaatcaacagttggatcaaaccacaatcgaaattgttgttctctttttccttctcctttacaaaacacattagtatgaagtgtgtaaggatcaccagaaacattccccaaaaactcaaaatctatttcatcatgttggtcacccttcgaagataactgcaacatttaattcatatacattaacattagtaactatacattaaatatacgacattaaataaaaattaataaacttacataaaaagccgtaacagtgccagcagaatttccaggaacaagtttaatttgcatctcaatcttggtaaagagatattcattctttgattcgaaacccgagcctgaaactttgtcaagagacactgccataacactcccaccattgattatgttgcaacgaccttcaccccatgttacatcaagattcttgtaaaggttattgttattgttattatcattatcatcaccataacccaaaacgacaatcaatgagcttacaccaaggcaaaaaaccatcaaaacgacacaagacttcttcatttttgtgagtattatgtttttagatatagtgttaattaatgaaccatgtatttatataggactatatatatagttgatgatgagcattaataactttggttcattataatataattaaaattatgtcattggattaagtctaggtgctatgtttttcttgaacaccattttgagaacacaaaatatatttttaaataaatatgtttaaccagtatgtaagcaagaaattaaggttaatatgttataccattttaagggatttgttattattattaagaatatgtttaagaaaaccaaagttttaatttgattaaatgagttgagggaggtcatgaccaagtgaccaacttattattaaagtccttttatttataaatataataacgtgatatccactaatttgaatgagctattaactattaagatacgacaagagaagaggcaccaactttgtttgagaattcagagttgaaactgcggatttgggccgccggcctttaatggtcaatgcccggcccactattatttcatattcatacaaggaagttaggctatgtactactatttgtacaaatggccaaaaaataggagaaatttagagagggtgacatttttttttataagagatattgatgaaaatataatttatttttgtgattataaaagtctcttccatattaaaattggtataggtgttgattgttgaattccctcaagt

SEQ ID NO: 235829 - DNA, 2229 bp, Cannabis indica
gatattatccatatggtaaggcagttttttcaccatgggttatttccttcaaatctaaataaaactattttagttttaatccctaaaaagaagcatcctatagatatgggggatttgatacccattgctttatgcaatgttatataagattgtgtccaaggtggtggctaatagacttaagaatgttatgccaactatcatatccgacactcaaagtgtgttcttacaagggcgtttaatttcagataatattatgattgcttatgagattatgcatcattcgaaaagaaaacgaaaatgggggatggttatatggctctcaagcttaacattagcaaagcctatgataaacttgagtggggttatctccatgctatgatggacaggatgggctttgatgggcgatggataaacttggttatgcaatgtctttgttcagtctcgtatactatcttgcatggagggaatgagttgggacctattgctactcaacgaggtttgcgtcaaggtgatccgttattgccttacctttttattttatgtactgaaggcttctctagtttgctgcgaagttatgagtaaagtggtttgctcacgggttgtaagattgctcgaggtgcgccagtcatttttcatatgctttttgcggatgatagttatatatatattgtaaggctactgaggaagaagcgtacaatgtaaaggagttgttgcacacttatgaggcgactacaggtcaaagaattaattttgctaagtcttttgtgttttttagcaacaatacaaattgtgctctacatgatgctatttgtgcttcgttggaaatctatgaagctgatgaaaatgggtactatctaggccttctatgtccagttgggaagaataagtatactattctcggatttgttaaggacaagcttcataagaggatacaaataaaaaaacccattttaaaactccacatacgaaaagaaagttgaaaatgtcatttttttttttttgttaaatagccttaaactccacatataatttgaaaacgggtcgacccgaaaaagaaagagaaaagatcgtaaaagggtcagctcaggatttaatgccccagtttagttacaggttcagagtgttggagaaaaggagaacagccggaggactaaggagttagtgttaaagttcaaaatggcggacgaatctactccccccattaggcttatgaatttcatatccgaggaccaggtttgctaatttaaacagttactactgatagtttcttaaatttcaaaccctaaatcaaattctgggattgggacgatgatttcaacagttggatgaaaccaagaaagctaggggcgaacgcgtggaggatggcactgcccagagggatagacccctttacgaggtaagcttttaactattgcatttcttttgtttgtaattatatatgtatgcatatgaaaatgaaaatatatcctatatctaagtcattcgtgatgctacagattttaaaggaaaataaagacaaaaaggatgctgaattcaacgaacgctttaagcacagtgagtacttttatttttcttttagttttgtgacaattgatttaccaaagattgttacttgggcatttttgtgtcacccaaatccttgctttttgcattgcaggacctcctaaagctttggatgatgatgagaccgagttccttgataaattagagctggtaaaagctttaaatgtgtttttactgattattagtgcgtgctctctagttaagatagctcataacttcaaatgtcatactttagcatgtcctcatttgatcagtcaactgctttatcaaagtcataatacttgtttcttgaattatattttcttcttacactacttctatgacatcttgttttgctttttcagtctaagagggaatatgaacagcaagtggccaatgaagaagcccaacaactccggaatttccaggtacatttagtaattcttaatttttttagaattttatttccaaattttgtagctgtagtgtacacttggcgtactcttaccctgtgcataataataataataacaagaaaaatcccttttaaagatatagaaagtgatgttgataagaataaagatctcagccagggaatttagtgaaatttagtgatcaataataacatcacaaagttttttataggaaaaaaaaggctgtaactttgtattttttgaatttccttgt

SEQ ID NO: 235830 - DNA, 1361 bp, Cannabis indica
agccctcacaattttattttttggcaccctcccaaaaggtctcatactaatagtgaaggtagaacacttatatccaagacagctctttcatattcttccaatgtcgaacttggattaataccccaataattactattatataaaataataaatcacataatatacaccactatgcgcacccatgaatagttttcatacaaaatctcttatccttgtattctcaaaatctatatttatctcctcttccattaaaaaataataagcttttgattgttggagattttattacaatgaaagaaaatcaagatgcattacaactctattataaaataatacaaggactaaaataaagagattgattaaatatatgttacaatccacatttatacactaaatatattgcatatatatatgaaatgtagaagaagaagaatacaacatatgtaatataatacatatataacaagagaagaatatatatgtatatacactcactcacaaccttgagtgtagattagtgaggatcaccatgacttgaacaagatattatacgtttgtccaaaagcttatttcccctatccctaagcactaagggaactctcatggaaatagctttgaaaattatcaagccttagtattttttagcaatgtacttttttgataaaaaaacttctcatctcaatatgagcaccttagacctctttatatagtgtttatgatatcaccatttgaaattcgaactcataaccgctatagatgttatgaactcaaatgtaactcatgcacacataactcctatagcattaaaaatttcaaattaaaatgtgtgtagcatctttttacacacttaatattagtgataatggtagagattactcatagtaacaagtcatttccccaaattttctaaaatgatcacaactaatatatatatatattatcatatgttacatattattagtttattacacatatttaattaatatattatattatattattataaataatataacacatatgtatatatatgtttgtatatatatgtttgtatataaaacccttaaatttttaaaacaacaaaaaatgatagagtgacgaatcaaactcaacacctcagcatatcaatatacacccttgcttactaattctgctgcaactttttttatgtaatttatttaaccaaaatttatttatactatatttttcttttattttataaattatatattaattttaattttttagggtagttctccgaaattgtagggcttggggctagttgtcggccgcccactgtctagtcaaccctatcgatagggcttttcatgtagctagttcaaaagataaaaaattccttg

SEQ ID NO: 235831 - DNA, 1717 bp, Cannabis indica
ttgttttagaattcatattagattgttgatgaaacatacatggtagtaaatctagatcctggtaaaatattttcaacatatacttcatcattcaatgtagacataagtgattacgaaattcatgaagagtgccctattagtcaaaaagcagcaaagagaaagggaaagggaaagcaagatgaggaacttgctacattttatgattttatcaacagaaagtaaatgcattggagaaattggtggtggtacaagaaaaaaaaagtaatggaaaaaaacattaattatttattctttgacacatcaaatatgactctcgagcaaaagaaagatcataaaaatttggtagctcatactaagactaatattttaaagttataactcctgtgtatttttatctaattgttatgaattattttaaatttttaattcttatgtattgttcttatctaattgtaacaatatatttttattaaatgaattatcctttatttaaactattccatttcaacaatcacattttgactgttaacggctatattttaacttggctatattttaacgactctatttgaacaactatattttaacggctttattttaacagctatatttaacaactatattttaacggctatattttaatggttatattttaatgacttcattttaatagctatattttaacggctgtattttaatggctcaatttgaacagctatattttaacggttatattttaacgattatattttaacagctaatttacatatattcatcttcttcaagagttttttttgttattttcttgttgctgtatggttgactatgatgttaaagccataatgttgaccaaaatagcatcatcttgaactgatcccattcttggtgcaaatagttgttgcttgtttgttgttgttgttgtgttgttataaggttgttgcacatctacctgtactaagtgattgtcatatgttgtcatcatcatatgacaacatatgacaatcggtagaaaagggcttttgtcatcatcatatgacaacatatgacaatcgatagaaaagggctttcaccactacagaagtgtatcgctgctatgcgaatgttggcatacagagcaccaaccgattacattaatgatatgtttgaattggtgaaagcactactattgaatgtctactccatttcattcgtggagtgaatgaaatttttggggtagaagaatagagaccaaccaatgccggtgacattcgccgcttacttcaaatgggagaaaggcgtggtttttcaggcatgttgggaagcattgattgtatgcactagaaatggaaaagttgcccagttgcatggaaagggcaattcacacgaggtgatcacggttcaccgacaattatgcttgaagcagtcacgtcacaagatctttggatttgacatgcattttttggtgttctgggatccaataatgatctcaatattttaaatcaatcaccattattcactaacatcttacaggagcaatgtctaagagctgagtttatgataaaaggcacacaatacaataaggggtataatctagcagataatattaatatctacccagaatggggtacgtttcttaaaactatgccattacctcaaggagagaagagaacattatttgtccaatgtcaagaagatgtacacaaagatgttgagcgggcatttagagcagttcaatctc

SEQ ID NO: 235832 - DNA, 1633 bp, Cannabis indica
catctccaagactatgtttgtcacaccacctccacggctcacccaattgagcccttcctctcttacatcaagcttagtcctcagtttaaggctggcgtactagtagcctattctgaagttgagcccaaaaactatgttgaagcctctcaattcactcattggcttaaagccatggatactgagacacaggcattagaaaaaatatcacaaatggatcatcaccaaattaccacctgggcaaaaagccataggttgtaaatggttatataaggttaaatatgaccaatttggggttgtagatcgattcaaagctcgtctagtagccaaaggctacaaccaacgacaaggacttgactaatcccaaacatatgccccagttgccaagttcaacacccttaaaaattttcttgcacttgctgcaatgaacaattggaatgttcaccaattagacattcataatgcattcctatatggagaccttgaagaagaagtttacatgaaactccctccaggatatactgctcccccgactctgtttgcctcttaaaaaagagcatatatggcctaaagcaagcctctaggaaatggtactcaaaactgagcaccacactactcacagatggcttctcacaatcatcatctgataattcattattcactaaaaaaacacaaaacatgttcattgatgtgttaatatatgtagatgacattgttgtagcaaaaaacaatgaccatgtcatatccacttttaagctttctcttaatagcaaattcaaattaagagacattggttctctaagattcttcctaggctttgaactaggccgcatcagtaaagggatatctatttctcaacgctgtttcactttacaattgctaaaagatacgagtactctaggtgctaaaccaacatcctctcccatggaatgcaacctcaaactcatcaaggataaaggggtattactaactgatcctactgcctatcaaagcttgattggcaaattaatatatctcaccattacacggcctgatatcacttatgatgtcaatcatttgagtcagtttctacaaacacctcgtgtccctcatcttcaagccaccaacagagtattacaatacctcaaaagcaccccaggacaaaggctgttcttccctgccaacacctccccaacagtctcagcctatgcagaaactagcttatctcaagctaatgtactggtttccttttttgctgatgctgactgggcggcatgccaggataccagacgatctgttttaggcttttgtgttttccttagccaatctctcatctcttggaaatccaaaaagcaacaagtcgtctctcattcttctgctgaagccgagtatcgtgcaatggaaaacacaacattagaagttacttggatccttgccctttttcaagactttggcatctctcccaaaatcccatcaatgctctagggtgacaacacagctgccattcatattagcaaaaacactgtctatcatgaacgaacgaaacatgtcgagatagattgccactttattcgagaaagcaaggctccctcaaacttctacacgtatcttcacaacagaatttagcagacatttttaccaaagcactaatgccttc

SEQ ID NO: 235833 - DNA, 1112 bp, Cannabis indica
aaaaaataattcaaaatatgaaaaaaaaaataatttggataattttgaccgcaaataacaatctaacagtagaaattaacttctaagtttgatagtcaattttttgagccccagtcgcagaggcaggagctgctcttggacaagccagagcttattttagtaactctcttgggggtaaaatttgaggtcgataacttcagaattgtgttgaaatttgaaacatgacttgatagatcattcaaatagattcaaaacgtaagttgaatcacgtcaatcagataaatattgagtgagttatggctattttactaaaggctgtcctgggcccagcttcgagcttgacatccagcgcccaggttgacatatgacggcaacctggatgttgggtgagtgcaaaaacgtcctggaaatgtaattttagatgcctaagcgatattttgacatcacttagtctgttatcgtgttctggcaaaggtggtcatcagttttcagagatgttgttctacataaatgagaactcaaaactcttcatttttgagttgtttttcccatgttagaaatgagaaatgaaatgttgtgaatttaacttctctgacttcatggatctcagttgttgtgaagaactagatggatggtcgaaacgaaatcaaaatcgaataagcagaacccagcgcactaggacatttgtcaacttgggtgctgggtgcttatttcggagctttcaggatgtcgttttgatactttcaaggttctataacttgatgaaaaagtctcatatctcgttttttaccattttggaaaattcttggattaaatttagcatttgagtgatcaaaactagcgcactaggttgattgtgaacttgggcgttgggctctgtttttaggcctttgagtttgtggttttctcctcgagtctgcttaaatcttcattatttctgatgacaaaaaaattactagaacactttttttgagaaaatgattggaaaaggcccaggttgacaatatgtcaacttgggtgctaagcctagttccaggttgatctttggcttatcattttttttttttttttaaatctctaatttttctgtaatcttagtagcattaggaatg

SEQ ID NO: 235834 - DNA, 1111 bp, Cannabis indica
aagtaaaagtttaattttaacgtaattaactgcactccctgtgggatcgacctcactcctggtgagtttactacttgaaacaatacatacacttgtgtgtgcaaaatatcgcaacaagtgtccaatcgataacttttgcaaaacacagggtccaaaatagtatttacccacaaaaataatatgtcaaataaaatctattaattaataatgaaaaaatagattaaattgtctcaaataagtaatgtgttttcttaaaaaaaaaattattaaaataatataaaattattaattttgtaaatttatgttctaataaaatataaaaaataagagaattatggagagaaaagaaaatagcttattaaaataatgtaaaatatcaatttgtagatttatgctctaataaaatattaaaaatgagagaattaaggagagaaaaaaaataattttggagaaattttaaagtgccatatcaccgcctcatatctctcatttatatatatagatagatttcatctaagttaaaaattgtgttaaatttaacacgaaagatagtatgtatcaaattttagctaacaataaatattattttttaatgagtaatttgcggttaaatcttctgaactctcatttcacttacaattaactctctaaactcaaattttagtagtaaaaacctccaaactactaaactgttagtaaatttaaagtgatatttatttaccacagttaagtaccaacataaattacttatgtatacacataacatattaatattggtacacataatattattatttataaaaaataaaaaaaaaaaatatttcaaaatttattttaaaattaagaaaataattcaaagttataaaattaataaataataaataaatgaatatccaaaaaaaaaataaaaataaaaaaaaaaaattatatttattttcttttttttaatttatttctttgtctaatgactctctctctcttcccacgctctcttcattcactattgtcaccacctccatcaccattgccaccaccccaacaccatcaccattacaacactactatccacaaccaacacaaccacaatctttgcaataacaatcacttcaaa

SEQ ID NO: 235835 - DNA, 1441 bp, Cannabis indica
ctatacctatacataaaaattaaatttaaaacttccatcaattgttacaattatatgtattaagagaatatgaccattaatttatattgataagaagtaattacatgcacataaataaacacatgctgcatgcacaatttatacaccaaaatcttaactcagagaatgtggtactttactattttttacaaaagttgaccacatctaaaataaatacgatttattatagcaaagtaatatgtcatagaagatatgaatcaagaaaaatagtacagcaaataggagctaaaatgctcaaatatattactattctaatgttgcaaacttaggtagcgtttggttacaaaataaaaatagagtgggaatggtaataggaagagtataaataaatttttattcttttgattgataaagaccatggaataagaattactatgtttattattgtatggaatggaatagaacttttaatattttcaccaaatttggttataaaagtaaatcagaataaataatattatttggtatttattttatttggcattacaatagtgctactcccaaacattattttgtatttattttatttagcatatgcactttgtcaattaacaccaatagcacaaggaaaaaaaaaatacaagtttaaatgttgttcactattatttgaatttaaaacaaggtgcttttttggagattaattgtgataaagatcaaagaacagatttttatagaaaaagaatgaatacaaaccattacaacaatagtttaattggaagtggaacaacctccaatatataaaaatcttatcttaccaagagcaaatttttaaaaaactcacttctagaaaaaaaattaaagattataaacatcaacaataaaatcttaaaaacaagacaattgagatgtgtatacccattaatgattgatgaaactagtaatgaatattgtttcagcacttttaatttacgaactatgttagagagcccattggaacagagactttcttatgcgaccatgaacttgatttctatatagaccgaatactaaccatggtgcaaataaaaagttaaaactttatctccaaaaaaaggtacagatgttaaaagaaactttagcaatactactgagtaaagtatccaatatataacatttgaattgttaaattagattccccctgtcacacttattattacaactttacagaagagaagaaaaataaaaataaaacagaccagatcctatgtggcttcgcctctagtgggtcaagatctagtagttagttacaatcgaaattgtaactaactcctagaccttgatcaaccctaatctacaactatataaagggatctagagccttaccaatctctcagttgagagataccagaaatccagaacccagattttcagatctggaagcttcagctccaaaactcgttgt

SEQ ID NO: 235836 - DNA, 864 bp, Cannabis indica
caccaacgcagaggttgtaacctttcttctccagtcacgattgagaacgaaaatggtgtcccctttcctctgtttggactgtggctgtctacttcatcatcgtatctggatgtgttctcgggtgctaattcttttttcccaaccgtgcttcttccttgttgcctgttcctcaacgaagtcgaggctctgcccttccggcgatggatggcgatggtgttggtggttcgttgagaacgggatccaaggttgttcagtcctcgaggcatgtcaagaaagtgataggatgctctcctattactgtggggaagtcgaagcaaggtgtgcggattcccaagccgtagtctcgttgtggcacgcctccggttgtcatttatggtaatgaggttcaagttgaggataagggtacggttaaaggccctattttttctactggtttgtggttgtatgtttctgaccgttcattggacaatgtgaaatgtactaaaaatttaaattgttctgaggtgatcaaaggctcgttgcccttgtctattaatattaggccgattgtttctctttttgggcctagatttaatgtaaatgatgagaatgggcatgtgcaaggctctcccctggttagttcaaatgttggggattttattttaagggcatcgattggtgtgggcccaagtcaattttctaaaggttttgttgggcttggacaggctgttgataatagacttgctaactctaacggtacaacttggccaaacgtgttgattgtggagcatgaggtgttcaataatttgggccaagggccagctggtgtggggctgattgtctcacctattgggcctagatctccttctaatggtgttgttgggc

SEQ ID NO: 235837 - DNA, 934 bp, Cannabis indica
caagatcaagatttcaaaattttataaggagggagagggggttggtggggatttgttcaaatcagaaaaatgatattttgatttttaattttcagaaatacaaacatatctcattttactaaattttgatcaaatgaccattttgcccctagggactaaaaatcaacataataagcatacaagggcataaaagtcattccacccacatacaattccaattatacacatatatcccatatcattatcataatctcatacattcaatatattggactaaaactcgatttgagctaaaatacccgattatgactataccgtactaatttgtcaaaatttaattgtaacacaacaaagcgtacatactacataacaatatagtccattagcacataatatacttaagcttgtaaagataaagtctggaaccaagccatggatactgaaattgatgcattagaagctaatgatacctggattgtagttcctctacctctaggacaacatgtcatcagcattagaagctaatggctctgttgaatgatacaaagctcgacttgtagccaaaggctacacacaacaacaaggaatagattactttgaaacttatgcccctatggccaaattcaacaccctaaaactattatttgcacttgctttaatcaaaaattagcatctccatcacatggatatcgataattccttccttcatggtgaactgcatgaagatgtatacatgaaattaccccaagggtacaccccaaaaggaaacattcctaaaatgcagtatgaaaactacaaaagagtctatatggcctcaaacaggcttccaaacaatggtatgccaaactcaacaatatcttgttacaatataatttcaaacaatcaaaaaatgatcatagtttattcatcataacaaaatcaggcatcttccttg

SEQ ID NO: 235838 - DNA, 1627 bp, Cannabis indica
tagtttaatataatagctttaggcagtatcgttaaccaatcgtaatatgacatgtcgagaaggtgctagtggtgcctaatagtaatgctctttttttattggctaaaatgtattattgatgtttagtactttcctcgatatcataatactattgatataattaaatatatttatgaaaataattttaaaggaatatggttaattaatagtaatgttcttttttaattaatcactaggcgccacttataaaaagtgttgagcgaccaaacccattaacaacactctttttttacctcccaagtgtcaagtaacaactgaccaaacccctctgcactccgcagcttttgatagacgttcactcacactctttcaaagtgccgagctttcacgattggtgcatgtctgagtgcatttattgagtgtcgtaatgtgtgttattcgtcaaagaaacggttaattaatagactttggctactgcttttgattattgatttgcaactctcaagaaaatagtgtatcatgtatcaaaatctgtttggctgatattttttcaaaataattttcagaactaaaatgtgttctcacaaatcaacaaggctgattaagtggtttatatctttcaaattttaattttctatggcgtttttttttggtctcacatgtggtgtgatatagactagtgatcactcagaaataatcatgatatgggtgggtcagaaataatcatccaaagagagaaaagaataaagaaggaaatgaaaatgtgtaatgaaaattactcagaattatagagagtctcttctcttccacaaagattctccacgcctcactaaaaggttctactaactctttattgttaaatgaattattataaatatgtaccattatgtatgccgaataacttttatggaataaatatatacaaaagaatcaaattttagttctagttatgccaatttccactaatatttaagtattaattaatctgtaaaataaaagagaataaattagtggtttgagctaaaacagattagattaaggtcaactcagcccatgtcccaattttttttttctttcaaaaagatcacattaactatgagtttttatacaaatattaattttttttttcaaactttatatttatattttgataatttcgttcaaaaatagaatattcattcgagcatcattgtagaagagacattcctttataataataatctaatattttaaaatataaccaaacaaataaatagaaatgaaaattttgtttcaatttcattttattttattacttccaaccaactgccacttaaaaaaaataggtgaattaaaaatatttctgaattaagttaatattgactttatataaatttaactatatatgcacctcccctttacactagtagatgtagatcctagttgcaggttgtaattcactccagctgacttgacacttgacagtcttcttatctttacctattccttgtatgtgaccatgtgaatatagtggagcctgttacaaagttgagacttggttactttagtttgagtttcttaactttgtgtgagaaagcttgaaattaagctcagtgtgtcttgttttttttgagtttctccttttttt

SEQ ID NO: 235839 - DNA, 1215 bp, Cannabis indica
ctctctctctctctctctctctctctctctctctccttctctctgttgctagctctctctctctctctctctctctctctctctcaccgtctctccgtttttgcaggtggttggtggtgcacaatctgagcaacgatggttggtggcagcttctctacaaatatttgatttgtgcattacacaatatatatgtatatctaatatttttcacgtaatatatattgtgtaatatttgtatttaattttatttacttaatatatatctgatttgtgtatttttcaattgatttgagattacaaaataaatagtttattagttgtgtaatatgtgagatttgtgtttatttttattttttattgtgcttaaatctgggttcagatgtaaggttttttttttgtccaaactcaaccacaaacaacaatacatgcttaaaccagctcaaataactccaaatcaacctcaaaaagcagaactaaacccaaatattcttatagtaacctaactcagaaatttgcatgaaaatccaatctcaaaaactagaaaattcaaagaaaaagaagggaaactagcttaccaagagctgctgtcttcaatccctatgaattcccaacaaaaaacctctaaatttggccggaatttaaagaagaaaattgatttttttcttggttccaaaggggggccgaaccatagagagagaaatagactaagttttgactttaaactagttttttgtttttaatccaaattttaaagtataatgaaaatatactttcagcataaaattaataaagaaaaatattataattatctacactaaataagacaactatggggaaatgacttaattactccttaataaaacataaggtaactaacatacttaggagtaaaatgatcttaaactattatcccgaaaataactcgacattttaaatatctaactaaattgcttcactatttctaaagtactaaaccaaaataaaatgactctataggccatatgttttgttccactgttgtcgggcataaaatatgaaaatcataaaatttcacatataacataattatcacacctagaattaaaatatatctctatagttatataaataataattaatagtctagctaatttgaattaaactctaattatctgctaatttttaaaataaagctaagtgatcattatatttattgtctatgggagtttggagtca

SEQ ID NO: 235840 - DNA, 1361 bp, Cannabis indica
ttagtcagcctcctttgtatagttagttagtgtagtacaacttctgttcagaccacaggttcttaatatacaacacttaaacatccataaccaaatggcatactttccgaggccaccggcaaagcgattcctcgtgtacgagactagttctccggaggaccaaattaatcttcatcctcgatattgtcaggcgacgactcaacctcggggaagaattcttcactaggatacatcttctcgaaaagctattgttatcgaaagtaaaacaattccaaattcatgagttaccaaacaattgtaagtaagaatttgcacaggtctttcgaaacacaatacctttacagtttcatctaataaatcgttgtagtcaagatttccatctggcattggtgtggagctgatatgatcaaagttaccctggaaattataaaaacaatttgtaacagttaaacttgaagccgaaaattgagaattatagggaagtgtacattgacaatgtgagaagaataagaagcaaaccgaccgtagtcaactcctgaatatacattgcgctccaaagcaaagtgggttttacttctgcatcttgattttggacttcagaactcttttcggaaatttcagaagccgggatcttgagaagggcattcatagctgcacgtaacatgtctttcccttgttttgcgtcatcacacaatgctgaaaagtacaatataaacctgaagaagagaaagtaaacagtagccaattacacatttttgagtggtgagtgggggctaaaggtcatctgccagtcaatagttcattcataaaagcaaaaaagtaaatgataatagttcattcatggtaagtaactttatacaactgtttagagcatcaatttgtaaaaacgatagaagagttgttgtcatgcatccaacttgggatagcaaagacaaactctcacaactgaaggcgtgactatgataaaatgctaaacctttttgttttaggaataactacaaaaacaatatatttgttttctaattaagctgtttttcctcctgaatttataccaaattatacctcataaattttttcaggttgttaaaaatcatcgacgaactattgaaattattagatttaatgactttagtccaattccgttcaattttactaacgaacacctaacaagtccttgaatctaacaatctcaatagttcaggagaatttataacggcttaaatggtcagaggcacaaattggtacatgtcaaagttggggaaaaaatccaaattagccattttgttttaacatatgatacatcataatctcctaagaaaattcaatttcccaaaaaaaaagaccacaaagatatgctaaga

SEQ ID NO: 235841 - DNA, 788 bp, Cannabis indica
caaactaaaataattaaacaaaataaaataataaggcacaataggtgagaaaccgcccccaaaccaccacatgtcatcctttctaataccactagcaaagcgaatcaccaccatcaaaagagatgaaccaccgcaccaatcccagatcttctcacgccgccatccaattagtccctatcaactaaatttgacctacgtcgcaccacctcctaccaaaccaaattgttagctcacacggtcagaaatagccccaccattcctaattcgagagccacatcccaaccctattcctagtctttgagaaccacgaaccagcaaaaatatcctatatcttctcgattagagcaattaaatcacatgaccagacggacgtcgttcatcctagcagagagaaaaaaacacatcttcaactattgataaaccgtaaataagcgagagagagagtgagataaatggtggatgccttaagatttataatatgggtaaagaagaggaataattctataatacatttttacttttagagtaatttgcggcaaaacccccccaactatcaatttacttgtaaaaaaccatccaacctcatattttggtgagaaaactctccaaagtactgttacgtttatatttttaaggtgtcgtctgtccagcctcgttaagtcctaattttgcccacgtggcaatgacaagtcactaaaaaattatcctatgtggccatattttacaaaataaaaaaaaaactttaagagtaatttgcggcaaaactcccccaactatcaatttacttg

SEQ ID NO: 235842 - DNA, 1075 bp, Cannabis indica
tactcccattacatccctccacatacattcactgtaatattggactcctctctaaacttggctcagaaatctgaactatgagccttggagttttattgagagagtaagacacatgtgtatttataggtcttgttgaggctctctttaagttggtgtcaaagccaactattataactaacaacaacttcctttagatttatctgatgagtgttaagatggaactactgacatgacaagggttaagtgagtttaatcccaataattctacctgtttagactcactcatccataatccaaaagaaatgagtgatgacattaaatgtcctgaatgttgaacaagtttagacagtgcctaaacctgtctttagttacacttttagtaaaaatatctgtagggatatcatgtgtgcttattttctccacatgcacctatttggatgacacaatatcccttataaagtgtaacttgatatgacctctcatgaaatattggatttttcatgtgatgcaaagcactttgattttgtcacagtaaactgtgatatcgtcagatttcaaacctaactcctctgctaacccctttagccatatagcctctttgatggctttgtattagccacgtattcaacttttttaattacaatgccactactttctgtaggttagatttcaagttgatgcagccctcaagagcagtgaacacaaagcttgttaggatccttatagtgtctaggtttgctacaaaattttagtctacataactagtgatttcttccttgatctggatctctttactgaacacaattttagtgtatagagtacgttttagatacctcattgtcgatttcagtgcttcccaatgttcaggcccagggtttgaaatgtatctgctgagcacactagaagaatttgaggaggctgaaaaagatcacttggtgtgcttgttacagaagtctctgtacggtttgaaacaatctcttagacagtgaagtaggagttttgatgattatgtgatcaagataggtctggcgaaaagtaagtttgatatttgtatatatttcttaaagagaaatgg

SEQ ID NO: 235843 - DNA, 670 bp, Cannabis indica
atatatactataaatgacactgcatcaaaagattctaacactaattgcatttgtaaccaaatgatttctgaaagactcaaggccaaaaaacggtattcaagctctgtacttaatctatctacatcacgttgttttcttgaagaccagccaactaagtttgttccaagaaaatatgtagtagcctactacttgtctgagattgaacgacgattatcaacacagttggcctaataggcatctgtaatttgttggatatctgtaaattttgagttggtgtaaagctgagactacatagaatgagttgtacactttgccaagcataattaaaggtaggggcctttaagaaactgatttagcttgttttgccaaaaccatattcaacacaataaatagtttttctattagataaatcatagattataatatataatttttttaaatggattttataaatatatttttgagtttgtattaaaactttcatagtgtttttattttattatttattgggtttttatatatgccatgagttataattagtttgtgaaattagtatctgaaaaggaaataataaattttgagttctataaataatagcaattaagtcttttttttttaattatttttcacaaaatttttagttttttatttcttttagaaagaatctctg

SEQ ID NO: 235844 - DNA, 1258 bp, Cannabis indica
gttagatatacacttttaatatataaagatatttatatacaataaaaaattgattcaaataattttattaatttatttattcttatattgatttgataatatttgatagtgtaaattataagtgagatataatatatatagacgataataaattttaacagtgactataagtaagatacagtaataataacgactttaaatataataataactacaaatgagatataatgatagaaacacttttaaataataatagcgattacaaataaattacagtgatgacaatcactttgaactttttttttttaattagctaaagtacaactttttttttgaatatctaaaatataacttttacctaatttattttgtcacattcaatcaaataaataaatggtttatttgatttgttatatgggttagtttttgtaaattaacttaaggcataacgaaaattattcgaattaactagatttaatagatatttattaaaaatatctatatatataatttgaatattataataaatatcaattaaaaatatttaagtaatttatatacatctataaatgatccattttatttttgtaatacttatactaggaacaattttgtagctaattttaaaatattctcaacaaaatagatattttaaaatttattatcattttaaaatttaaaatattttgtaacttcaaaaaatataaaatataattaatataattaagaaaacatctctacattgaaataaatatttaacaatagtcgaatgaagaagttgccaaattttttatataaaaaaagtgaattattagttattataaacagttatacaatttttcttgttttaatttttaattaattaatgatctttatttttttgacaaaatcaatgagctctaatcaaataaagtagaaaattaattaattaattaatgatctctaataaaataaaataaaaaatagaaaaatgagagaattaaaaagaaaatttaaagtagaataaaagaattagaaaaatacaaaaattaagaaaaaaatagatagaagtatttcaaatatttttaggttgccttatcatcgccttatataattaactttatctatattatattactttataatattatatttggttgattaaataaaattttatgttacaaaattatttgttataaatgagatattattaaatttaatgggggaatgttatattatttatataatgtaatgtttagattaaataattaagtgtgac

SEQ ID NO: 235845 - DNA, 1195 bp, Cannabis indica
ctgcttctccacataagacatccaagaagtccaaccgagccgtattaatccgaaccaccctactcaaatggttccttgctaccactactatgcacatgctttctaatcccaccctgacatcacatttcaatttaatccaatcttgaggaagaggcccccaggtccccctcgaagatggtgtcgggcaaggcaagaaaacatcatgaagctttgcataagaagtacaaacccgatcaatacatttcaaaacatctggataagtgttattatgaataaactcgtttcgcatcctctagatagtttcaactacaatccaagcatacaggaagacttcttctactctgatccccctattattgagattccatataaatttgaccaagtcccaaactcgaatcccagatttacagataggattgataccccatggtgaagatcgccataaatgcaacgccacatcataggacaagaaaagatgttccatggattcctcccttaatccacataaaggacaacatgtctcctcaatgtggaatcttcttccaatcacagatctaacaggaagcgcgttagaaaggatgcaccaccaaaggatcttatgcctctccaaaattttgctattccataacttgttccagagcaccggagcaacttcacaatgaggagctctttccaacgcttgagacaagtaagctgatttgctcgtgaattgtccatttttctctaaagtccacacccatttatcttctccttgactagagggtttaccacccttaacaattgcagacaccgtttccctgttaaagatgccattgagctttaggatgttctagtctccattatcaaggaggagttcagccacatagtttacattgggtaaaacactgccttttggtttcgggataaaacctttgtaatgaggaatccaaggatccctccaaatatgaatggccctaccattcgacacaactttacaagcccctttcctaagaattgctttggctttcacaacatttttccagaaccaagaattcgagtctttatagctacagctgaggaagtccttcccattcagatacttggcttccaaaattttacagcataacgactgagaacccttcaacaaattccacccccaattggctaggaaagccagattcatttctttcgttttcctaaagcctaacccacccaa

SEQ ID NO: 235846 - DNA, 829 bp, Cannabis indica
caacaataaccaaataaattgtttatcaaaaaaaaaaaacaataatcaaatactttttttgtaaggattgtcaagaataaacttaaatattagggtagacttttttattttttatttttttttatttttgtccatgataaaaagatattaggtggtgtttgatttggtataacagagtaataatagtaatgataatgtaatggaataaaaataataataggaattaattacaatgtttggtttgtagttaaaatgaatattgtaatcataattattgtatttggtttagtatgagaatataaataaaataaaatataaccattatatgcgatgagcaagtatgtctctcttgcgacaagtaaagatcgctttacataagtttggtctgaatgactagtactagtgttcgacgactccttaagaacttgcaagttttaagatattaacaactggaatgtccgaatatgccaacaagtatgatcgcagatattcgttaatataaacgcccaaaaggcccattatgcgataaagcaccacaaagtctgcgagcttgctttttggaatatggatagatgatatgcgattttgtaagtcgcagacgttgctgcaattaaaacaagaacgaatgaaactattcttatatttattcctttaaatgtttatcttaattaatttgtgcaattattgtaatatagttcaatttgatcagttatgtaatattaatgtgaatctactttctacataaaagggtgattcaaatcaaatagacgaagttgaaattattacaagagtgaactaagcagatcgaactctgactgaaccactatta

SEQ ID NO: 235847 - DNA, 2484 bp, Cannabis indica
tatgaagagaaccaccaggttttacaagaggaactgcatttctatttacaatgtcaatcacaatgatgaaatatgtgaggaaatgggatggaccgcttggaagaaaaagacctgggtatctgaagcatttagcaaattctgtagtaaaggctattttaactgataagattgacatgaagttaccatatatataaaatgcagtcaaaaagtctctgcagtgatttagccaagcttattatgtactatatagtagtgtatccaacaaattaatgtaaatctaaaaaatattgacttttaaaatccccaaccccccaaataaaataataaagactttgatttacttgggaaccagagtagatagtagaaatagatgaaaatggctagaaaaatagctacttgccgattggtcagtccaatggtcttcaatagtagttaacaaaggcaaataggaccactaaaagggaacaaaacacaacacatacgttgtactcttaggattagcaagctatacatgcagctcatttggacacagttctgccggctgccatggtagatttagtgtccaccctcaaaactctatgtgattggccaaactattgactaaggcattaccttgcaggattaaaaagaaaaaagacaaataaatcattagcaacaactattttttttttccctgatgaattgcaccaaaatatctgcttgactacacattgaacagaaaatgattgcctttattcacatatgaaagaaggttcaaacattgacagctctagttttagacgagataagattaaatcatacatactgatatacttgtctacatcaatggcaaaacgatttacagcagaaaagatgatccaaaattaaacaagaggatacattcaaatgctttttagtattttgagagtctcatcgatatgcttttcaggttggaactggttgttgtagacgagttggacaactccattcttgtcaagaacatatgtctctctcccaggcaatgttccaaacagatcccccggcacaccccattctttcctcactttgttaccttcatcggctagtaatgtataaggaagtttatatttctttgcgaacgcctacatacagaagaacatttacttttgccataagaattcaagcatgagtagctattatgacaagtttaaacttttccattatcacaaaactatataactaacaagtaacaagtctgtatttttcaattcaatttgtttgttttaagcttagtaacagcttaaaacattctacatttaaattaatcataagacaacatatctttggtgccatctaattagagttttcaggtacacacatatcaagtgacaatggatattatgaagttcaaacaatttaaaatacagtgtggaattgatgactcagattcgggttgccacaaatgacaaagaaaatcaagtagttttgtattaccttgtgtgagtttacatcatcaccactaataccgactaccgctgctccagctttcttaaatttctcataagaatccctgaaagcacaagcctgtagaaaatagtaaccgttcagacaatgctatatgctaaagcacaccattaaaattaatgagtggtggcaatattttacagtgattaaagacactaaatttctttaatagtagacaagacagagtccagcttgccaccaaaccaaacattaaaatatggcaatgttctatgacatagtatgataattatgcatttcaaattcaaagggtacccatatataaattcatataatgtataagcacctgtttagtacagccgggagtctcatcagcagggtaaaaatagacaatcacaggtttccctttgaatttggaaaggctcacattctttccatcctgatctttcaaggtaaagggtggtggtgtcgaaccctttttcacctaaagtaataaaagaaaccaaaaacccctcaattattattgatgaacaaaagtgacaactccagtaaaatatgcaaaaagaaaggtaatgtaccttggcgaaaacgacattcttggtggaagaggaaagtgggagtgtagtagatgtagaataggagagcttggtgccataaaactgagagtgagatgatttggagaagattttgaggttttgggaaaataagtctttacgagtttggggagggagcacaggtgggagtgagtgcttaggaagagaaagtgaagccattatgagaatgtgtgtgagagaaagggagaaaagagaagaaatttatctaaattgttatgatttgaagatattgttgtttgtttttagttggtgattttaatcagattatgtttggaggaagataagagaagaagaagaaaagaagaagattggcttttctatgtggacgatttctgaccccatatgctctcttctccacttgcatgtttttgggtttggcccttttttttgggttcataaagttaagaaatgtgaaaaaagctttaattta

SEQ ID NO: 235848 - DNA, 804 bp, Cannabis indica
tgggagtgagatcattgacataacatgtttgggaaacatacggattacactcaataaaaaagtataaacacaagcagcactctatgaagatgatactgcttgcatcgctcacctaaaaggagggtacattgaaggagatagaactaaaattcctcgtcgaacacagtatgctatgggggcaaagtggttgagattgggctcttctagctctggagttcagggaggtcaggcgccggtggtgggaggagggagttatgggggagattctgttccaagtaatcaaggattacatggaaattccgttcctggtttatcgggtacaggggtgaaggaagggttaattgatgttaatgggaggaatatgggggatcgggttggtgtgatagctgggagtaatgagggaataaatatatgtgatatagggaatagacaggtggcggctaatataattgaagatgaggatggattgcttttttttagataataaaagaaaaagattgggtaaagaggagactaatgggccaattgggcttacagatgggttgggcatggttaataggccgagtgggcctatggagggattggttatggatatggggtttgatacaagtgctcactcaaaaaacaatttaatggcaggctcgaaggatcgggctcgccaatcattatgagtactttaagttggaattgccatgggcttgggaacccagggatggtgcaattccttaaagatgttgtttgtcaaaagaaacccacttttattttttgtgtgaaactttgtgttctaaaccaagattggagctt

SEQ ID NO: 235849 - DNA, 1730 bp, Cannabis indica
cctcctcgtcgcttccaaaattttgaatgctaccatattcaatgttaacctcaatacagttgttaagaacttcattgttattatctaaaccggctgtatccccagcatctcttccccgtcttcgaccacttctagtttttactcctgaggatcgtttagcagagcgattatcctctttgccctttggttttcttccacgagtcgtagcttttccaggattcgatgcttctccccccgagccaatacagaatttctcctttgttggtgtccactgtgtttttgcagtttcctcacttgtagtttggtttgaggaacttgctaaggagtcggctggataaggctcataccacgtgtgaacctttcttttcctagtatttcccaataaaaacaagatcatttcagataagttaggaggatttgaaatcaaggattgttgggccttataaagatttataacatcatcaccatacaacttgagaaacatttcctgggcctctttgtccaaattgggccatcccaaaggggtaggtttagggaatttgtggggcgtttgggaaagacaaacccagtcatgaggaatctccagagattgggctattgttggcccaatattaggaataatatccctgttttcattaagagcaaagtcagggtttggtagctgaagaaagtttggcccaactccctcaatctccacgtgatcaatatgattatcctccacagccacgtcctcagtacgatcaccagggtatcttggcgcacctccactactcgtactgccaacgtacgatttgtcctttatcccaaggatattccctgcctgacgaaaatgccctgccggagcagcaacgttctcctgcgtcaccccagcctccaggccactgcctgccttcgttgttgtcgccctcggaggttgacgtcttctccagacacccctgtggtgcttcccattcaactcccacttaggaacctctccattatcaactataagcttagttatacccttccccttcatagtaaaacaatttgatctcccagtctcagatttaatccaggtaccatacatttgaacagcctctccaatcttggggatcaccatagcaaaaggagcagagcattctttattccaatgggcaagtttcccgtagttgaagcacaaatgagggagtttctcatatttgaattggatccaagactccgatttgccgtccgcagtaagaaaaaatccaacagggataggatgtctcaggcacacatccacatatgcacgaagaaagcctcgatgaaccaattcctccttaggcttactgtccgttttcaagaaagaacccaccttcttccccataatagcagcattttcatccttcagaaacctcgtaggaagtccgtggaactggacccaaaagcttgccacttcgaactccgccacccgaaccttgccctccactggccaaggcttaagatttagaagcacaccattcaccagccacagtctcttttcaagcacaaaagcacagtcatcttcctcttcgaagaagaaccccataattccatctgaaaaatatgcccgatggttttgcacaatctgaaaaatattttcttgaaaattttccacgtcgcctagtctaccttatcttccgtacaatcaaataggcatcatttttagatattgacaggaatattttactcgattattttgaaaactccattttgtagtagtaattgttttt

SEQ ID NO: 235850 - DNA, 2567 bp, Cannabis indica
ctacagcaacacatcaatgccacaaaagacaagaatcacttaacattatgaccatttcgcccttaacaaagacaaaagcaaactaatttaaagggtaatttggtccttttccaaaacccgacaacttccccgatatttccaatgcctaacaatgatgtcccgctattaacattctaaaccatacaaacgtgactttctaacggcccaacgtcgtgttccactgctaccggacataacactgaaaataagaaattcacttatatagcataattgatacatactgaattataataaatctccacaaatgtgtaaatcataagtaataattcaatttcataattaatcctaattatttaataacccaatatcataaacttaggcgatcattacagttgctatacggattttgattacggtctatgttgctctgttagttgttaaagggatatctgtgtgaaattccgtaaaaatgtaaaaaaaaaaaaaaaaaaaaaaaaaaaagaaaaaaactagttttgaaacgtaaaaataaaaaaacatcaataatataatagtacattaaaaaaattattatctcattagtgttaaaataaattcacatcatcctatatatcacaatataatatatatgtatatatttataagcgtagaaattaattaataagttaaaaaaatatgctacacttcaaaaatgaattagcactcaaacttaataatgcgtaacctatatcatgttatgatcaatttacagtttttatttgagaattttacaatacctcaatcattaagaatgaaaaagattataataatttaacactcaaaaatttaaatgtttaaacctatgtaattactatcaaataattttatagatcatatatttaacattgttacctaggaatacataaaatcaaattttattgtgatttcaatatattttcaaaaaatatggaaaagaaatagagtaatgcaaaaattggtttattcttgtctcttctatatatgctaggtgtggatgacgtgccacatgcacgtaaccctgtcaaaacttgtaagttataatcatatatgttactttcattaattatatttaaacaattggtaaaaaaagatttacacaagaacatagtgtggtataagtttccttactaagttaagatcatcagtcgtccagtttaaatacaagcccatgtagttcgctttactattatctaataataagtaaataatttataaagaaaataaattaataataattaacaaaaatttatatataaaaaaaaagaataaaaatacaaaaaataaattatatgtatggtcgtataattttctatactattatatatttactaatcaacaaatataaagaaacattaaaaaaaagaagacaaaaaaaaaaaaaattaacacggaagaaaaaagatgatgaaaaaatgtagaaaagacttaaaataaatatatttttttttttgaaaaggaaatccattaataaaattcagtacaaaggaaatggcaagtctagctgaatagctcgactagcacaaggggagagaccccaatccacataacgctaactttgttcactaaatcataattggctaataaatgagcaacttgattacattcacgatatacaaatttaatctcagcaacagacggatgttgagttaatagcctaacttcatgtaacaatccatcaacatctcgacacccctcctctttgtccaaaataagttgtaccgcacgaagacaatcagactcaattcagaacctcggcaggcgacgttgtagccctgtacggatcccgtctcttatagcgtacaattcagcaattaatggagaagtagtcattggcaaaaccgtggcagcagcatactgaacaactccatcattgccccgaatcacaataccagttgttgctgatttatcctccattcgatgacatgcatcaacgttaatggcgaccaaccccacaactggcggtgtccacctacctcgattccccttgtctttttccggcactatcccattagcttgctgaaattcgcttagaaattttgcacaccaatccaagacatcccctgctcgtgggccatacccccacgaaccacaatatttcgagtattccacagatgccacccaataactagaaaaagatcaaaagagtctttagaccataccttagcaagccgctgaaagatcaagatggtgtctgaaaattgagtaaaaaaatgagagtattttttttttgagaaaaatgaaaaataaaatgtgagaaaagtggtccaaatttagcacatactgaatgttgtgccaaatttgctacaaaatgtagcatgaattaaattttccacaaaataaatattattttttttgtttacttttgccacatattaatgcaattaataatttatttacattttatttatatatttaatagtgtttttatgtacttttaataaaaatttaatgcttttattgatttttttgtacatctttctatcaaaaaaagaatattttattctaaatgcgttgaagcactactataaaatttgggccaaatataatat

SEQ ID NO: 235851 - DNA, 1596 bp, Cannabis indica
tttgggatgtgcccaacacagctcatgcttaagagaatcaagtatctctcagtgatgttcatcttgtatagggagctaggcaggcctccacctactccttatgagatcgagtaatactttgatctaaagtttgcattaaagcagggcatgactggatatttttattttagcaagattggttaccaatgactgggtgacactaactgcacagccatgtcaatggttggcgggtacaacaaaaagtactttattgcacatggtcttcgtaggatcgggcaccatgactttcggtatgtgccactctttagacgttccatccctactttgcaaataagggagagagaaaatcacattctttctttatcagctgagcagagaaatattatcttgttgacaagtgtggacaatttttgaaagtatggcttgtatcctcctgatggggcctgccctggagattggcaagctcctggcttggatgatgatgactttttctcgtattacatgaaatttggagaagagagagaaggctctccaccggcacttggccagtgggggtttggtaggtgatacttctcttcatattgggcctagaggccaggtttctgggagaactacacgccacgtgcttgggtctaggagtaagggcaagcctgtcattgaggactctaatagttcctcttctgatgatgattatatttgatggttgataacatcatgttttgttttgtattgaatgtttgcgactactttcttttttgcagatatgtcttctaggttgagaggtctcactgtgggaccttcagatgagactacaggatgggtgagggccaaggtttccaggacatcccatgcataaaacccaacaggtcaatcactgcctcccctccactaaggcctgcattagatagacaacctatgacatggcctgttgaccaaggtgctaggaggcccagcagagaagcggggtcagttgctggacagaaggatgttgaggtagccatccgacacatggagagggatcttcctttcttagaagagtatttgaaggagctaggtgatagtggacctgacaggctttactccactggtctccgagatctttctttggtaagttataaattcagctctattcatcttcttggcactgtataggctggccgcccatgtggcttcttgcatgtggctggccagccttggaagcttttatgggcggctggccggccatatcattcccaagggggactggccggccagtgttgtgttttttacactgatgttgttttgctttgttttcaggccctgatgatactgagctcagctcgtgatggctctaggggatcttcatatgcttttcaagagcatgtgaagacatggaggcttccctcgtggcaaagggcaaagccaattctaagctaaaggctctcctggcggagagatataggatggtttttggcatagagatcgtgcttggcgcaatgaatacaaagaacactgcctaagctgccatcaactctgggttgcaaactgaacttgatgatcataagaagaagttgttggcttttgtgccctaaataaaacccattacaatctgattag

SEQ ID NO: 235852 - DNA, 1666 bp, Cannabis indica
acgtctgtgttttcttctttaagtatctgtttggttcataggaaaacttgcttttgaagaagaaaactaatgtgtaattgaaatgttttagattttctatgcatgttatggcataaaagttgctcacttcaattgagcggcatggttttatgctttaagctttatattgactcattatttgaaaaatcatgaaataaaaaatgctcaattaaatgcaagtaatagtatctctgcatttattatatttatgtacataaactggattcaatgattagcttttgctaatatcaagtatgccaaaagatttttactctgtttttttccctctctggagttttgtagtttcagggctctaagattttttcttttttgaaacagtagtataggatgtttgaggatgtagcttcgagaagtaagctcactaagaagctcaaaatttcgggtttaaaattcaatagtacaaaagatacaaagaaaaagactcaaagaactcgtagtgacaatgaggatggtggtatgaagaactttagttctgataaaccaaggaggggaagccacaatgaggatggtggtatgagaaactttagttttgataaaccaaggaggggaagccgcaatgaggatggtggtatgagaaactttagctctaataaacaaaggaggggatcctccaatgaggatggtggtatgaggaactttagttctgataaaacaaggaagagaagttacaatgatgatggtggtatgaggaaatttagttatgataaaacaaggaagaaagtctttgatgaggatggtggtgtgaggaactctagttttgataaaactagaaagagaatctatgctaaccgacaaactggtggggaggtagtatttgatggcaatgtagatagacctaatagaaaacctttgtcaaagaaatggcagagccaggggaaagatgatgttgttggagcaaaggggaagaatgtatctcctcgctcaatgtgggtttctagtaagttggaggataccagttctgaagctaaagtttcttctcataaagctaagaacacagtggaaaatgaacaaatttctcatgtagctcggacaaaggggattgataagaaaaagtctcaagatatgtattcctcaaattcaaccaagaaatggggtaaagacaagaagaaccaagctgaagacttggaggttctagatgagcagccaaagaagtcaaaacgggtcattcggatagatccacatgatatctcaaataagaggctggtggaggtggacaatagtcttgtgaatgttggtaagtttttatcgtaatatatatctagttcaatgtgtatgtgatatctcatatgcattgttttggggtatttttgtacctcactaattcaattctttttgttagaactagatgttttggaccgtgtactatcattctgctatttatatcttttatcatcatatatgagttcattgtttttttagatatttttttctctttacatcattacatgctctatttttagtgttttggataaaaatcttctgtggtaacttaacttaccttaacttttgtgatatgctatcatatgtcgtcacattttttatttctcacaacttttaatctttgtgcgtgctttccagacagtaaaactgagaagaaaaacgttat

SEQ ID NO: 235853 - DNA, 642 bp, Cannabis indica
gagagagagagagagagagagagagagagagagagagagagaattatagtggttccgccatagtttgttctgcttagtccatttctgaaagagatttgtgattagttttattcggatgagatcactcttttatatagaaagaaagtgatccttcagttcatacagctggccaggcaggaccattactcggaccagacgcttgcaaagatgcaatctttacgtgagacacgggggagacacttggtcatcgcatataatcgatatatacgcgactatgctaacttctctctatatcttgcttttactttattatgtcctcatagtgtgcgactagactctatctcggtcatacatttttgcaagtttttatcatgatagctatattacaattgttattgacacgtcatcttttttcgatcgagaactagatccacatgccagtcatatacgagatcgtactcgtatttctgggtgaaaaattcatcctataacgatagggtctaaattatcatttaagttttaacaaaatagttcatctaattaataatttttgtaaaatacacagtccaaaatagtatttatccattatagcatgaaggaattacgacgacatttggttagaaggaatgaaaacataagaat

SEQ ID NO: 235854 - DNA, 1286 bp, Cannabis indica
ctgacttcaattatatcagatattacatttaatatcactcttaaattaatgctttcataattttatgtattaattagtatactttttaatcgaagtattaattggtaaattttaggtgattttgttgttttctgattgagggattggatctatagctagctagctcttcagctccaaatttaaaaaaaaaaaaaaaaaattcttattacttattagttaagctattattcatttatattaaaaaatcaaacaaagtaagaatatttcaattcataattaatttgctaaaaaaatacatgttttactcgtcttacaattatttttctctattaaaataaaaaaataaatacaaagttacattttaaacacaaaacataaataaatccttatggtaattcaagatacctttggtttttaaatttaaacgttactttcaaatatatacaacgcaaaaacaccttattttattcaacttctccgatgacgataagaaacttatgcactttgtaaacatcaaaatgaccacacaattaatagtagatccagttggtactacttttgagtccaggatgatcaataagtcaaacaaaagaagaagaagagaataaaatgtggtggtagaagaaagagaaatgaactttttgttgattagcagaaaaagattaattaatatcttttttattaattaatatctttatagcagaaaaagaaaaaagaaagaaaatgataaattaagtgagcacgtcaaaattgtttataagacgttcagaatggtcccagatgtaaaaatttctaaaaagttatacaactaaaatgcggaaaagatgtcgcataattctaaatttaattaaacctatatagaaaagagaaagccatatatttaaaaatagttagaaaaaaaataaaatcctatcgaaattagaaacagtatcagctttaacatttgcataacccccaagaatttcaatttcatgttgctaagattctactctagatgggttagtcattgttggattttatgtctcctttatagagagtaatattgaagttgttgttaattatcttcttgtctctaagtggggctatttttttttggtacattgaaaaatacttttttatttgtcaattaactaaatttactcttattttatatttaattgaaaatagctctttttataagtattatacccaaaatatcctgacataaggaagtcacacacatagagagtatgttgaagtgagaaggaaaaaattggtaaaatatttaaaaaagagataaaaatgat

SEQ ID NO: 235855 - DNA, 2576 bp, Cannabis indica
tgatggggccgaaacaaggaatacacatggaagaaggggactggattgatattcccattaattttgccaaagacattggggaaggatcgtcaggacctaaagggggaaagaaacagaaaagggtgacaaggaagaactgtacgagtaccagtaagaacacacttcgacaaatgatcaataaggtagatgagaaacaagaaaaggatgggaggatggagaagcttttaccaggggacatttctttcatttcggatttgacctcaggagtgaatttgaaagcggcgaacccagtggagctgggtcgccgagcgccatgaatatactagtttggaatgttcaggggcttgggaacccctggacattaaagacactcagttcccatgttaaggatcatcatcccgggatgatattcttatcggaaactaaactcaaagaagaggcgatggaaaggattcgaattgtgcttggttatgatggttgtttcgttgtagctgcgaaaggaaaaagtggtggattagctcttttatggaaagatccttcggaggttagtgtgaaatcatacactgtttctcacatagatgcagttattgaaaatggtttgggtttcgagtggagatttattggcttttacgggagtcctgatcccaggggtcgaaagaattcatggcaacttttggaaagactccgcgacttgagaaggggggcgtggctgtgtggaggcaacttcaatgagattttgaaggctaatgagaagaaaggagggggcgtgaaaatggactcacaaatgaaagaatttcaacaagccatctcatattgcaacttcaaggaactatggatggatggtggtgaatacacttggtgtaatgggcgacacaacaacttggtttttgagaaattggacagggttatggctaatccggattggttcaacaaaatttgggcctccaaagttactcttctcctgtggtggaactcagaccatagacctctcatgattaacatcaacaaagatcagcaacactccaacaaggaatttaaatggagatcccgattccactatgagcaggcttgggcagaggatgaggagtgcagcaagatagttgattcgacttggctagatgtttcatattggggctcggctattggacttcgggggagacttaaccagtgtggagagaagcttaatgaatggaataaggataaaaaaactgagttgggagcaaaaactaagaaactcaaaaaagaggaaaaaaaaaaaatatcctcttcggtatggtagaggatagactgggaaaaacaagcgaaggattgagaaggaacttaaatgtagtccgaatataaggaggaaatacgtataggtaaacaacggagtagagctctatggcttgcgcacggggatcgtaacactaaatattttcatcacaaggcctctcaaacgaaaagaaagaagaaatactataaaaaggtttgtttgatgagcaaatgagatgctgtacatcgggcagcgaaatggaagaaattctggctaattattactcgaaccttttcacctcttcaagaccttctctcaccatggaggatatcctcaaccagagtgttccttgtcgcctttccttccaagataacaacctactccttgaagatttcacaaaggaacatgtaaaagctgctattggccaaatacacccgctcaaagctccgaggaaggatggactgcctgggttattttaccacaaccattgggaagcggtgggagatgaagtcataacaacttgcttggctgtgctaaacaacaatgaagactgtaaatgcattaacgacaccttactttgtctcatacccaaggtgaaagatccgactgtagtaagtgactttcggcctttaagcctctgcaatgtaatttataaagtgatctctaaatgcctagccaatcgaatgaagatgagtatggataaggtgatctctgaaaatcagagtgcattcattaaagggagacaaatacaagacaatgccattttgggattcgaaagtctccactgcttgaaaaaaggccggttcgggaatgggaagaagatggctctgaaactagatatgtctaaagcatatgaccttgttgaatggaaattcttagaaggcatgatgagaagcttgggctacgacgatcgttggatagtcaaattaatgagttgtgtgaagtcggtaaccttctcggttttactcaacggagaggctcggggtcacatcattccgaaaagagggctaagacaaggggaccctctatctccatttctgtttcttatttgctccgaaggtctgtcctgtttaatcaacgaagccagccatgctaacaagatccatgggctccgatttggacagctagaaaaaagattgactcacctcttatttgccgatgactgcttgatttttatggatgccacagttgaggaagggagagctttcactgaggtccttcagaagtattctgatctgtctggtcaatgtattaatttcactaaatccaatctttgtgttggtaggaaaatctctcaagcggagggtcagaggttagcatcatc

SEQ ID NO: 235856 - DNA, 944 bp, Cannabis indica
tattgggaagaaagcatgtacgcgagatcaaaggatcttcatctggtgggcgatcatcattagtggccaaggttgtacgtcctaactcctctctgttgtctctagttccattccatcatcgcgggacccaggtttgtcttcacactcttctggtttagctaggtgttttactcgttttatgtctgctactaattctgaaccattatctcaacccttgtcccctcttgatccttcctcattgccatccacgattagttgtcctaagtctttgtctaaacgtaatacaatctcctttaactctcgaaaccttcctattcctaagaaagtcaaattttgaacctggttcgtcatctaaccctagtctatctaagccacctccttcaagtcccccattttactcaaataataagtttcttcatcttcaagataatatttgtgttcgtcgtctgtggcctaagtatcgagtcaagctcaaatattttctaaaaattcgtgagttaatacagtctatgggtggtcattgtctgtcacacatcttcaccaaccaaataaaaacctagtcagagaattttatgtcagtttgataacattcttaataagaagagtaagttcaaatatatggcttaaataagaggtaacagattttagtttgctccgtcaaccattaaatgcgttttaaaaatcaaaacaattaataagcatgtatttgatgacaactataagactacatttcaagaaattgggtctgagatcactagtagtgtggaatgggaaagaatacctgtcactatgctaacagagctttaccgaatccttcacaagattgctctttcgaattcgtgggccaattcccatatttccaccgtcaactataacattgggaagttcttgtatgctttcgggattggagtaagtactgatcttccctcgctcatatatgatcg

SEQ ID NO: 235857 - DNA, 1277 bp, Cannabis indica
ggcacaaaacccaacagaggaagccatagattttcaatcaaaagttaaaaatcaaatatcaggaagcaagcagttggtaaacaaaaattaagtataatatataatcatactaaaagagtgctcactttaaaggtaataattctagctagtctgctagttatccacttcttattttctctctatatatatgctaataaaaatatacatgttatatattaaaatgttacattttgtgtgtaaattagagttaggatactgtgaaagtggtctcaattttttatctcaacacaaaaattgaatatacaacagagaaacataggaacctaactagaggattagttaaaagtcacagaatcagtaactaactagttaaatgaacatcaaactttttagatagtacaaaacagagtagtcaaacaccattaaattagataaaaaaaactaaccttaacatcttggaacaaccttctacgatggccatgtgcaacaaaagaagcgacaacttcttgtatagtactcatcaagtggctaggatgaaacaaataggcacttggtaagataactttgtcaacccacactttcatgaattcaggtccaagagtaatcccatgaacctctatgttcggatcgctagaacactaacgaccttcagcaactatttcatcctttcagtcaagcatgctgcaagcattatttattggattttgtgccctaaataaaactcatttcaaataatcagatttactaattaataaagatcagaaatcattcttttatgttgcatgattcacataatttatttcatgattatgtttaatgtataaattctattaagtccagaacatatataaatatatatatatttgttcatgattatagtgtcgtcagcatagtagaatataatcatgattatatgttcaagagtttaattcccatgatttgtcagttcactgaatttagactgacatgataatcagcgataaggtatacttacacattggataagtgttatgtcctttccagggtattgacaaagtttaccagtatcagatgtatggagtatacattggaagggaccgatattgatcttggataagatatcataaacttacctttatatctttctaggtcaataccaatggttgatcttaagtctatggattttaatcctgatatggttaggttcagcttagttgtattatttgtgttcttcaagttgtttgtggatgctaacttatatttctagcgaatatatacatcttgggaacatagttcaa

SEQ ID NO: 235858 - DNA, 881 bp, Cannabis indica
agcttaataatttttatttttagagaattttttattttatcgcttttaagcataagtttacaattatagtttttttttttcaaaaaatattttattagaaaattattaaaaagatttaagaaataaagtaattgttattctaagatggtaactagttaccctaataaggtatatatagaaaattcttgagtgaaagatttatttacttatttattttcttggtgtatagtagtttattggttgagaaaaaactgaatatataatatacacaaaattagaatatgtattgaaatttagcgttttttttttttttggtgaaatcattaaaatttgtttaggattggaaatgatcagttagtcctttaatcatttccatgtgattttctctttgaccaaacaagtggtgggtattggcattttcttcctaattgagaacacgatagtactcagttcttcatactatattaattggtttcatttcaactggattgtcatattctcttttgctattatttaatttgattttgatgtatttaattataatcaatagtaattccattacttacggcgggaaggtttagttgttagtttcttcttttaataaagagtttattttttttgttccgttttaacaaaaaaaaaaataataacaatattacaaaaatacttttaattggctaagtaaataaatttacagttcaaataaaaaaattatacaaataccacttatacacactttcaacatgtgattcatgcttcttgggcaactatcgcacaaccacgcagcaacctaacgcaaccgaaacgaaaattcaactagaaagagaactatcattaatttcagcgacttcaactaagaagacgatcggaatcaatcaaaa

SEQ ID NO: 235859 - DNA, 963 bp, Cannabis indica
ttcacatgctctgttattaccaagtacacaataccttcatgttctctgaaaagactgaatagttctttgtggtgtcatgtggaaagacatcctgaatctaggatccaggccccatctgttgtgttaccagacacaactaaaacctcagctgattcatagccatctgctatgtcagcttctccattctttccacgattcttttctctttttagtttagccttaagtgccaaacaatgatcccaaaaatgaccttctttcttacagtaatagcattgttttcctgttgcagctttaggtttaaacatatcatttttgtctttgctattattgtaagagttcttgtgtcccttgtaatctttcttctgaaattttccctttgcaatgaacaatccatccccactgttgtcagcacgatcatccttcttctgaatttcttttgaacacaatgagccttgacttcagtcattgtcaaggtgtcctttccatacaagatggtatctatatatctttggcaatgaactaagtagaatgatagcttggtcccctcttcaatctttactccaagattagtcagatcaagaataatcttgttgtaatcatcaagatgtcttcgaagctccttggattcatccattctgagagtatacagcttcttcttgagatatagtttattggctagagatcttttcatgtagatagaagccaatttgttccataatccaagagccttttcttcactagacacttctctcaagacttcatctccaagactgagaagaatggcactgtgagctttagattcaatctcgaatttccttttcttgtcatctatctccttcatagcctcaatgtccaaagcctctgaaattccctgatgaacaagacactttcattttaatcctccacaaactgaagtcatttgtgcctgtgaatttatccacctcgaatctggttgaagccata

SEQ ID NO: 235860 - DNA, 856 bp, Cannabis indica
gtctggaccttttcttagccaaattaatataggccaccctcttcttcttatcagcaattctagccctcttcctctgcaaagtcaatggagtaactaacaagcctctgaatcttagttaagtgttaacatatttcctaacatcatcgtccttcgaaagattaaacaacttacggatttttgaagccctctttggacctctcattctaggtttctcattctagttaagtgttaattacataattctatatttcttacacaagttcacttggtccaccattgtatataatatactctacaataaacattaaaatatatgtatatatgatgtgggactgtggagtcatgtttatatattagtcacctgtatatatatccttagtaattagtattccattcctatgataaaccaaagcatagaattggtttgcattgggatgaagtcaaaaccaaaatcaattaatggctgatataactacgtgtttgggcaacttgcttcacttggcgtgtgatatttccagacaaactatttatttattatatacacttctcaataagtgttacttattaatggttactaaaaataatgataatgtaacaagttattttcttttctaataaatttatattcattattttctttttgaaacgcaaaaattttaagaagaaaacttgatttctggtttgaaatcgaaactaaaaccaataacatcgattctaaaaatttatgcatcacaaattctaacacattagcattagttatgcacttagagcatctccaatggagtgtcaaaaaggtagtgtattattttattttagcacatttaaaaaaaattatactccaatgatgttctaaaaa

SEQ ID NO: 235861 - DNA, 693 bp, Cannabis indica
acaactcaatataaaaaaaaaaattggttaaacacgacacgatatggcatgaaaaatataaatttaagtacgacacatcataataagctcgaatatacgacacgcaagcacaaatggattagcatatgatgttccttactttccaatttaaaaaactatatcacataattcagtgctataaatatagggcagactttttgacacgacacgagctcaagaggcacataaaaaaatataaatttagacacgacacaatatgacataaaaaatatagatcttcacaacacgacatgacaagattgaaagtacgatacgtaagcacgaatagagtagcttgaaaacatagcacattaaaaagttctatagtttgataataataaaaatgacaaatatatatttatgaattaaaatgatagtattattaccaatataataattataattaatttttatacgattgtggataacgattattagataaagatataaaagtaattaaaattataaaatacactatggtatggttcctccaaataaaaagatctgcaaaaatcattttatggatagttatctatttccccaaaaaatcattttatggatagttatctatttccccaaaggttgttcagacaactttattgctattcaggaagaagtctcatggaatgattgtaataccctaaaatttaataa

SEQ ID NO: 235862 - DNA, 1057 bp, Cannabis indica
ggttcgatttttatggtcaatattttttgcttagaggttctggtagttgattttggttcatggagttagttttaagcaagcttgatttttgaaactcaagctttgagctttaatggcaacttgagttttattggtttgttctgtgaaatactgactgaaatttattgtgtatgcccttattaggtactctggaaggtttcattgcatttggtggagaatttagcaacaaatgaaagactttggaaaacctggtgcaaatcggctagccggtttgcagtgccacaaaaactggccagccggttttggtagggttccccttgcctttcattttctcaattttcgtctttgcggtgcctcggttgggtgtttccccatttccagagttagaataacccattgagagtataacagaacctagggttttggttttgggtttcgcgggattagggttttaatcatgtaacttacccgatttcaaaatgtgattagggcatccatctaccacgagatttctgttcaggtcggccagcacacttgaattcagaaagaaggtaagaactgaatataatgtgtgatatgagtatctgaatgtatgtatatgtgtgtgtatatgcatgcttagattgttagttccactaccaacacttgtgcattggtatagtgagtgttgtttgtgagtacaatacagtgataccaacacgagtacgagaaagtgctaaggtgtgtggtatatcactcagtggtactcagggtacaaaataaaccctaccaacactcgtacagtgaggtacgttgtgtatgtggtatatagtggctgtaccctagtattgaacgttcatgctcatccgttaagccttgttataggtgtatgggcacctaattacatgtcagaaattatatgatatgttatatgcatttcttactgagtctgtcgactaaaagctctgcttccatgtgtaggtaaaggaaaggcgagagctgaacaggagtgaacctgagctcggatgagattgtagatgtcaaagcagcacgacctggagtgttcggtctcgggaca

SEQ ID NO: 235863 - DNA, 1180 bp, Cannabis indica
aaagacacaagaaaaacaaaaagaaaataacaacaagtatcctccatgtggcatttgtaaaagaaaaagtcacttggagaaagactgctgatttaaaggaaaaccacagggccaaaattgtaaaaaatttggccatgataaaacttgtcgtttaaagaaatcccatcaagctaatttttccgaagagaaaaatgatgaaaatactctcttctatgtctgccaagctgcaacagaagaaggaaaagatacttggtatcttgacagtggttgcagtaaccacatgacgaaaaatgaaagcatcttttgtagtcttgatagatccaagactaaagtcaaaatcggtaatggtgacttcatggaagcagtcggcaaaggcaccattgccattgacactaaaaaaggcaagagatacatcaatgatgtactcttggtacccaacattgatcaaaacctacttagcgtaggtcaaatgattgaaaaagggtactctttgcattttgaaggagattcttgcacaatctatgataagcaagataaatcctttcaaattgcaaaggtaaaaatgaaagaaaacaaatgctttcccatacaatggagatatgcaattagtgtggcaatgcaagcacaaacagatgaatcatggctatggcatagaaggtttggtcactataacttccatgggctaaagatcctcaagcagaagaatataatgcgagacctcccagcaattaaggagatcagcacagtctacgaaggatgcatgctcgggaaacaacattgacaacctttcccatccgacaaaacttggatagccaaaaagccattagagctagtccatactgacgtctacggggcaatgcacactccatcaaatgaccagaataggtacttcattctcttcgttgatgactttactagatggcatgggtttattttatgcaacaaaagtcgcaagtctttgatattttcaaaaaattcaaatcccgtgtcgaaaaacaaagtggtcactacatcaagataattagaagtgatagaggcaaagaatacacttttaatgaattcaaaaagttctgtgaagatgaagggatggagcaccaactcactattggatacacaacaaaacaaaatagcatatctgaaaggaaaatcaaggctgctatggaggcaacaagagcaatgc

SEQ ID NO: 235864 - DNA, 940 bp, Cannabis indica
aaaaaaaaaaaaaaaacctaggaacgtaaaaaatataaaattttcaaaaaaaatagtactttatataattatccatatttataatgcctagcatccttgtgagataccatatcgctactgatgtaatttaatatcgaatctcacttattttactttaatttaataatgattatagaaaaagaaaatttattatttataagacatcacctcatagcagtacaaaaaatttgtggtgcctaataacaatgcttagaggtgtacatcgatctgtttggtcgggttatagtttatttccatcaacctaatatacatatcaagttataaatatttaattgtaatctaccaaattaaaaattaaaatttcaccttttttttaaaataattattgtttaatttttcgtactcacataactagatttacaaaataaaagttcattatttacatttcaaatttaaaattttatagtttaaattaattttaagaactttaacaaatattatttaaattattatgaaaatattaaataaacatatatctgaaaaataaataaataaataaaataataatatgatgtaaattttaaattttaaattcaatatccaaatataataaaaaaaaaattaactataaaatctaaatttcaagttaaacaataacatcataaaatctaaactttaaatataaaataatttaattaataaatataatttatgtcttgcctatttgaataaagaatcttcttcttcttcttgttaaaaaaaaaatatataattcatctaatatatattttatcatatttaaaatatatataactcgatttatttagattaattaaacagtttagaataatttttaatcaccctaatatacttaatatttattgggcaatttagattttcattaagtttgttgctcctaaattcgcccaatatacgtgga

SEQ ID NO: 235865 - DNA, 898 bp, Cannabis indica
ttaaaattaagaaccttaggactgatagtgggttggagtttgttaactccaaatttgacaagatgtgtcaagaacttggcatcactaggcatagaaaagtagtgaagaccctggagcaaaatggtgttgctgaaaagatgaaccgaaccctgttgaacaaagttagatgtttactgttcagttatgggttaggaaaaataattttgggggaaagccttagcaatcgcaacctaccttgttaacatgagcccaaatagagttatagaccgtaagacaccttatgagatgtggtacaaaaaaacccccagcctaacgcacttaagaacatttgggtgtactgcatatgtacaccaatcctttgacaagctacaacctaggtccatgaagggaacttttctaggttatgccttaggaaccaagggacatagaatctacatttccagggaaggcacaccaaaggttgcgattgttaaaaatattattttcaatgaattagaatatcctcacttgacctctgggaagggtagtgtgtctccatatgttacaggaaaaataggaaacaaagacactgcaagtgttgaggtggagtacagaacgaagctcccagaagaaggttcacagacgaaagattgtgtggaaccagaagacagtgcacaaccaaaagctgttgtggagccgaaagaataagaaaacaaagaccaaatagaggtgttagaaggtttcagacaaacatgtctggaaggttattagttggctcgtgatagaacctggagagggattcatcttcagctaggtttgcggaagcagacataacagcattcatactggcagtagttcaacaagctaaaaattaagagcccggaagttatgaagatgaaattttaggtgaaaacaagtc

SEQ ID NO: 235866 - DNA, 1073 bp, Cannabis indica
gacacttatcggcagtaagcctctaccactgagaagggtgggtggcgaatcgtaatttttttttatatatatattttttaataaaagaaaatggaaaaaattattttaatttttttaataattattttttattatttaaataatttttatgttgtgaaccaataaacttttgatacgtgaaaattttaagaattacaaatagagcttttaaattgggcacttacgaactaacgagaatgttgagcttagggaatataatcataattttttgagattgggacttatctgcatcaaagtaagtttttttgggacttatttgcatcaaaataattttttcagggacttaatgctgcattttaatatcaacacgtgatatattagggagaatttaacggaattattaaaaagagaaccaacgggcttaccagaatattgagcttgtggactattgccgttattctttaaggtttggaacttatctgcatcaaagtaaactttttgagaacttttactgcaattttccctttagtttatgttattgtacataaaaaaaaatgggtagcatcgagccaccatcggttctaggtccttaacctttacttatttcaataacagaaagacatcagacctgcatcggatcattgtcggaccatatcttacattcatgggtagcatcagaccaccatcggacctacgtcttcaacctttactcatttcaataacaaaaatgcatcgtacctgtatcggaccaccatcactaacctccagattgcactactaccgtacccatcatcagaccactatcgtatcatatcgtaccatatacaaaaaaatcatagaaaacacataagaaacaaaaaatacaaagaaaccacaaatcgtttgtctgttcgttcgacagtggtggttgtgggtcattggccacacactagatagaaccagagagagggagcgctgtgggtctcaatcacgcaacagagagaactagagagagagagttcaactgtggttttggtgatggagtttggtgagatccaaagaaaggagaagagagagcgagagggaaagcgaga

SEQ ID NO: 235867 - DNA, 863 bp, Cannabis indica
cttttcatgaaggggtattgttctatatataggtgggatctaggtattggcaaacttggacccggtacggtttaaaggtgtcaactaggcctactgataaggtaaaatacaatatatattgacctttagccaattaagtgaggcccaattcatgaggcacaatcatctgtatgagaggggaccattcgaggatgcagggtgtcatgcgcaaccatgttcgtaccgagaatattagagaatatggtgtttgacaaaaattcttttagtggtgcacacactccccgagtttgacatagaagacaaattctgacattgtgggctcctgtgtctggaggactttgcgtaagatgatatttggaagctctctgattgcctatttgactatttgtgtctagattatccgatgagggtatccagattagtcctattgggcttttcttcttttgatacagacggtatcccccagactagggtggtccaacccttctatgtatgtaacaagggttgcatctgaatccagagccattgcttgactctgtttatggactaagttattaatctggttgggcctagggagggctaccttcgctgatagtgggatttgttagtgtttacgtcactgctccagaaacacagataacaacaagaaattcttgagaaattgaaatttctactatgattcttggatagttcaatctttcacacctcttggtaatctgatccacaacaagagattttccaagttgactcactattataagcaacacagtctcttcctagtatttgtggtccaagctagctagctaaatccaaattgaaattgctctagtatatatatattttaaaccaattgatgcatcccg

SEQ ID NO: 235868 - DNA, 1098 bp, Cannabis indica
acaaatggtagccatgtttgccagcaacggcggccatggctctgataccatgatggaggtattgtaacatagagaaacaaaggagagaaagagagaaagagagaaagagataggacaaaaagaagctttatattgatttagcattagttacaatgtgctttatacatatgacaatggattgaaagcaactaacacctaactgaacttaaccaacttatgaatagttggaagctgaccaaacctaacaactaacattttaactaactcctaacaaattgtcctaatatagcttattgtggtacttgataagtatctatttctttgtaatggaagtatcataaaatttcattaggcacatgtccaagattgatacacaaaaaagaaaaatattgtgattaagtagaataaatctttctaacaatatatcccctctactaataagatcagaatttaaactagattctctagcaaaaagtgaacaaccatgttggtaaattgtttaacaaaaaccaaaagatacattagaaaaacttgatagtaataacctactttaattaacaagtaggccaaataatgacaccattttcatttacttctaatagcaagtggtcagtctccataataattatgtccaattgttttggtattatctaagagctgacccccaattacctcagccagttctaacttctttgtaacaagtcctaacttcaataaggcttccatttgaatttcccaccacagaactgcatgccttattcttcaaaaatagttatcaatgttaattttgatcatttactcttgctcccactagatgaaagtcctagctccaccattgatcaaaatcacatgtaggataagtaaataataatttaatccatacattccatatgaacatctcagacttccaccaatactaaaacccaactttttttttaattatatacctagtatactattatcatagaatgatttttttttttaacttttatattaaatatgtaattttacttttgttatacttatcctgtactatttatttttttaatttttaaaaaaaaactttaaaaaactagtataacggtagtacgtattttt

SEQ ID NO: 235869 - DNA, 1822 bp, Cannabis indica
taggaaggaggaggaaatcaagatgaattttatttcaagaagaatcagcccctttggcaagtcaaggatctatttgtggagggcactagaatgtggaatgagcaacttgtctgtgagtgtttcaatggaggaattgctaatgatattctcaacatcaagcctttaacagggggcacggacattgtgttttggaatgctgcaaattcgggcaaattttctatcaaaagtgcttactgggctagccaacaacaccgtttcaatacgcctaataaactttgggaaaagtggtggaagctgtgcctgcatcctcgcttaaagtttctggggtggaaaattctttctgacattctccccacaccggccagattgggtccaagggaggttaagcataggaagtgtttattttgcaatctggaagaagaatctactctccatttgttttgtcattgttcggtgactcggggtatatggttcagaagttcttgggggattcgaattgattggcttggctggaatagtctattggattttggtggatagtggacgagccttaaggatgaggcacttatcctgtttacggcctgagtgtgtgacactctttggaaatggcgaaatgacatgatatttaagaatgttggctgtgatgtggagcgtgtctttcaggattgtatggtgagatttcaggagttttcttcttgccattattgggaagatcgccaagagactcgggttactttgaaggacattacaccaaactccatgtgggacgattactggtgctgcaaaattgatgcctctgtgtctggtgttgatgcagaagtggcggtagtgtgcttgtatgatgggattctctccaatccttagattgttgttgacttctccatggtgtcgtgcatgttggaaggggaattgctgggaattcagctagctttgaaggaggcaactgaacgtcgagtgcgcaaggtcaagatagaatcagattctaaggtggcggttttggcttttgagtctggttctcttccttatggttagggtacctatcctttgttctctttgtgtcttgaactgtgtaaatcctttgaggatgttgttgtttttttcattccccggttggagaatggtttggccgattctttagctcgttgggctagagagtcgtgggtgaagacttcgggtcttttaagagatgtagccccctcttgtggctactagttttttgttttgttttcgaataaaaactccacttatatatataaaaaaaaaaagtaatagtatagacccttttcttatattctacaaatactattcttcttctcctttcactttttaactaaattgcctgaaaatctattatttaatatatttctgtgttattttccttagacctgacttatatactctttgtaactgttagttttattattatttaatttttaagtgggtttgatatgatttagtttgttgcaattttgtttgaatcttaatttgggtaattgttgataaaatcaaagatccaagtcctatgctagtcaattttaaagcattagatttacttggtacatttgtttttcggaaactgaatcgattgatattgataatatgcatgtattatagctttgtattttgtgtttgatattgtgtgttttgtaattttgtaattttgtataactttcactgtctatttcttaattttttttttcagagtttatgttattttagagtttaagttttgtgttcttcatatttgaattttattgtttattggtttgtatactgacatatatgtatattagtttgttatgtatgtagatggagatggaga

SEQ ID NO: 235870 - DNA, 864 bp, Cannabis indica
ttatataaccacttaaggctagctcaaatggtcataggagggtgtgtttcttgaagttcctgagttcgaatctcagattatatattgtaatatataaatgcttaaattaaaaaaaaattgcattatatatatagtcaattataatttgttagtgttcataaaattaaaaaaaaaaataaaaaaaaatataatttgttagtgataatggtgcgtaaaacaaaagaaaaagttaaaacttattctgtggtctaccgttttagctttattactatacttttgcatataattgaaaaggtattgaaattatttatgccaacaaactagagtgcttcccaagctaggcatataattcatctaggatactaaaaggggtaaaataatttttctaaaaaaaaaataatgataaaagaaataatggctagtacagttttaaaaaatataaatagaactgaagtccatctataaatctttttgagggtatttcatttataaaaattaataaacgtaaatgattaattttaatcaattttaatcctataatgttccagtgtaacatgatttaatttatgtggttccataattagaaaggtgtctaagtaacaagtcttcatcacttcactaaaaagtcttgtgtatatattgataatttttttttttgtttggtaaaggaagaatatatctggatgaattgatgatgataaaaaaaataaaaatgaaaacaggtgaaataataataataataataaaaaagaaagaaaaggggaggggaatctcattttgctggggagtgcacttcaccgctttatggataagaaagagaagtggtgatggtgctgaagtgtgtccaagtgggaaccccatatt

SEQ ID NO: 235871 - DNA, 1227 bp, Cannabis indica
gatggactaaataaattgtaaatgtcacatacatcaagaaatcaccagcaaaacagtatacaaattttgagaaattactgatatttttttttcatttccacgtattcatagaacgattaacatttcaatagtaatacaaaccatttggagagtaaatgctgagatgaattggaatattagatatttgcttcgattttccagttatacgatctgtctcatcttgaatctccttacgcacagcagctgcaaaatagaattaaaaccctcaatcaataaatggcacaagtcttaatcgagaagaaatgcccagataagaaaatgaactcaccaaaatcagtgtacttctttctaggagcatgaagaaactcagcatactcagtctgaccatcttcagtcttatgaagttgcaacaccagtggtctcctcgtaacaataccttgaaatcaagaaaaatggatacacatttcaagacatcaatcaagttgaataaaacagttaaaatactactcttattggctgctaagaaagattgggaaaacttgaaagaaaatccctttaggttaacagctggaatgcttaaaatagcaatagctttattcaaatgagttccatatccatacaaatgtaggctcaattagataaagttcccaatattttactaaccaaaatacagtaacagataaaacccttatcacattttacagttccttcactttctaagctaccaaacacaaatctttattgataaatcatccaaatggaaaaagaagaaataccagatccacgaggcaagaaatctctgcccactacgctttccaacaccgaagatttaccagagctctattaaccaatatataaaaaagcattaaaatccgagaaaatgaaaaagcattaaaaatgaagaggaaaagaagaaaacctggccaccaacaacagcaaccgaagggagagcttcccagagggacataccctctccaccatggtcgcccaaaacggtgcaagctcgttggatcttattgactaaaccgatcaagctctgcattgtcgccatcttttagatcaaatccaatgaagaatgaaaaaaaaaagtgattttaataaatttaggtaggtaatggatctgaaaacaaaatgtgagatcaaagaatggattttttcttcttcaaaacattgatcgatctgatgagtttaggttttgagatcgaatctaagagagagagagagaga

SEQ ID NO: 235872 - DNA, 1368 bp, Cannabis indica
atcaactagttttctaactaaccttatggaaaaggatttatctaactcacctactgtctctgttggaacaactcctaatggtgaggctggcccaagcacaactccaaatttggctcccaatcaggctgcaaatgttcaacacagtgccacaactatgcctacaaataccaactgtgagggaatcagtgccagcatagggatgttcattgtcaagattttccatgccaagagcaatatgatttgtggctcctgtatcagcataccattcgtgatcaatagcaaaatcagggatcattgatgaggagtaagcttgatgttcctcagagtgatcaaattctttcagaaaggctcgagaatcaccaatcttgggggtaacaaatcctttgccaaacctgtaatgacatacagcagcagtgtgaccaagtttatggcacacttgacaaatgagtcgaggattggtgtaggcatctctaccaaatggcttaggtggaacacgattgttatattgctaatttgaacttctgcctggggcataggagcgatttggagcattagttccatatcgtgtagggccaacagcaagatttgctaagattttgttgctggtatcagcaatagtatagtgtctttctaatctactctcatggattcaaaagaaagatcatcaacaagactagtaacatgaacagcaacaggatcgaattctgggcctaatccattaagggtatgcatgattaagtcattttcatccatgggattaccagcaacagaaagagagtcagcaagaatctttaccttgtcaaggtaatcagaaatggaaagatgacctttctgaatagtagatagctgagttttaatttggagaagatgagccttggattgacttgcatatatctgttcaagagcgcgccaggcagagtatgaactttggaattgtgctaaagatccaagaacggattcagacattgatgatcgaagccaactaagcaggagttgatccttccatttccaggcggtgaattaaggattggtttggccattaaccaatcgttcaggtggagatactcctccaagaaggatatcgttgagaccatgaccgataacacttggtattacttgagatttccaagcaagaaaattggaatgatccaatttaacggtgagagatgaatggagagaatttcagaatggattccatggatgattggccggggcaggagcagcagtggtgggtggttgaactgaagaacgaggtggattttctaggagtcgaggatccatgagtgatggtagtcaaaggaaatcttataccatgtaagagcttatctatgctcagaactaagacaattcaatctatgagattgcaat

SEQ ID NO: 235873 - DNA, 871 bp, Cannabis indica
gccttaaaactaaggctgaatgacaggttcgaactcaaagattaaggggatttaaagtactttctcaggcttgaaattgcaagatcaagcaagggcatatttgtgtctcaaagaccatatgctcttcaacttttagaagaacttggttatttgggaagtaaaccagtaagcacaccaatggagcctaatctaaagttgtcacaagatgagaaagacaagctggtcgaccctacaatttatagaaagatcattgggaagttgcaatatcttgtaattacaaggcctgatatagcttattcagtcaataagcttagtcagttcttaaccattccaagagctaaacaccttattgctgcacaaaggattctccaatacataaagtcaagtccaggacaaggtattttgcttgctgcaacttcagaaattcagctaagagcattcacggatgctgactgggctgcttgcattgacactaggagatctacaacaggtttttgcatttttcttggagattatatcatctcttggaaaagaaaaaagcaacacactgtgtcaagatcctcagctgaagttgaatatcgagcattggcaaacacaactagtgaagtgatttggttattgtcattgctgaaagagttgaagatagagcacaaaaggcctgccttgatgtattgtgacaaaaaagccgctcaacacattgcagccaatcctgtgtttcatgagagaacaaaatatatcgagattgactgccatcttgtaagggaaaaagttcaagaaggactaatcaagactatacatgtgtctactaaggaacaactagccgacattatgaccaaagccttattcctaatcagtttaaggctcttaagga

SEQ ID NO: 235874 - DNA, 2296 bp, Cannabis indica
ggccttttcgtgtctcctggttcatgagccaagaggtctaccgcgtggtcttctcactccatgttcaagtttattttgagcattcttcccctgtgccgccctagtcgaggctgcctcacgttccaactcagcgtttcgatgttgcgcttcttccaaacagcgtcttaagtgaaggctttctgtttcataagttctttctcccatagattgggcacatcccggattgtgctcttcattcctcgatctggggttctaaccattcccacgttgagttctcctcgagcgtgttgtccgtgtactagaaccaatgtcgggtcgagttctctgggaacgcgtggtctgcgcactagggccaccctcaatttgagccctcctagaatgggtggtccttctggactgcggattggtagatctttttggagcccatgggctctttcctagaacgatgattgatttcctcatgtgcggtgttaacattttctggattttcagcgatgaaggagatgatttttcttcgaaagaatggagggttttttcagagctttttcacggaggcccttaatgagagcaccaaactgttaacgcagattttcgttaactaaatttgagcctcacaatgatgatttcacacacaacaaataaaagctatagaaaagtaaagaatatgaacacagggttttttacttggtttggcagttaaaattttccatagtccacgagtcaatcttattcaaatttttgagtatgtttcagggcctctttcatatgagtttttttgtctcttttttaatcttttttgttactatttataattacatattggacattaaattataaagttgaccaaaataatgtgacagccatcatccctaaaatcatgggatttgattacatatcatgtagtgtaaatgcggtttatgatttaaaaattgtataactgttattttcttgcttttactgggtcaaaactatggtgtattaaacatttctttaactgtttaatccaaaaatgtctcaacagaaacttgatgatagtgatcccaatagtgagctggggccattcttccttctgaggtcgacaatgtttgtcttgtgtcgatcgcggttatttacaaagaagtcttctaactcgccagggttgtaagcctcgctcctgttagctggttgaagctataggaggtattcttatagcgagatggtcacctcgcttacttgttatttgagtcgattcgacttttacacttagtttgttcagtgtaagctaaggacttttatggttgatatgtgtcaccttcttcggtgcctctctattcgcatttagcgacatattctttctcgctaatataccaagtgtcagtttgtacattaattccacgcctaagaccttacagtcagtgggttacaaatatactatgacccttatgtaattaatgagttattccataagagcaatttcattgtaacacgttcccttcatcctgacacgtgtccttcatggaggaggcagccgatttttgggtataacatactgcataacgaaatttcgaatgagattttgtacgtaaattttttaaatcctaaaaaggattttacaaaaaaacttttttctctctatcacacaagaaatagttcttgctcatgtattgagatttatacaagaacatcatatgcaatttatcctagcagcccacactactccttgtgtgtgatggatcaatcttgaagacgatggtgtgagatttattggatccaacttacgagaagttttgaagatatcctgataatcatcaagaggtatttatttccttcatgcaatttatatttttgttttaatgtatatacatgtggagatcctttgatacaatgataatcagataattattattttgatgcgcacctatttagtaccataaaaacaaaagatgacccaatggtgaaaattgactcttaataaaaattgtccattttttggagtttggattgcgtccgtcagatcgtttttgggtaatctactacaaaattgcacctatgttgactgcaaatttaggacttgaaatattcaaaattgaaatatgggtgttacaaatagatctttgaaataaattcaaaatacaggttttatcacatcaatcaaatcaattttgagggagttatagtcgttttactaaaagttatttagcaccctttggctaggttaatttacaacccagcgcgtaggttgacatcctgacgtcaacctagacgctgtggtgggcgctaaaatattccacacttgcatttttgatgcctaagtgat

SEQ ID NO: 235875 - DNA, 2286 bp, Cannabis indica
taaggtatttatcaatttgatctgaaaaaacttgatactaatgatagtaatgaaggtataattaattgtaaaaaaaaaagtcataattaataaaaaaaataccttggatatttggcattgagaataactttctggccatattttctccatgcatggccatcgtcaatcagagttgaggtctctttcttcattgtgtgacaagtctttctgcaattattttaaaccaaaaaaaaaaaaatcacaaatggtaaataaagtaggggataaggggtataatcgtcataaaagatataaacaattacaactatgagttggaattttgaagcagcaaataggtaagcagcattaaagattacatccctaagaaaaagacgaaattaccctcccaaatatttttcttatttaataaataataattaccttctcttgtaagagcctctgcgatccttgatcaaatgatgttgatgatttgtagtagtgtttgatgaaattacagaattagtcatggaaatagtactttcctgtgaatcttcataatcagatttaataatcctaccctccaaagcagtggttttggaccgttggattttagaatcaacgtcgtagatctcatcatcagttgcatcagcagcagtggaaataacggtattattttttttcaacatgagaagggtattggtgaaagagtccattatctttgtgaggagatcttctgccgaaacagtgtcgttttgataatcagatgcggtagcgagcagggtgtggagttgattagccaaatcacggccttgaactaactcatcaatgatcatgatttttgtctcagctgtagaagaggaagatgaggatgaagagtgtgcattattattattattattatcatttgaagaaagaaaacccatttggattttggggtagaaataataaaaagagggttttttttttttttttttaaatttagaagtatatgtgaactaggtctggattagtgatgaatagaaagaaaagagagaataataataaggtggtgtttttgttttcatgatctgaatagggtttttattagatatagtgttatatatatatatatatatataaagtattgttatgttattaatatgagtatagtattggtgatttgattagatgcgaatggatatacattggaaaataatgagaaggtaagtggaaaattcctgccctttcacaccttcaatggataaccccacgcgcaatcatccccaccaccctcccacaccttccacctttcaactaattatattttacaattcaaaaatcatactataatatagagtattattaattgctataatctttattaactaaaataaggaggatctcatattgaattgtatcaatactttaattttttttgaaacaatactttaatttaatataatagcggagtaaataaattaatatgtatttaaattataagagctagtaatcagcgatatattcatattagtaacgttaatattataccttataagaatactagacatcataagtgttctttaatatttctctataatataaggtacttctataatttaacctatgtatcatttattgttcgacatttcagaaaaaatttaatctattttttatagtcagtgacagactcattactaataaaagtgtgggggttatagaaaaaaaaattgcattgaaaatattaaatactttttaatttgataattatactaccaaaaaaaaaaaaaaacccctacaaaattaaataaagtagacttagacattttttctatgataactaagtcctcacatagcaaaaattttaggtccgcttactatagttatttaagatatattcttgagaaatttaaaataatttataatatagaaacaatgtttaaagaatttatttcacactcgtataaaataaaagagttacgtatgtaatagattgtttgaatttatttttagcgtgttacatttttttgaattttaaaatttttaaatgactgtcttaaataaccataacgtagagaactataataaaataaactaataaataaaaaattatttaaggtgttaaaacaaataagagtacatcgtgtacttctaaaataccatataattttctactacataataagactaattaaagaaacatccatttcatttgatatatatacaatatatgagcgtttatatgtagataaatcataaatttagcatattaatcatctaagccacttgaggctagggtgtgtgttggaggtcttggttcgagtcccaaat

SEQ ID NO: 235876 - DNA, 2002 bp, Cannabis indica
ctaggtattgcgaatccatccatccttttgagtttataattcccagagcctatttcatcgtcaatctcgtatggggcttcctaatttggcccaagtacccgaactcttggttcttgggaggctgagaagaccctccttaggactagatcaccaatgaaaaatttcttatttttgaccttggagttaaaatattttgccaccttcttctggtatgctcctatgcgtatttgaagaatcctctcggagctcgtctactatatctagcacttcttctaaaagggcttaattttttaccggatcataggtggctcttctgtgggacgggattatagctccaaccgggatcattgcttcacatccgtacaccattgataatggggagtgtccggttgtagttcttgtagtggtccggtaggcccataacacatgtggcagttcctcatgaaaattatttttacagactaacaactttttctttagggtgacctttagtattttattaataacttctgcttgtctgttttcttgtagccttgcgactgcagagaaacttttgatgactctttgttggtcacaaaaatttgtgaattcatcacagttgaatttttttccattgtctgagactattttgtgaggcagcccgtatcgacatacaatgctttatacgacaaagtccaaggctttcttggcagttatggtcttcatgggttcggcttctgtccactttttgtaataatccaccgccactatggcatatttaccccaccctttcccgtaggtagggagccaataagatctattccccataccaaaaagggtcaggggctagtcatcaaagtaatttcattgggtggggcccttgggatatttccaaacctcaggcttggatcacactaaaggatgtagtctatatctttcttcattgtgggctaaaaatacccttgtcttaatatcttctttgagaggcttgggcctccggtgtggtctcaacaaaatctctcataggcctcttgcataatccgtctagcttcaggatccgacacacaccttatgtatggcatgctgagcccctttcgataaagaacattgtccatcattaaataccaatgagcttggtactgtaaccttctggacatgatcctttcttgaggcagttctcttgttattatgtacttaatgatggggtccgtccaatctgacctttgttcattggtggccattatttctttggtcgtgatgctaggttccgcaagttgctcgacaggtaccaccccaacctttctatcttgctatctaaggctatcttggctaagcagtttgcatgagcattcttttctcgtgggatttgctccaccttatattccttcaactcttagagcaactgcctgacagctgatacgtaagcgaccatcttttctccccgggtctggtattctcctgacacttggttgaccaccagttgtgaatcactataaccctctactctgttggctcctacagccttggccaatctcaatcatgctattaaggcttcatactcgacttccttgttagagtgtagcctcggaaagttgtgctcctgttacatatcttgacactcctgttgaaaaatatcctctgtaagccattatttgggcctcctgcaggttaatgtatttctggactctcttctaaaagtcttggaggctagccgatccttcctgttgtaacttgttccaaaagagggttctgttcggatcccggcttggagtagggccaactattgtccatcgtcaacctttttggtttttgaggcctcctccttgaacctttgtataaaattcttcaaagtctccatgggaaattgttttatatttgtcaaggcactcactgttaatcttccatgctaccacaaattgtcactgaatactaacttgtaactagttccaacagtctaccgatcctagctccaatttcttgaaccattcctcggcagacccgtttagcgtcagtggaaagcata

SEQ ID NO: 235877 - DNA, 1126 bp, Cannabis indica
gattgtaatcagaagggaaatacgtccctgccaagtttatagccctataaacaatgattcatactcactgggcaaggggtcgaaacattttgtctaagaatttatattcagagacattgttgtaagagttctaagaaaaggaaccattctccttattcttaagtcaatacaaataacgaggattaggctattaccgaactacccagggctgaacctctataaaattcttgcgtctttatttttttttttcactatattacactcgtaataaactacttgtcgcttacaaatcagactcattatcgttggctaaaagtgagatcaacattttagtgcgttcattgagagctgaactcaaggatcgctctttatctcaaatctaatcacaagtacgatggtggtacagactcgcagaggcgtggttgatccagcaaatccacaggcggtggatcatacactgtagaaccctaagaacacaagggttttgccaatagtaaatccccgacagccatcaactgtgggtcacggtgtgacaactcctgtgagtgaaatcacgtcttgcgtgcaagagactgggaataccagtttagtagccagccagggcattcataacacagtcgttcctcccgttaccaatcttcaaacgaccattggagatgacactaaaatccagaacctccgtgctgctcttggaatcatgcaaggtcataccaacaccttgcaccatgataaggaagaactctgcgctacggtaaatctcgcatttgaagagcagaggcgcatgttcgccgaatggagggacaaggagatggaaacgttaagggccaacaagtggtcattgatgatcgtagtcggcatgccactatgctgatgcgaaaggcctatcagactgtggggcaacaacatgtgactgtcatccccttgggcaaaacagacgaagatccagcggtgaatacctctctgactataaatggtcagccgccaaatccccagtcgcaggttccacctgtgggccaagtggtaggtggacagacctgttctagtaattcatcaggagaattgatacccaacaattccaaccaagttgatggtgtcggtcagcgaattggccaaaccaatcagtcat

SEQ ID NO: 235878 - DNA, 1056 bp, Cannabis indica
cccctaatattttctcctggctccgcccctgagtgatggggagtgggaattcatcttttgggcaagcccaattaagatctctgtaatccacgcatatgcggagttgcccatttttcttcatcacaatgatgatgtttgcaagtcaaataggatacttaacctcccgaataaaccaacagtctcttaacctgtcgctaatatataggattattagcgacaggtcccactgctaatgctccgctgctaataataactcaaacaagttgggcaagaaaatttcttgcctagttattagtggtgggcaataaccgtggagcccaccgctaatagtttttttttatttcttttttataaatcacaaaatattaacagcaaaatctaatttttgccgctaatacccccactatattagtggcaatttttgtccaccagtgaaattctgcggctaatgacaataattcttgtagtaggtacttctgtgcttgagacattttcacctttgggttggctgaaaaaatgagagttcatggcactgggatttttgatggtggttttccatttactagagaaaatttttgaagtgtttgaagaaattatcgaaaaaatttctggaaagaaagttgcttcaaagagaatttttgaaaatgattgtatgatcacaaaatggtacttcataataagccttggctcctatttataggcccttccattcacaattaatacatattaaacaagtattcgatcattataaagaggtgtttttcaagagaggagtttccaagacaatttctatcttcatcaaagattttattcgttgatcttgtcaagagtttactagcatgttaagggctcgttgctccgctcacccgctaaccacaaaaattattgaaatatatacccaaaaattaacattcaagaatttaagttaagaagttaagtcactacaagaaatgtcacttttaacagcatagttctctactgcgctagtaaaagcttttaccagcgcatttcgcaaactgcgatggcaaaaatgtcaaagttttaccagtgcacatt

SEQ ID NO: 235879 - DNA, 1562 bp, Cannabis indica
ccacccgattcattccttattttaatgagtatgggcagctccaagaccagaatgtggagtatgaatggcttcctgcaaagtgtgcccaatgttctaagttcggtcacacaaaagccaactgtaggcatgaggagattgttaaacagaaggcagaaaaacagcaacacaagcaagagatgaacaaacaaccacagaagaaagaatcaaaggcaaaggcagcaaacaaggttcaacagtaatgggtggttccgaagaaaatagtaccagttgcaacaaccagtcaacctggaagtctgaagaagaaggttgagagtagcagtaactcgtttactctgttacaagatcagaatgaaggcagggtagagatgcaggtatctactgaacacattgattctgttattactactactgcctatggataataataacatagggtgttggaatgtgagggggctgaataaaatggaaaagcaaaatactgtttttgatttatgttgcttgaataaaattggagtttgtgggttgttggaaaccaaactcaagaatgataaaataagtgagatgatggctaggaaattctctaattggaattggtatactagtccgatagttgagaacagaattctggtagtttggaggaaaaatttcactcgagtcattgtcgttagggaagaccctcaatttattcattgctatgtgaaattggcgggttattcagaagctatgaatgtcacttttgtgtatggctttagcacaggtgaggaaaggaaggagttgtgggagggattgatcaatctcaaggtctatgctaaaccatggctaattacaggggactttaactctctttttgaattggaagataggaagggtggcaaggaagtcaatctaaatgatataagggactctaccaattggcttgcacaaagtcacatggatcgacctcttagaactggttcggggtttacttggacgaataaccaagaaggggataagaggatctattccaaaattgatcacacctttgtgaatgaagattggaatgatagctttcccttgacaaaagctcactatagttgggagactacctcaaatcactgcttgtgtgtggtttcaatgacaaccaatgtggatattgggttcaaaccgttctggtattataatttttgggcagatcacccaaattttaaaaaagaggttcttgataattggcacaagccaataggaagagagggcatgacaagtttatacttgaaacttatgagattgaagcacacaatcaagaagtttaatagagagagaattggggatgttgggaggaactatcaaatagctaaggacctctatattcaagctagaaatcaagctcaggaacacccgcatgatattacctatcaaaaaaccgaaacagaggcagcaatgacttttaacactcaagagaagatgtatcacagttttttgagatagagaagcaaaatcacctggttatgtaaaggggatgagaacaatgcctttttccatgctttcctgaaaaaaagaagaatggaaaacaacattgtttctta

SEQ ID NO: 235880 - DNA, 1188 bp, Cannabis indica
acctaggacaagtgggctaccaccgaggcaccctacatccttctcgatccgagagggaaggtgtatagatgtatctaaatagaggacgtgtatcaaacctcttccgaaggagaaggtcggtacaagacgaggcaagttctagctcgggacactcgaggtcttgagcgcacagtagatcaggaaggcaaatgcgagaaggaagtagacctcaatgttatgttgatcaagaaagcatgagcaatacgagaagttatcaatctgagagttactcagatatgagatgcgtgagcaattatgtgaacatttgaatcgaagacaacctgatctttgcgagcgactaaattagaatgcaccttaattacgccatcaacttaatgcaaattaacaggaagtggatcccatctagttgcaaatcattgagttggaggataagtttagaaaatatcaggatggagaatatagaaaattaccaagatataactcaaatgaggaaactgagccatttcatcctgatattatgaattctaaattccctcagggattcaaaacccacacgtatcgcagtatgatgggactacaaacccagtcgttcacttgaataacatcaaaccatgatgctagcgagcaacgtctcgaataatctgcgatccattttattcccaacttcattgactggggcagcgagtagctggtttgataaattcactcaccattcgataacttcttgcgaacaactatccaaggactttaagaaacaatttcaagctgccagagataggcgaccaaaagcatcatccctaactaacataaagcagcaactagtggagtcacttaaggcttacctgagtcaattcaatattgtcaatgcaaaagttagaaacttgaatgacattattcaacttactgctcctcaagcaaggatcacaaccgacctttcaatagctggggcgacctgtggggtgacttacaaggtcgtccagtaagatacatttatgaattcaacaaaagagcgcaagtgtttgtgcacaaagatgaaacaagaaatgagatgaagttgttgaagactgactcgggaaacaaatccaagacaagtactaccacagcacgtattgtctcgacaaaagtagataatccaagttgttcgaaaatcaaaagaaaagatgacttgagagaatcatctaaaaataa

SEQ ID NO: 235881 - DNA, 1475 bp, Cannabis indica
gaagtataataataaaagaaaaaacaaataattgctcagttttccaacgttttagcttgtgagagcataaaactaaacctcacaattttagtaaaaaccaaaggaatatcacattcgtatttgtagtaggtttctacccaatacacattcttccaactttattataacaaagcaatggaattaagtcaacctttttaattaaaacatttgataaatactaggttgaacatttgtaccagactttggcctcaccttaccaatctacctgaacttgacctgtaaaacccaaaacaaaagaaaaatctgttatttacaggcgagccagcttgaacacgttcattatacaactgagtttcacgtctacatttttaaatactcacggatcggattgaacctaaacttgcgtgtgtacacaaattataaaaatgcatatacataatggtgtagagaatagtagaatatacatacaatgcactcaatactaatgagacgcagctaggggtgtgcataaattgatctaattcaatgacaaccgaccgattcaatccaatgacaatcgactaattcagctacaaccgactgctaaacgttggatattcaattttgattggatcagattagatgttatttttgaatatctaattggatcggatcaaatgttggataaggtgtctaaaaatctaatacatccaacatatataaatagtatatatatatatgcatttaacacgtatcatttttgtcagcatttaacaggtatgttagattgggtaccgacaaacttacaaaaatagtgaccttaggtactattaccgctaatttttgaggtttgagacttatttacatcaaacataggtttttggggacttatgccgcaattttctctattaattattacgaccaaaatttttaatacaatgtaatttgtattatttaatacataacaaatggtcctttgtattataatatttacaaagaatcggagtcaaccccaatcttcaattcgaacccgaacctagactcaacttggacctgaacccgaacgtggatctgaacccggactcaagatccgaactcgaaccctcacccaaacttgggactcagacccgaacttagacctagactctgacctcaacgcgaacgcggacctaaacgcgaacacagacccgaacgcgaacacggacctggatgcgagctctggtcaggtgaaaaaattaaggggcagttaaaaacttctaaagagaaatcttaaaaaggaatagagagaaacactggtttataatttttcgttgttgcaaaattttatttgtacataaaacttaaggtgattctacaaagcaccttgtttaacgcccaaatgtgacttccactagcggtggttgtagtatagatcgggcggtcgattccacaggaaggtgattatggacaaaagcgttagtagaaaaataaaaacaaaaggttaataataagtgata

SEQ ID NO: 235882 - DNA, 1227 bp, Cannabis indica
aaatcacgagaactcaccgcggccagagcagcggtgatgtcctgaacctggtaaacagagttcactgaggcacaagcagcgtatctcttggttgggaattgagtccgatgggagacaaactggctggtcatcttcgaggcgaagggggaaagagtaggactgatgaagcagttgaacaagtccgtcaggggtccatgttcaggtcccaaggattcttgaaggcgtccgcgcgcaaggtgttctgttgctcctcccgtaggatcttcttcagggcctccacctcagcatatccctgactgaactcatccagggcgtagttatgtttggcgacgcggagcatttgcctttcctcatctgcagggactggggtgagaacgataccatgcagcacagtgttctcctctgcttcggaaggaatcccggagtcagtgctaacagccggagtgtccctcctctggggccgcttggaagactcggcctcaaccattttacgcttctgcttgcgctcgagggcggctgcaatctcgccctcatcctcctcgacttccccctcctcgtctatcaagactgttgtgcctaaaagggcactggacaaggacctcccgggagtcaccagttggcatgaagctggaggcagagaagcatccgggctgtaggcctcagtgagggtagccagaagatcttccattggcttggctgctgcaacaaagaaataaacaaagtgttagaataaccataagaaagcatgcgcccaacaagaaagcaataaagctaatcctaccctgactctctaattcagccctagcaaagtcttgaactacaatgctggctttgtcatccccaagaaagctgtcggaggggagaaaccagctggaggacaagtgggctgaatgatccaggggaatgggcgcaggaagtccagagcccatccgggaccgacccaagaaatggcctaagtggcatgatccccccaccgagtggaaggcatcctaacttacaaaggtgctcatcaaatcctacgggcctacattaattatactctcagacataagggacatggtgaataactaaaggagacttaccggaacctgaagtattggcatctggagcaccagtgttaagaaccggaaccaaaggcttggtcctggagggcctccgctccgaggcagcttctagacgaagggtcctcccggctgcagcctgggccttgatgtaagccagctcctg

SEQ ID NO: 235883 - DNA, 1010 bp, Cannabis indica
ttagggagtaaaaatactaatttgtcttgtttttttgtataatatttttatataatttgcaaaaatctaatttaaataaatattttctaaaaatgatttactaattccaatttcaattccaatccgattctaatattaattacccaaaactaatacgtcatcacgttgatcctatctaagaattattttatctaaaaaaaacttctaataagttagtgtaactctcacattattatacatgactataaataattgtgcttttttttataagaaactagagtttagactagattagttcatttgttttgtttttttttttcttttctgtaagttgaaaagcaagtaaaataatggtaatttatgacttatgtattagatttcaattaataaaacaaatttaaatttcattaataaaaaagatagaacacaaaataaaattacaaactatatatatgtagttacatacatatatatcaaaaggacatcaaactatttaatgcttaactgttggcataagctgattataataccacagtagcaaaaaataatataataccactatccaaaatcataccctattacaccaaaatagtttctaaacagataaggaagactagggtggacggtggaaaatactgaccgcatctcgcaactgttcaggcatcctctctactacactcaatagccgagtcatggattctgcggtaatttcatatagctggatgtattccattgcactctctattgctgagataccattgtgcacgtgttggaggtaaacttcttgttgaggtgttaacggagcccgaatactaaatctccaaccatttacacttgaccgggtaatggtaatcatgtctgtaggcagcggggaagttagaggtagttcaaaacgtcttctatgtccatttggaagattatgaacttcaggacttcaacttcgaactcaggatgcatgagattggttctcagagttgctagatgagtcgttgctattactagatgaaccg

SEQ ID NO: 235884 - DNA, 964 bp, Cannabis indica
aagtcccggcaacggaatttttgttaaaatagttagtcttattttaaataaatataattgttaaaaaaattatattattgtatataatgtttccttgcattgcatgtatattttaaatgcacatatttttttttagggatgaggcaaaagttttcaattaaaagctactagtatatgtatatttttatctaactctatacatatttttttaaccacttgaggctagctcaagtggccataagaggatgtgtgtgttggaaattctgggactcgtatgtaatgtaatatataaatgtttaaattattatttttttttattttttttttctaaccgatagaacaacctcaacccatataatgtaaaaatgagaattttttttataagatagaaaaaatcaaccataaaaatttaaattttagtattactaatttataagtaatacccattaagtagtgtttacaaaattatatatgaaacctaaaattataaatccccgtcgaatataatttataattgtctataatattataatacaaacttgacatatacgtgtgcatatgcattaaatttgttgttctcttttaaagttttttctcctgtcaataaaaagtaatctcgctctaagcgctacgtactctaatcaaattatgcacataaaaaaccataaacattttaatttgcttaagagtacaagtattccggttccactaaatgaagtatattgttgtcacaagtaatcgcagctatatctattgtcaatataggtgatatcttgttaacaaattattatgagaagcttgcgtataaatatattttagtatggataatttacactaaattattttacaattagcgtaaggagcaaagaaactgaaagtccgtattttaatattcccagtttaattatttaattaagtgattaattaaatgtggaataatgaaactagtactgaaaacagtttt

SEQ ID NO: 235885 - DNA, 681 bp, Cannabis indica
aatgataagtaaaaacatcaatatttcgataaatgtgtaattcaatcattattatgggaaccttcatcctcttaataacttggacaaaactcaattaaactaacagttaattgagtctcatcaagaaaggtcaagcaggaaaggtacagccactcagctgaaagatatggtttgtggacagattgatgagaggggaagaattcagatatctgtccaagaaaacaacaattacaagcatttccaaatcaggtagtgatgattattgattaacatcaatatcatctaactcactatctgatctcaaaacatgctctctctcttctgtcatcctacagatgtaatggcatattttcctattcaaaattctaaacttggtcagccattgaaccacaatggccatagctattaactatcttgttcaggtggtctatccatttagttatagagtataatattcagttctcttacttgatattagagaatgagggggttgcatagctcgaataaagtgaaaatcttgttagaatcaataagtataatgtagtagtaccttgttatatgttttgttctaatattaatttatcaggttgggttgacgttgaagtcatatgatacatggttgtttccaagttttggatatatatatatatataattatatctaaatttattattattatta

SEQ ID NO: 235886 - DNA, 1787 bp, Cannabis indica
aagaaaaataaaataaaaacaaactttaaattgacagagagaaactcaaagtgaataacaagccctaagttccaaaattttaagagtataaccaaccatacccttcaaaatttcagagcataacaaagcttcgacattttcaaaggaatgtggaaggaaggtagtcattggagaagcttcacttgaaagtttcagacctcacaaagtgggttcttattttggatttggggacaccatgagggaaataattccatcttatggtatgacttttatcattaattattcttataccatttatgtatgtctaacaccatggatgaatttttctctgtgaatgatggttttatttatatgtgtaaatacactcgtaccaagagctccattttaaaggcttcaattgttttgtactgagaatatttggggttatgtgaatgtttttaaggcatttcttttttcattttgtttgatcgtatcacatgggaaaatagtgaaaattggaatatgtgtttgtggggtataattttgttagtctttgagggtactgaatgaaacaaacaatatttttctagttttattgatgtacatatataatataggacctattatatacgttgacatgaaatttttaataaaaatttatggtaagactataaagtgttagccacacattttgttgatcaagaattctattaactaattgaaggaaggttttgtgtgtttgtatttgaattgtatggtgaattgacgtctctaatgggaagagaatgtacacttgctttgctgatttgagagatggaatcaatgctggatgcaggccattgattggcttagatggttgtcacataaaaggaccacataaagggcaattgctaactgcaattggaatagatgcagacaacggtatttatcttgttgcatttgctgttgtcgagattgaaaataaggagacatggaactggttcttacaatgtttaagagtagacttgaaaatagagaattcaaatcattggactttcattacagataaacaaaaaggattgcaacagtcattaaaggatatgtgggaggaggggtacctgaagccgagcatagacattgtgcaagacatttggagaagcattttatcaaagtgtttagagataaaaaattaaaggacctcttgtggaaggctgcgagagaggttactattcctaggtttcaggctgtaatggaagagataaagcagcttgataaggctgcctatgattggttaatggaagcaggaccccaacattggagcaggtcacattttaggactcatccgaagtgtgacattcttctgaacaacttgtgcgagacattcaatgggatctcagcagtattagtagcaagagagagaccgatattgtccatgttggaaaggattagaatttatctactcaaaagacttactaggaataggcattcgacattgaagtggtagtcgaacattgctccaaggatacaagaaattcttgaaaagaacaaggacatagctagtggacatatctcattgaagtcttcagactttatctaccaaattcaaaccatgcacggaagcttgtattatgtagacttgaaggagatgaaatgctcttgtagaaagtgggatctcactggaattccatgtagtcatgcagtagctgccatatggaataaacatggggaaccagaaaattatgtaagtaaatggtacacaaaagagtattatttgaaggcttatggacatcaaatatttccaattaggaatcaagatcagtggcctaaaa

SEQ ID NO: 235887 - DNA, 1089 bp, Cannabis indica
ttcctaacatgcacgctaaaacatgtaaatacatatgcatactgttatactaatcttacctcgattctgaatttaggtgcgctagtcaacctgagtggaacaatctgctcgacgaattacaggctcctaaatcacatcaatcacaacactgataagtgacacgctaaatcacttcccggggacttaaactagaaactaaaagttttcctatcgataaatagcatggcaataccctaaataacacaaaaatgggaaaaactagggttcccgaatttgccccaaccggtagatcgattccccaaccggaattctagttttgggaggaaattctagaagccaatcggaattccggttcctacaggcctctctaaaccggaattccggttcagtgcaagaatttttcaaaatttcatttctcaaccaaatcaacctcaatccaaaccaaactttccagacctgttctatacaacctaaagaacatttctaaagcaataaaacaaccacccatacacagaaacacaattcaccattaaagctccaagttttgagttcaaaactcaaacttggttaaatccagctaacatgcaacaaaacctgtcctaatccactcagttaaacatatttaagctttagcaaacaacaataaacaataacagcagctacaacaagcaaatcctcaaaacatgcaaaaattacttttccttacaactcaagaaatcaagaacaagttgcaagaggcttaccaagagcttgagatcactagaatcttgttaaaaccaacatgagaaaaacgcaaagaatccccaaccctagctgctctaggccgaaagagagaaagagagagcttgagagtgaaaatgagattttgcttccttttccaatttttgtaaaatcaaattaaaacttaactttatttgaattaaatcagctactaaaccataaatacgtgatttaaagaaataaattaaaacctcacaaaggacaaaataccctatgggtaaaaagagtaaaatgcccttgtcctcacaaaaccatactaaaaattactaagggtattttggaaaactctaaattcccgactaatctcga

SEQ ID NO: 235888 - DNA, 955 bp, Cannabis indica
aaatctcacttattgcgactccacgtcggttggctaaaaatctagtcaacactagtaaagcaccagctgagtcataaccgtcactactcactgctgcatccccttgagatattgaatcacccgtcttatgcctttccggacacgcccgtttgagatgttctattttcttacagatccaacatcaaagattcttctagttattagactgtgatttagatcttgattttacttttgaacctttgtgactttgtcttttctcacttctgccccttgtatacaatccatcaccacttccaaatttttttgacacactcctttcattcagctctttcgaattcaaggctgattgcacattattgagtgtgatcgactctcttctatatataaaacattgtagctttaaagtgcgtaaagaactgagcaacaacaaggcttgatcctcattttcaatggaaacaccaatattttcaagatcaagaatcaacttgttaaactcatcaattcgctctcgaacagacttgtcttccatcatcttgaatgaatacatggtttgtttcagatatactttattcaccaatgatttagtcatatatagacttttaagtttcagccacacacttgcggctgtatatcttcttttacaacctttctcagaaccttatctctaagattcaaaatgcactatgagccttttcaagaatctcttccgtgtatttttcaaacatggattaagaagagaattttctcctagtagagcctcatacaacccttggtgaaccaaaagatccttcatcttcatcctccataatctaaagtcatttctactagtaaactttttgacatcgtatttcacgacagccctgattacaaatcaatgacttacacaatgacttacaattcattttatagtaccaacaaacacgcaacacaataaaaaaataatataccaagagat

SEQ ID NO: 235889 - DNA, 1462 bp, Cannabis indica
cgatgcctcgcctttggatccttggttaattgtgggtgactttaatgagatcttctctcattctcacaaaaactcgggccccttacgatctaacaatcaaatgatggatttttgtaccacacttgatctctgctctttgcttgagttacctttctcgggttcacctttcacttggacgaaaaatatacgaaatccttaagctttacaagaatgtcttgactggtgctttattaatagagtatggaatgatagcttcaatttacctcacgtcactcatcttgattactatggttctaaccatagagctatactcagcaaaatcaacctgctgtctacaaataatgctgtccaatatcgttctcggttcagattttagaaaatgtggatcaaagaagctgactgctcaaatattatttcagattgttggcaaaattcacatggcagtcccattgatgttttaaacaaaaatctctcctcttgtgctataatttaagatcatggcatcgtcataaatttggccaactcaaacagaagatatgctctgctcaagctgatgttgcagccctttctaacattccaactccatctccaacacatgctaacccagtaccaaaagccgaatccatcttagatgaattacttgctaatgaagagaaatattggcaacaacatgcacgtgttgattggctgcaatcgggggaaggaacaccaaatttttcgactcgaaagcctcggcaagacattcaaataaccggatcaggtccttatcagatgaaaaaggtactgtgttcaagttaacaaatgacattgttgctatagttttcgcatattttgaaaacctttccaagcccaaaacgaagatcattgggcgttgcaacatgtgcttcatgtcattccctccacggtttctgaagagcacaatatgttccttttgaaagagttctcagccgataatgtttatgaagccttgaaatctatgaatggagatggtagtctgggtattgatgggatgtcagcattgttctatcaacacaattggcatattgtgggcaatttagttactcaagcggttttgcatgttctgaatgatgggggtagtcctgaagctcttaacaaaaccttaattactctcatccccaagattaaaaaacgaaaaccatgaaagactttcgccctattagtttgtgtaatgtggtttacaaactaatttctaagtctttggtgatacgccttaagtcaattcttcctcatatcatttcggagacacaaagtgctttcttaccaaactggctcatcacggataatatccttgttgcttttgagttagtacattgtttgaaacataaaataagaggcaaaaaagggttttcagctcttaaactcgacatgagtaaggcatttgatagagtagaatggtctttcatagccgttgtgataggaaagatgggtttcaatattcgtt

SEQ ID NO: 235890 - DNA, 1269 bp, Cannabis indica
aggatgttaatgaaacatactaggtagtaaatctagatcctggtaaaatatttccaacacagttctcctgggccacgggaccctgcatgacctcttccagggtggccagttgaaccgcccccttcctggaagacttggaactggacgcgaaagtagacattttggttttgaaaaaattgagaaaatccagcagttaggccccgaaacaaaccctaatgtttaaaaaagggaatgggggtcccctaaccgctagaaagagaccccctccggacgcttgccaaataagaaatccccaagaggctttcctttgcaagaatcgggtgcaaaaatcccaaaggcagtgacattgcaaaagaaaaaaaaaggaaaaaagggcaaagccgagaaagcaagatctactctaagccctaaaggcgttatcacgtaagataaagatgattcctcaacagaaacgtagtagaaaaggagcaatcaagacgcaaaaaagggaaatttaacgcatcatacagtaaactcaggcaaactcattcccagaagttcgacatccaacccagaaatcataaaacatgctatataaacgaacagtaagcaagtataaggtatacgaagaacttacatgaagtttgaaggctggggttggtgttgatcgccggtagagtgaagactggcaacggcgaaggaagagaagcaagtaatctatggtgtctgaaatttcttttctctctaaaaactctgagaaaatttggtgaaatggtgaaagtaaccaaatgaagtgagaaggctgccttttataggccagaacaggtgtgagatagctgtgatcgaccaccatcgtacggtcaggatagaaatcgattcgcattctacagatccaacggttgagacgagcgttcatcaaggcggtagaaaacgtttgagtactcaactgacacccatttaatgccccgtatcaataaatggacagaaaacgaatcgttgtctgcaaaaagtaaataactgcagtaatgatggtcataaatacatccccacgcgccccaggcacttgccaggaagctaataaggcaactggaggcatctaagcaagccttgtttaccttattaccaaacaaggcatgggggataaatgttgcccctgactttgtccaaaatacgtggaccaaccggattgagacgcgtagactgaagaggcaagactttgggataattcaactaagtctttaatcaaagggagcagcatttaacatgttggaatttattttaccaggatct

SEQ ID NO: 235891 - DNA, 1227 bp, Cannabis indica
attagttgtactatttacttttagtttttttggtttggtttttagaattttatcatgtagtttgattttataattgttgcgtaggtttagttttttaatttttttagttatttctcaacaaagtatatttttataattttaaaattttaaaaatgtatttttatgattaaaattttatgtcctaaaattataaataaaatatatataaaaaaagaatttttaaaaaattcatttatacaacagttgacattttcatcacctctgacgtaagaattcgtgtaatttttgaaacataaatattcgataccatacaaatgaattgaaatattaataaaataaaactcaatgataattgattatgctatgaggaatttatattattataaaatataattctttttgtataattatgccagaaataggacgagtacttccattagctaaattttttcggcataaatacttaagtttaatttttggcggtaataatatctaagttataattttagaacttttaatggtaggtacctaactgttaagtattaagtaaattgccacatgttaatttctgattggtccaagtcattaaagttttatttttttttaaaaaaaataatttaaatataccaataagaaaatgacacgtgaataataacttaattaatatttaacagttaggtactacagagttctaaaaatataacttaagtattattacagctaaaaattaaacttagtatttatttacaactgcgaattaaacttaaatatttatgccgcaaattactctaaataaaatataaaatattataaattacattaattagtgagaaaagaataaataaataatgtgatatttattgtggtgtaaatttagctcatattatattttgtgctaaatttagtaccaaatttaatccacattaattataattttaaaaatgtgctaaatatatatagcattttattggagatggcgttcctaaattaattattttaattcaattgcatccttaatctttccaaattagaacttgccaaccccataacttaatgattgaattagttttttaaaagtcactttttagggttacacatgtgccgattttttcttttctagaattttttaaaggatatattcttaatgatatatattcttgatttatttagcactatctttcacgtgagcctctatttttttttattatatattttttttagggtacg

SEQ ID NO: 235892 - DNA, 1256 bp, Cannabis indica
agcatcggttggtttggtcggttattttctatataaaaattcaaaattcgattttcgatctaaattgatccaatccgagaaccgaccgaccaatccagaacctatcttaaaatcgaccgttttgaacctcggtttggtcggtttaaaccgcctaaaccaaacttcaatttattctataaatacataattctacattttacaactacaaacatacaaattaattatcttattcttttaagtttaatataataaaaaaatatattatttttatatattataatacatgcaagaaaaaaaaaacttaataaattaatatatatatgtataacggtcagtttcaattttttcggtcggtttattacctacaaaaaactgatcgttcaatggcggttttaaccgttaacagttttttcagttttcgatttcgtcggtttcggttccaacggtgttcagtaggtcggtttaaacggtttttcaattttctagattttatgctcacccctaccctcgagctgaaactcgcaccctcctctttctgattacaacttccacgagtgccccagagagacctctatcctcctcggggtatgccgttgggtttcatcctgttgtgtttcatctatctattgccaaatgaaactagtttagtctattcttttctaatctattgagatatgtaaacaaatttatgttagttttgtggtactaattcaggtacgcattgaaataaaagtttttgattatcatcgtaccacatcttcaggatcaccatatgtatatacattaaatatgaaataaatagacgaaaagaaaatttaccttttaaagcctatcagagtattcttgttttttttttttctgtaagttgtatccttagatgatgacgaagaactaacatcgtagtctcccgaatcttccaccacacacaagaactagtgtaggctagtaggatataaattgtatatgatattcttaatttttttcaacacattaatcagattaattctttttaggcttaacaaaataatttgtatcagtttttgtttatatggtatatttaaattaaaaccaataaaaattttatttactgaattatttaaattcaaataatttattaaatatatttaattatttgaataaataatataaccgaattagttatagatatttattaattataacttattaaggaaatatctcaaccaacagaaatatctataactacttttcaaatttaaatttcaataaatatttat

SEQ ID NO: 235893 - DNA, 1442 bp, Cannabis indica
tagatgcataggcaataaccttaccggactgcatcaaaatgcagcctaacccttattttgagacatcacaaaatatcacaaatttctcattactaattggcaaagttagtagtggtccaataatcaatctttgtttcaactcctggaagctactttcacacttgtcagtccaaacaaacttacagttcgtttgggttaattccgttaagggtgtagaaatcttggcaaacccctccacgaatcctctatagtatcctgctaatcctaggaaacttctaagtttggtagaatcttcaccaagtccaccagaatgttgtccttattcacaacattccctaagaagcttacttggggcagctaaaactcacacttcttaaacttagcatagaattcatgctcccaaagacgttggaacaccatccgaagatgtttttcatgtgcatcttttgaatcagaaaagatcagaatatcattaatgaagacaattacaaaatcatctagaaagtctttgaacgctcagttcatcaggtccatcaggtccatgatcactaggaattcatagtgcccataccaggtacgaaaatctatcttgggaataacctcctctaaaatccttaattggtgataaccagatcgaagatcgatcttagagaagatggtttttgcttgaaattgatcaaacagattgtctatccttggcaaacgatacttattcttcactatcaatttattcaactcctaatagccaatacacatccttagtgttccatacttttatttatgaacaaaattagtgcaccccaaggtgaggtactcggcctagtgaactgcaaattcaatataccttgtaactgaacatttagttcttttaattctgcaagtgccatctgatataggaccttatatacaggctctgtccctggtatcaattcgatctcaaagtcaatctcttactttggtggtaacccaagtagctcctctagaaagacatctagaaactctcgtaccaccggaacgtgttcacgtcctattagtacttccctcgtggtatccacaacactggctaaatagccaatacatccatcccataacaaatctcaggccttgagtgccgagattattggaactcgagatccttgaacccttaagttctcaccctcgagttcaaatgttaccatctttcatttataattaatggttgcattaaacttcttaaacttagcatagaattcatgctcccaaagacgttgtaacaccatcctaagatgtttctcatgtgcatcttttaaatcagaaaacatcagaatgtaatcaatgaagataattacaaactcatatagaaagtctttgaacactcggtttatcaggtccatgaatgccactggggcattatttaatccgaagaagatcactaggaaatcatagtgcccataccgggtaca

SEQ ID NO: 235894 - DNA, 665 bp, Cannabis indica
tctggtagtctttgaagattatagcacttacttagatttaaagtttgtaggttacataaatcacacaatgactccggcaatatcctcaaattggaattgtttgaaagatcaagatatctcaaatgtatcaaagtggaaatattttggggtagattggtcacacctggagctggaagacataatgttcgaagaccttttagattcttgacaatgaaatcataatcaagtactacttcaatgtcatctattgaaattacaagtgtacgcaatttcctttgaacatctcttttgatatccttcaaaatgagaactttgtctgaggaatttgattttacatttagcaaattcaaatgagaaactttatgctccaaagacttcattcctagtttgatgtcgtcacattcaataacaataatcttactttttgctaaaaattgagtgaagtcatgcacaatatcatgcatttggtaataaagtcttggatcaaagaaacccgatgcattgaattcttgaaagtattcatcaaagaatgaacgcatgactaaactgtcgaaacactcttgacctgttttcgaatcaccaacataaccttgtgacatccacatgtcaatcaatgtatctctttcaaatctatagtcttttggaaatagggaacaataagaata

SEQ ID NO: 235895 - DNA, 534 bp, Cannabis indica
tgcacttagagtgaaatggtgaattagtttagatgaaagatttttcttctttttttcaatgtattcaacgcaaaaatatatttgttcatggttaaagaaaataaaaataaaaaataaaaataactcctcgtggcctaagcgttttttttttttttttttgaaaagaactttgatccattaagaagaacatcaagtacaagatacatgatacaattaattttggacagaagggctcatccataaagcttcctgctctaagcctaaagctgtcttagctaaacaatgggcagcataatttgcccctctcgggatgtagctaagagatacattagggaaataagaaagcaagcttttgatttcaatggcaaaagggttaagatgcagattatgagtttcctttttacaaatataattaactaacacattacaatctgaaacaatactatccggataaaagaagtgttcatggcaccaagatatagccgagtaaagtgcttgtgcttgttgggttttatgccctaaataaaactcttt

SEQ ID NO: 235896 - DNA, 906 bp, Cannabis indica
atattaatatactaaaaaaaatacaaatacatttataagatataaaatattaataaaaaataattaataaattaaatgggtccccgtcggggcggggagtgtcatccccgtccccgccccgtttaacattcggggacaaaatttgatctcgtcctcgccccgtttcccgtttagacggggcatccccaacctattaggggcgggtccccgcggggcaccatccccatggggaaaatgtgcatccctaatcctgacaattaatatagtaccgatactgatagagtatctcacctataaatataaggtctcagtccctaagttcttcactcattttgttccaaacagcaaaattccatctaaagagagttgagagaaagaggaagcccgaaatccaaaactcaagatatcgcagggattgaagctcaaacattaatggctgaaggtatttcgatcctttcgttacatatacattttcgatatgtttacagtttattcaatatcacatattgtttatacatactttatctttcatattatattaaagtctaatagttagtatgagagcagtttttatctctgtcttgaatttttcaagttttgtttttcatatatatatatatatatatatatatcataatatatacatggtgttttcctttatatattttatatatactttcatatacacttctcaatgggtattatcaattgatggttactaaacaatttaactataaatattaattttaaaaatatttaattattagattttgatccaatgacaaataatgaaagagaaatttgaatttctatacttaatttagctattaaaaaaaatagaaaatatcactaattttacactatatcaaaaatatatttacatacaaaatacttaagccaaattca

SEQ ID NO: 235897 - DNA, 1015 bp, Cannabis indica
gtaaaaaaatttaattattttttatcaattatttttatgcattttaaattttattccattccattcctattctcattcccattcccattcctattcctatattttcattcctcccaaccaaacgcctcggtttgggtgtacgtttctgataaatttgatgtcgcagccatgacaaaaactatccttcaagaagttgccccaggtgatgctttcaatgacatgaatttgaattctcttcacgttaatttgttaaataagttaatgggtcagaagtttttgattgttctagacgatgtttgggaagatgattatgttcaatggacagacgtgatgaagcctttaaccagcggggcaagaggcaggaagcaaaataatagtaacaacaagaaatgaaaaagttgcagatgtcattcgaactgttgatacacaccaccttagagaattgtcaaaagatgagtgttgggcactatttatgaagcacgcttccaatggaaactctaaaaagttcattgaaaacccacaattagaaagtatcagcagagaaattgctaataaatgtaatggtttaccattagctgctaaagttctaggaggcctcttgagatcaacactggatgttgagagatggaaacaaatagcgaagaatgatatttgggagttgacacataaaaggagcaagatagttccagctgctttagaattgagctactactatcttcctccacacttgaaggggtgtttttcttattgttcaatattcccaaaaggctatgaatttcaaagagcggagtttttaattttttttttttttatagtaaatagatggatgaatttgcagacaaaaaaaagcaaatctcatttgattcctccataatcaacattaatattcatgtttaattaagtagtagagacctacttgacttcgattacccaaaagtgaggtaaattacaatgcataatgagaaaactatgatatatctttctcaattatccctttttagataagtaaataaaa

SEQ ID NO: 235898 - DNA, 739 bp, Cannabis indica
ctaatcattgtacaatatgcacttagtaccgcgaaagtgctagtgttggtaggattagtagcctgaataattgttaaccgtatgcactagtaccccaaaattactagtgttggtaggattagtaatctgactaatcaatgtaccatgtgtactcaataccccaaaagtactagtgttggtaggattagtagcacgagccattgttttaccatctgcactcagtaccctgcaagtactactgttagtaggattagtttgtactttctaaaacatgcatgttttttttttttttgtaaggatctaaaacatgcatgttaaacatgtacatatgtgcattttttatactaatcttacctcacgtccataatcaggtgtgtcaatcaaccacagtggaaattactgctcaacaattctaaggcactaagtcccaatcacgtaaaacaggtaagcgtctctctaaaacactttcagggacttaaactcaaaactaggagtttccctatcaataaatagcgtggaaataccctaaatatcgagaaaacacaaaaactgaggtacccaaaaatcaccccaactagtgaactggattcccgaatggttcaccatttcttgggttttgcctgggaaaacggtggaccgtttcatagcaaaaactccaacactccattttcttcttcaattctaccccaaatcacaccaatcttttcagaatactcataacatcataataaacatattc

SEQ ID NO: 235899 - DNA, 1327 bp, Cannabis indica
tatgaaatgagttttatttagggcataaaacccaacagttgcatccactaactggtcaatccttggtagtgggaaacaatcttttggacatgccttattctaatctgaaaaatcaatacaagttttctaagtgccggttagtttcgggacaagaataggatttgaaatccacaagggataaaaggcctcacgtataaactcatttgtcaataatttatcaacctcttctttaagtgccctttgtctctcggagtctaagggtcgctgtttttgtctttttgatgggtaattagggttgacatttaaatgatgacaaataaccttagggtcaatccctatcatatctgaatggcttcaggtgaattgatcatggtttgccttcaaaaagttaattaactactattttagtttttcattttaattcttcccaataaatacacatttagtgggattgtttggatataaaacaagctcttccagctctttaattggttttagctggttattctcgtcttggattctagggtctagatcctcttctttcttctcgccttcttcggttatgaccaccattaattgatgatcgactcttctattttgaagttctatacgataacattcgcgagccaacaattggccgcctcgtaccacacctactcatgcttgtgtttggaattttatagataggtgtttgattgaactgactacccctagcccaatcaatgcatgacgacccatcaatatattataaactgatagattattgacagctaaaaattcatgcattagtgtcgtagataacaatggatctcctacagttaatggaagttcaataatgtcttggttggcgacactatcacctgtgaatccacataatcttaccatgcaaggttttaactttgcatcttataaccccattttctttagtgtatcatgtaaaggatatttactgagctcccattattaaccaatactctttttatcctcttgttagcgagctaaactgtaatgacgagaggatcgacaggcggatacctcacatgctttatatcttcctttgagaatataataagaggttcttctatttttgctttttttagtggttcttgagcaaacaccgattgttagctttttatttcattgacatatctcttttgggcattattactatctccagcgaggtgtggtcctctcgagataaccaatatatcattgccctcaacaggggaggttgcaatctttggctatctgggttattgggttgattgggctggtttggttcattcccttgacgcttcacatactgtctgaaatatccacgcgagat

SEQ ID NO: 235900 - DNA, 3068 bp, Cannabis indica
gtgcttcagtggtggagatcgtggaggggagggggaggttcgtccttagtcgagttcgtctttggcgcgtttcttgtgggtcgtggcattgtcctctgggggggagagactgttgtttgtgtgtttgaagaagttttttgttggatgatcaacgcctgaggatttgtgcattactgtgttggctatcgtgtttggttttcatccattggggaattcatttttgcttccaatgggtggtttaacagagacgttcatagatggatgccatggttgggcttcacggtggagatctagggggaggttcatccttagtcgagttcttctttggcgcgtctcttgtgtgtcatggcattgtcctctgggtctggggtgcttctccacttggtggtagtggcggttccccaaagtctgatgtgttggtgtttggttgttccattacttttcttttgcgtttttatttccctattttattttttaatagttgtttatttcacttatttatgcttttaataatggtggtttgccactatcctatttttcaatgggattagtagtttttattctgagtaacatttttctgcccagtggccaaatctaaaggatccttagattgttattaaaccattgctctatggattactttcattaggtttgtcctttgcatagtctctgaccttgtagcaataaatgcctttgttagtttgaaagcttgtatgctcttgatcaaccacgtgcattttgatttgattgtaattggagtgtgcatccatgaagcttaaaagtttgtaccccaagtttgaacaagctttgtttagatatgtgaaatctatgcacatcctccatgtcccatcaggatttggaaccaaaaccgaattggctagccatgtgggatatagagcttccctacagaaattaatgttggtcaacttatctacttctgcctttactgcttctgatctcatgagatctaagggtctttgcttttgtcaaactggatcaaccttaggatctatgtttagtgcatgacaaattactcggggactgataatagtcatatcagaatgactccaagccaatacgtcattgtttgccttaactatggagataatcttttctctaactaccggtggtagattctttcccactctgatgactttagtaggatcttcatcattaatgcatatttcttttacctcttccattggttctattgtttgctccagtgctacattttcttcttggaccatgagaacaatcttagttgaaacattgtagcagcttctagcactcttctagttgcctctaattgttttaatgcttccagtattgcttgggaatctaggcataagtggtagatgaatgtcacagctccaaaataaaccagaaatggtcctcctagaataataacattgtcagctattgggaaatcaactactacaagggtgttgtaattgaaagaggacaccacattacttccaaagacttctccatttattgtcattggaagttgtattttcctattgggatcagcgtgtctccattgaagccttgcagttgaataggacaaggtaacaagttggcttccacaagaccgatggctttgaaggcatctttgaaaatgatattgacagagattccatcatctacaagaattctagaaactcttttattcacaatatgggcttctatcaccaaagggtcgttgtggggaaaattcacatactttgcgccatcttctgtgaaagtcattggcaaattcatcatctaaggacaatgagcaggtgattgtaccaaattggaagtttcgtcttgatccaactcattcaagtaccttttatgtgcatttgggtgcttccagcaatatgtggtccaccaaaaatagttgttacaggaccatctagtggagactgggctactccaggaggatatggatttccagcactgagagctacaacaagccctactactagagcattttgtatcccctgaagggcttgtgcattaagagcttgaattccaagagcttgtggatgtcctactccctgaggaggattaatggctccatgttgcccaggaatcaaaagttatccatgtgcaacccccatgtctaggataaatgactggtattcttacttaattggacagatgtccatttttaaccaatccttcaatttcatcccttagatagtcacattcattggtggtgtgccctatatctctgcggtattcgcacttcttgtttggatctcttttcttttcttccgcccttgtacattggcagagccttcttgtaatggaccatgttacaagttacattataaccattctctcaagtatccagaaggcttgtgtactcttagtatcttgattcttgagtctttcatttcttcccaaaatcatttcagtttggaccctttaaactcctcttgctctgtgattggcttacattgcactctagaacttccacttttagttcatttgtctaggagcaacactaaatccaatttttaccactctaaatttgggaaaactaggctatgcagctggctgtgcaaaagcacttggtccgtaaacagtaagagtcgtaaaggcagttgtcgaagggaaaattgatggagtagtcatctacaaagtttgagctgctactatgtgtgtggaaggtgctagaaatactccataagcttcagcgtaaggttcttctaagtttatgaatccttaagctcttgtcaagaaatcagtcaaagtatttgctcttttgcgttggagatctccccacaacaggatcctgtggttaatcctgatgtcaaattcactatcttcatatcattagtatccttgagttttaacagcaacatccatcatgtgttggatgtatttcttcaggcttttctcaggcttccttaagtagttaaaaaatgcataccctgttgcatctttttccctgtgtgtctaaacaacagaagttctaacaattattatccagccaatagacctaagaaataactggttgtaatttgttttcaattataataagccttataaatttcttggtgggatagttgattttg

SEQ ID NO: 235901 - DNA, 1095 bp, Cannabis indica
atttaaatatttatttataactaggaattaaactaaagtatttgtaccgcaaattactttatattatttgacacaatactaaaaaagatatatatggaattgcaccaagcacactcgtcatgatattgcagactaaaattgatcgagtattgctattataggcatgtatgtgcccaagattataaatatgcactctctgatcaaataaaattaaaaataataaaataaaatattaacaattaaatactaacaatgggcattctaatattctgtaacgtcctaatgctaaggcacgctatagtaatttttcaattgcggtgctatctttactagctaatcaaagaactttcttgaaaattgtgtcaaattaaaacttttaatgctaaccatggaactttatagactttcataaaatatttacaagtgtcgggatcccgtttctaaactttttacaaaatataaaaaaaaaattacataattcaggtcgcacaacgactacaaaatgacaaccccagatgtctcgagaccgaacactccaggtcgcgtcgccatgacatgtacaacctcatcccagctcaggctcactcctgttaagctttcccctttcctttacctacacatggaagtaaaactgtgagtcaacacactcagtaagaaaagcatataacatatatcatataataccgacttgtatctaggcgcccatacacctatttataaggcttaacagatgagtaagaacgttctaactgtttgttctattgaccatgaaatcacccactaccagcactatgatcgcactacaggatcgacactatgttcgtgccgctatgatagcatcaataacatccaaaattataattggccatgatataactcttaactagtacgatgcttgtactgctgaaccgatacaatagttgtgtcgcttagggctgagcagaaaatccagaaaaccgaaaataccgttcaaaccgacctaccgaacaccgctggaaccgaaaccgggaaaaccgaaaaccgaaaaacccgccaacggtttaaaccgccaatagtcggtcggttttttttcggatcgtaaaccgaccaataaaa

SEQ ID NO: 235902 - DNA, 1151 bp, Cannabis indica
gtgaggagcgccttcgagagcctgagacagataagcagatttagacgagaattgcccggaactttctagcgtccacacccatctgtcaggtccagtacccgaagggtggcctcctttaagaatgtcagagactgtgtcatgatcgaaatagcctcgcaactttggaacatcccactgcccattgtcaagcaatagatcagccacgcaatttacattggggtagggacccccgattggtttcggacagaagcccttacgatgcggaatccagggatcgtcccaaatcttagtattctcaccattggtaaccaacttgcaggcaccttttctcaagatagcgttagcttttacaacacttttccaaaaccaagaatctgcatccttatatttgcagttaaggaaatctttcccttttaggtattttgctcgtaacactctacaacacagagattggcttccagtgaggatattccatccccatttggccaaaaaggccagattcatttctttggtttttcggaagcccagaccaccaagcgactttgggagacacagtttatcccaagctctgagatgaataccatgatttcctttctcgaagccccaccaaaaatctctgaccatgccatcaattttgttaaccatacgagaagaaagtttggttgtttgcatagcatacattggcatagacaagcccacagattttatgagggttgcacgccctgctttggatagagttttagccttccaaccctgaagctttgacattagattgtccagaataaaattgaagtcagcatctttctgtctcgatcgaaacaggggcagccccaagtatttgatacagccttcaggggtatcaattcccaaagcttccttaatctcctcacgaagtctcaccggggtatttctactaaagaaaatggaagttttgagtttgttgacccgttggcccgaccaagagcagaaatcctctaaacatccccagtatctgttcacctccactaaattggctcggccgacaaggattaggtcatctgcaaagaatatgtgagatagagtcggcccacctcggcttagcttaataccttgaatagaaccctgatcaagcgcacctgtaaaagtctagataacacttctgctgcccagat

SEQ ID NO: 235903 - DNA, 1326 bp, Cannabis indica
catataatttaaaaagataatttttaaaaaatattactgaacaatcacaaaacacaccacatcaaaagtgttgggtactagtcctaataagaatgctccaactaaattgatggtgcaatagtcaatcaataggacacctgaccaccacgtccatatgggtaatttaacatttttttttttgacaaaatataggtaatttaatttgataaaaaatgtaacagtaaattatttagaaaaacaaagaaattagtcaaaatgagtgacataggtgcctacctagttagatttccaataatattttgctaatattttttccattctcatcactctatatatagatgaagatagaagccatcatttgttccactactaaaacaaaataattttgatattaatttatggagatgaatcaaaggccacaaacaattccccgagttcttatcttccccatgcctgctcaaggacacgtcagcccgatgctgaagctggcggagcttcttgccatgtctggcctccatgtgaccttcctgaacagcgaccacatccacaatcgtctcataaagtacaccgacatggaaactcgattttccaagtaccctgaatttcttttcaggaccatctgggacggcctcgaggaggatcaccctcgaactggcgaatcggtttgggatatcatttttagtatgaatgagaagaccaagccggttttgagagagatgctagtgtcgggccaacttgggtcgggtgatagtccttatgttacttatatgattacggatgggctctttggtgggtttactttagatgttgctgaggagcttggaattccttgtgttcattttcggaccacctcttcttgctgcttctggtcctactttttctttccacttcttgctcactccggccagattcctatcacaggtaagtggatctaaattgtaattaaaaaaatcgtataattgcaactagtgctgcaaccattttattaactcaaaccgtaaattaataaaaaaatatatataaagtaatttctctttcttattttacttttatagcaaatttactagtggacctcttgttacaaggttataaaaatttcaaaatagaaaagaaaatcaaaatgaaacaaatcaaagagaagaaaaggtaattgattatacataaagctacgctaaaacagttgaatctttaaattatagaaaaaaaaataatgacaaaattaagtttaaacctgctattttatttattttttagcacaataaataatgtttactgtagagatatttcaattgatgagctcaatatattttattatttttgtaattt

SEQ ID NO: 235904 - DNA, 973 bp, Cannabis indica
tcattctatatagaaactaatacagtgtcactattgaatcattctataaaaactaaccgcaataaatttagagtattattgaatagtccacgaataaattcttgcattgtgtgattagaaatatatatggtattttatatatttaaatttagattaaatataccttaaaaaatagattaaaagattcttatataaaaatatctacataatttttatttttaaatatatataatattattaaatcaattaagaatattttgttaaataatagtatattctgttaaggttaactaagaaaaccaaaaaaaagaaataatgttaaataaaaaattctattacataactggattcgagtttcattttaaatttaatatttaaaaaattccaatccaataccatgttgaaatatcatttgggtggcactcaaacccctttttttaaattattttttttgggtaccaagtttacagggtctgggctgggcaggtgcaccgtgcactggctggaccgagttttcgagctcaaatgttcagccctaattagagaaggtggataaatgagaggtgttgtatgcagctctagcaaagatagtctataggatatgagctaatatgaatttgtgtaaatgtattactcttgagaatattgttaggctgatcaatatgagtatttaaataagtgttgcacatgtaaatagggaaaaacttcccaagagaaatagaactgttcttaaagctatagaacaaatgataatagtgatctctgaattgtttaggctttgttttggttattattggttagtatttgattactgaatttccttctaaaaaaaaaaaactttagagttgcttaagatcgaagacattaatttagaggagaaaaagttcctattacataataacacgtctaactatatgcttttgctttccacttttaagaaaatttgtaataaatataaattttttaaaaaaaa

SEQ ID NO: 235905 - DNA, 1050 bp, Cannabis indica
aacacaactaaggatgcaagagagtttttgatcactgcttgtgtagcattcctgaggtctaaagtccaacagtagtttgctacgcaaaacgaaaagatgacaagtggacgaagaccctagcactaaaaatggaggaggacttggcattgcgatttgagaaatctcggtatttgaacgttgacacatgtgaaccttacacattgaatgtccaccctggaggatcaattgagattggtgtcatagtggacttgtaagaacaaacttgcacttgcggcttgttccaaatcatgaagtttccttgtcctcatgcatgtactgcagctcaacaataacgtattagcatgtacacactatgctcaccatattacacaacaaaatattggaggagcacatatgaaggcacaattatgccagtttatgacgaggatgattcgaagttgcctgatgacataaagaacatgacagttggagtgcttgttgagaagaaaccagtagggcgactcaaggtttgaagaattaagtcaaactgaactgcttgtaatggtgaaaggattgtgataaaatgaatatgtagcaagtgtggtggcaagggcacaatagaaagtcttgcagctactgatgttaaaaatgaatgttaaatttagtcatattattatgtgttgtactattatgtattcttgttgaattattattggactttgttaaacattatcatttgtggcataaacaggttttcatatagctcctgtaaatttttgtatgtaaaatatcactagcccgatgtaggtcaaatgcacccgatgttggtccgatttgatttctggacatcctttgaggacctatcggaccatatatcggacctagactaaaactataaatttctcaagactatagggctctaaattgggtactacatcggacccactcaggctcatactgcattttataatttggaaatagcattggacactgtattgggcctgattagtggttaaaaatacacttttatttattttaaatgataaataaattgagttttaattgatattt

SEQ ID NO: 235906 - DNA, 737 bp, Cannabis indica
aattttttttatttaaaatttaagcacccattaaaagttcagagccggttgcactgcttccattcctatcaagactacatgcagagccggttcttcttgcataattattagaagctataagccagtgtcttatgttgtgctctagtttgggattccatcccctcaaagagtgcttcaacctctagtcttggccctatggtatggctggtgactgctgcagaattgtcaactatatatatagggcatctgtttctgttggcaaagagggatcttcaaaaggattcagctatagttcactgtaagctttgtttttctttcgaacttcctgtttttgttcgttcacagctgcgctggcttgtgtctgttgtcacagtttctttgttttgtctggtttaggctttggctatacattgcctttcaaagaaattatgggatttattcaaataaaaattgcctaaaattttggttctaaagctccttttgatttacagcttttgcattcatttttatgcttctgttcttttccatatcaataaggtagccacataaacacacatctcacaaaaacagaagccttttctttagatattgtttcccaaatccgatgaaacagaaaatgattctcaatttctcttaacaatacacaaaccctaatagccttatcaattgaagcattaacaagggaaattgtaataaaaattattaacatgattgaagcataataaagagaaaaaaaa

SEQ ID NO: 235907 - DNA, 1082 bp, Cannabis indica
cttattttttttttcaatttcaattacaatataaaattacactaatttatattctttattattttattattttattaatataataaaatatttaatgctaaacatatataattatttaatttttttagaagtattatttaattataaaaacttaaaaaaaaataatgtgatctatagtgcttattaaatttggtgggacacatagataaacccatttataagtttagttatggtgtctcattgaattatatatatatatatatagtattgtgaaactacactattttaagtgtttcagagaccgcattaacaaaaaattgctacttttagtgataacttcttaaaaacaaaacaaaaatttcaaacaaaaaactacttgtgactaaaatatagtatttacttagacacaagttgtcactaatttagttttagtacaataagtattgtgactaaaaacacatttaggcacaacaaattgtaatttttgtaactaatatttttagtcactgactttgtagtcacaacactaataataatttataattaaccacaatttttttatctttagtcacaagttttgttgtaactaaaagtaaaaaaaaattgtagtgcatcaagtagtatatataattggtttaaaaaaatagtatatataatttggaggtgaagatcccgaagaatatctaatatacgcactgttattaagggtcggctgtcaggtaaggcgagctaggcatccgtcttggattctaaacacttagatcgtctctaatggacggtgtatatttaaagttaaatttggcctaaaatataccataaaattataagtgacccttttttttttgtatttgtactccaatgcataaggtacaaattagttataaaaagccaatattaccagtagagattgtaacttttcatgaatttgctaaagttaatgattccaactacttattgtcggtcccacaagtcgtgggacatgcactaagacagtcttttctctttaagagttggtgcaagaaagcctccgaacaaaggcattaatactaagagaggaagaacccccaaaaattcgtgttgta

SEQ ID NO: 235908 - DNA, 673 bp, Cannabis indica
tgtgcaatgaggaatggctacgggcttttaatggcgctgatgtcatggtgttggattggtgggaatcagatcatagaccgttggttgtggatatgccgattgatactgaaagagaacggtgtggtaaggtgaaacggaagagtcgcttccactttgaggaagcatggtgtgaagaacttgaatgtaaggagatagtggagagggtgtggactacggagacattggtgtcttctacggggggtttagattgaagactaggaaggtgggggcagctttacatggttggaataaaaagaagaagaggacactacaagcgaaaacgaacaagctgaaaaaggctatttcggaattatcatctcggcaagacactaatgtatggggggaattgaaaacattagagaaatattgggataggaggaagaaaaatgagatcaaaggattgatggatagtatgggtatttggtagacaaatattgggatgatcaggaagttagtggaagattattatggaagccttttttcggcttcttctcctcatatggattaggtagaggaggttttaaggagagttaggcctaaagttacaaatgacatgaatgaggaattattgagactgtttgtagctgaagaggtaattcatgctgttaagcatatgaatctggttaaagctctt

SEQ ID NO: 235909 - DNA, 734 bp, Cannabis indica
cggctggtcggcgtggttgagccgaatcgattgacatctctagaaatttttgtttttgttcgagtctaggaaaaaaaatgattactctcaatgtgtatggtcaaggtgtgttttgccatgattatttttttttgtcaaaaactaatgacagttatatgattggtttctgtttgtttgtgcaggaatgaacgatatttgctcgccaatggtaatatttcttgatgatgaagcagacgcattttagtgttttgaacgagctatgcgaaggctggcattgctttagatcacactttcgttattgaagctttttctgtatgcattttaggtaaaaatttagacttttttcgttctttgtttcaatatcagaggaaaatttttaagtgcatctcaagttgcattggtgtacatttttgaatcttaatcgattatttaaaatgaatttatattaaaaaaattcactaaataatgactatagatattgaaatgtataatttaacaaaaataaatttagagtactacctaggtgttttacaaaaattaaatactaaagcaaaaaatgtataatttctcaaaaaatgtataatttctcaaaaatgaatttacatattgaaatacaattatcttgataatatctgagagactatcttattataaaactctaataagttgaactcttagaacatgagaagagttgctatgggtaaatttttacacttaacacttataatcataaa

SEQ ID NO: 235910 - DNA, 2966 bp, Cannabis indica
taaagtaatttttttgtatttttacgaaaattcacacagcaacacacataacaactaacggaacaactttaatcacaagcaaaatttacataacaacttacataaaaatcaagtggagcaactaaaattataatttttttttaaaaaaataaaaaataatatataagaaaatttcacgtttctcctgaaaatcacttatttctttcatatatactcataaaatacaaatgacaaatgatttgagctctccaacgagcactggcagcgcactgaaagtgaaattaaaggtcccccaacaaggtataatcactttttctaatcatgcataatattgggaagtgattacatttgatttttttatttttaacctttttttttctatacccccaatcagtctaaaaaaaaaaaaaaaaacccataacgtgcatggaagtgctgaagagaatcatatttggtaacatgaactttgaatttgcaatggaatgtttattttggttacttttattgggttggaaagtgagacaacgaagtggagcccattactgagcctttctttgcacggcccatttggcttttttcagcgtgttgttgacgattccttgtcggcctcgtgggccttggcctactactggtggttgtcttacttactaataataagatcaagaacaagacaattttagtatttgcaaaagctaaaattctcttttgtctcaattccaaatggtacatatgacaattttaaacttctaaaactaataaaagtagttagttgtataaattaaaaattcaaaaccaacgatcatataacagtgtaactaaaattccaagcctttttctcaatttgatcatccgaccacttatatgtattttgtgatcaaaccatgccttttgaattgtttgttatataattcaatattaattattattattattattattatgtaaaagttaaaattataaattataacaagtaagaaagtattaaataagagtctaagatttagataaaaaataaccaatttaaattaactaattcaatatatatttttgcaaattagattgtattagttttgaaatagaatgttaattggttagattcaaaatataaaataggaaacttacaaaaatactagaatttggattaatttttttcaaaaatattgtgtttttatagaacaccagtagaacaacttaaaacaacagtagaacaactaaaaaacactagtagaataacagtgaaaacttaacacaatatactacagtatgaaacttataagaaaacacagtaaactggcagtatttttgtaaaaaaaaaagaaagttagtataccatgtaaatttccctataaaatatgcacttatagtttggtagggagggagaagaggaatgatggctaagttaggaaggataaagaaagtcaatgaatggaaatgagagtggtactattctatattgtttggtaagttaggaaggagaaagaattaggagtgggatgtaaaagagttgtaattataaaattactattgtaccattacattatattaaatgtttatattttttattttaatttttttagttattacacaactacatacaaatatataattatttcattttgttttaaataaaataaaataaataaataatagactacaaattttttgaatgtccaagtgttgtagctaatatatgggagcctatatgcttagtatgtactcaagctctggaaattataggctcgggtatgagagcatttctcagtaaagtttatgttgggtttcatatattaaataaaactcaatttcaatataatcttatttactaattaataaaagttccagaatgattttatgttgtttggttcacatattactttcataataatatgtttaatatataaattttgctaaatcctgaatatatggatattaatgattatagtgttgtctacacagtaaaaaataagcatgatcatatacttcaaactatttaatctcgcgatttatcagtgcactagatttacactataatcaacgatgataagtagaatgtctttttcaggacattagcaaagtaaacttgtatcagatgtattggctatacatcgaactagaccgatattgtcagtaaaaaaatattataaacttaatgttatatcttttctaagttaatgtcacttgtttgatcttagatcaattgatctcaattctaagatgattaagctttaagataattgtagtatttgaattctttaacttgttcgttgcccgcttgctcgtcgaactaatccatacttacatcttgggaacttagtaatgcaattgagggagcattaatcatagacatgaaatttatagcttctataactatttagaagtgcaacgatgattttcttagagcttcgctaaatgagataaatagaagagctcttattttgataatatttttagtttactgaaatattatttacaagaagctaagtgtttaaggataaaatacatttaagggtaaaacggtaaatttatccatactcgatgtaaactgtctatagaggatcattgattatttaggttgaaataatggataattcatagcgtatgtatcttggatatatagagcattttatgtaatcgagagtgcaattttaaaactatagtggagtcagaaggaattaataagttaggaaatttatttggtaaatttcagatctgcttattaggagcttgatttaataattaatggtccccatattatttgagataatatcatcttgtagactcacttgattgattaaattagtcaattagaatttaaaaattaactgtcaaatttgagaattttcactaactttgggcaatttctgagcagaaaagagatataagcatttatttattaattaaaatactttatgtgtttaattaataataatatttaaattgtattttgtttgataattatttataat

SEQ ID NO: 235911 - DNA, 1586 bp, Cannabis indica
ctcttgattatgttataaataaaaaaaataaaaaattacaacgtattaatatattaaaaatattatatgaaatgcttattaattttgttcaataagcataaaatatttaaaaaaaatgcttattaaaaatactatattatatacttaattgatgtatccttatatatacctatctatataaaatgcttcatgaattttgttcaattaggtaagggtagcatgtgcaatgcatgtgcctagctttttttgtgtcatttcatttatacttttgtttacttaatttttatttcataaataattctaacaaagatcttaagctgaatcatcattgctctttgttcttggcatgaagtatcttacaagaattatgagaaaaattgggttgaaatcagattttatattccatgatagacgtaaagatctgaacctgaatcaccttatttttgcagatgacgttctatttttctgcaatggagattataaaagcatctactatctcctacagggactcaaactattctcccaaacctctggattgcagcctaatcctaacaaattggccatttattgcagtggtatgtctaacacagaggtgcagtgtattcttgatgcatcggggttccagaggagtgacgtacctatctaggtattccaatcagccccaaaagaatctcttctaaagattgcaatatattggtggacaaaatgcctcatagaataagatcatggagtaccaggcatatttcctttgcaggcagagcagtacttgttaactcggttgtacttactatacatacttattggagtcaaatcatgctccttccttaaaagattctaaaaaaaatagaggctatctgcgaagcttttttatggaaggaataacacataatgactgaagcagggaaaatagtatgggaaaacatctatcaatctaaagtagctggaggcattgaattcaagaatgtagctgagtggaataaagcgactatgtttaagtatgtatgggctgttgcaactaaagaggacaatctatggatcaagtggatacacagtgtgtttatcaaagaagtagattggtaaagctacttggcccccaataaggcagctggtattggaggaagatagtagcaatgaaaggtatagtcctaacactaatgaatcattcctcttttactcaaagcaaatacaaaattgtagatggatacaaattgctatgccctatgccaggccaagtaaattggagtaaagaagtgtggggaagattaaacactctgaagcatatctttgtaatgtggcctgcaattcaaaatacattgaagactaaggaaagactgtttcgatttaacattccatctgatacttgttgtttgatgtgcaatttgggagatgaaataagtgaacatttattctttgaatgcccactatccagtgattgtctccaacaagttaaataatgattagggtggaagactcctaccaactgacttgctaacctggttcgacaaataggaaggaaaaaacaacaacttttcaaaagaaagtgttctcaactgttctcgcagtactagtgcatcaaatatggagga

SEQ ID NO: 235912 - DNA, 579 bp, Cannabis indica
agtccttaaattaaaatttatcaaaaaagtaatagttaatttaaagcacgctaacatattaaatatacaaaataataataacaaaaatactaaaattaaataaaataaaaacaacataacactaagttattgaactaaaaagaacaacataaataaaaataaatattaaatattaagtaaaataacaatttaataaatattttctgtgattttattgaaagtttttttttttcaaaaaatgtgtaatattttattgatttcataaatattttattttgttaagttattttaatatcttaaattcatactagtagtcatgatataattatattataaattagttatatttggttattaatataaataatataaaatgcgagatcttttaaataaaatgttatcgaattgtgtatgtatttcatagaatagtacatatttatatacaaagctagagtctaaatagaaaactactaaatacaaataggaaactactaaaatacaagtttccctaatttctttacaactaatattctaacacttcccctcaagctggagcataaatgttaatcatgtccagct

SEQ ID NO: 235913 - DNA, 1429 bp, Cannabis indica
gaaacttgtaataaaagagtgacctggttccaaggttgagagcttggtggagacgatgataaagggtgcgagtgtggtcgctgagggtgcgtgtagtgtctgcgccgcgtttggaagatcccatttcttgtatgttttggttgaatcaattatcaaactccaattttagcggcaaggaaaacacaaccgccattgacagtttctcagctaaatctctcttctccctttctctcgctcgctcctaatgaatctcaatcacgtgagcttagttcctgtcacgtgcaagttattttttttttttttaaataaagtccattaattttgtctctctcttcctttttttttttaattttttttttttttcagattatttcaaaagtacatacaaattactagggttgttcgcattgcgggtagagcagtttgatttttttttttttttaaaccaactcgcacatgtagttattttaatttcttaaaccaaacccgcactataaaactaaaaaaccgcagaaattaaactgcaaaaaatgatgcggtgcagtttctagggtttgagctatcaccaaataactaaggggtatttacataaatatgagaaaaataaagatagtttacataaatatgataagaaaaataataggaaaaaatatggtatttaaaataaaaatttagcatatatgagatatgcaactttgaattaccatcaaaaatattaaaattcccctcatttttttaaaaaataaaacaaatgaaattacagtgattgccggagttatcactcggtctgaaaagtcaccgaagtttgctgttggtgccgaaaaagtctctagagtagttatcggtgtcgaaaaagttgtcgaaattgctaccggcgccgaaaaagtcatcgtaattagtattatcgctggaaatcaatttcaaagtcaaaccattatcatactgaattcacttctagaaacttataagaaagtgaaaacaataataaagtatggaagaattctatcactcttgatgagggtacatccgccatgaaatccaaagacttggagatgaaaataaaaaaaaattgtggctctaatagggaattgaatctaagtggaggacctatataaagaaagccttagcatggtaaaaggaggagtcaaaaccatagtcacaaaacagaggtccaaacaaaggctacaataacaacaaagggaaatctaattccaaaggactacaagacgcagaaggatgctttaactgtgagaagcctagacatttcgaagaaaaacggttatatcttaaataagaaataaaaaaaacaagttcaatggacaaagagataatattgatgactggatgatagtaacttattttttttttaatataggcatatttttttgtactgtttctcatttagcttttcatttaattattttaagta

SEQ ID NO: 235914 - DNA, 1129 bp, Cannabis indica
ttaaagggcattttagtcatttgttaaaggggagagttaggtggctgcctaattatatgacacctagcaaagttaatttcagcaaggaaaattgattttcctaacctttatccatctaaagaaaattagaggaaaaccaaaaaaatagaaaagctctctctttccttccctctctcttcgaaaccagctagagtaagggagattgctgcaaattcttggtgttttcagcaagaaatctagagagaatcaagccaaggtaagcccttgtaacactattcctttgttcttgaattttaaggttggttgagtatgagatttttggtattggtggctattacggttaggttaagttgcaattcgaattttaaagttaatttgagttgattctagcttctagtagctgatttggttgtgttgagattggatttatgcaagtttgaatttagaaacctaagtttaggtctttaatggcataatttgattcactaagtttttttgtgattttctggttggaatatgttgtatatgcattgtttaggtgttctggaaagtatggaagcacttggatgagttttgagcaagttggggctcgtttggggaaacctagtgcaaaccggctagccgatttgccaggcctataaaaccagctagccgattttggcaggatccccgaataagctagctattttctcaattcttgtccatttctgtgtcgttgttgggtgtttctctattttctgagttagtgttatccctaaagagtataacagaacctagagtggtgggttcaggtttcccgaattaaggttttcatcatgtgattcacccggcttcattatgtgattagggcatccatctaacacgacactttccgttcaagtcggacaacacacttgcatctggaaagaaggtaagaactgtgtataatgtgtaatatgaatatctgagtgtatatatgtgttaagtgtatatgcatgcttaaatgttagttgcactaccaacacttgtacagttatggtacagaatgcattggtatagtgaatattgtttgagagtacaatacagtgataccagcactagtacgggaaagtgcagggtgtctgcagtatatcactcagtggtactcggg

SEQ ID NO: 235915 - DNA, 932 bp, Cannabis indica
tccctgctctgctctctctctctgatttcaaactacctaatgctgtttgcaagcttcagaagtcattgtatggtttaaagtaggcctctagacagttgttcaaaaagttttctacagctttgacaggggaaggtttttcacactcttctacagaccattcaatgttcatcaagcattcccaaacagcataatcattcttacttgtttatgtagatgatgtgattcttgccagcaacattctcaaggaattagaacttctcaaaatcagattgaatgatagattcaaactcaaagatctaggagatttgaaatacttcttaggccttgaggttgcaagatttagcaaagggattttcatatcctaaagaccatatgctcttcaccttattgaagaacttggatatcaggggagcaaacctgttaatactcctatggaagcaaatctcaaactgtctcaagatgcaaaggataccttggctgacccaacattgcacagaaaaataattggaaaagtgcagtacttagtcataactcgaccagatattgcatactcagttaataaactgagtcaatttctcactactcccaggacaaagcatttagttgctgctcaaagaatattacagtatgttaaatcatgtccagggcaagggatcttattctctgcaacatctgacatccaattaagagcctacacaaatgcagattgggcagcctgcatagacgcagggacgtccacaacaggattttgcatattccttggagaatctatcatctcctggaagagtaaaacgcagcatacaatctcgagatcttcaattgaagctgaatatcgagcaatggcaaatactactagtgaactaatttggctattgtcattgctaggagaattgaaaaattgagcacaagggacctgccttgatgtatgtgac

SEQ ID NO: 235916 - DNA, 1010 bp, Cannabis indica
gcatccattgctcaagaggagcagggatgtgaggaagaagatgaagatgaagactgcgcgcacatgagtgtcgtttgattgttgaatgctctcaagaagcatgacacaaaaggaaagaaagctctagggaaggtattgatgtttgtggaggccaatttaaatggaaagcaagctaagaccgtgttgattgatattggcgcaacacacaacttttatttctaaaatcaaagccaagagagtaggcctaaaattggagaaggatatgggccgcatgaaagcagtcaattcaaaggccatggaaaaaatggagtggccaagaaagtgaatgtcaatattgatggatgagaggggcaactggaacgcgtagcagtttgcatggatgactttgatgtggtattggggatgaagtttttagttaaaaaaggggccattccaattccagcaatagggaatttacttatcatggaggagaaaccttcgatggttcctacaaaagtaagataacccctagaagtcaagcttctatcggccttgcaactgaagaaggatctaaagaagaagaggccaatgtttgtcattgctccaactgtgtatgatgcagaagtggaggagtcctctccacctgaaattgagtaggtgttagatgaataaaaggatgtgatgcgagataaactcccaaagaaactgcctccaaggaggagagttgatcatcaaataaaactggtaacgggcgcaaagctcccagctaaagcggcatactggttgcctccccaagaacttaaggagttaaagaggcagctaacaaggatgttagaattagggttaatcaagtcaacgaagacaccatttggtgcgcctgtgttgttcctaaagaagaaggacgagaccttgagactatgcatagactatcacaccctcaacaaagtgattgtgcacaacagatactccattcctttgattgttgatttgtttgactagctaagtggggaaaaatacttcacgaagttgga

SEQ ID NO: 235917 - DNA, 1564 bp, Cannabis indica
atgtgtatatagtgacgcacagtgcgtaactctaaaagtgttcagagtcacataaaggatgtcactaaaggttcaataaaaataataaaaatgaaaaaaaaaagaaagaaaacacagcattaaattctccattcacgcgcatgtagtatagctgactttccttttattttattctttataattataattaaatgtgtaaaattaataaaatatttgggatacataaagaaggttataaatcctagtcttcttcaacacacttattgaatcccatatctctctctctcttctttgtgcagcagccatgcccagctctggagaaaactagaaaaatccatgcttgtttacctccggctgtcaaggaacccagactccaacagaaaatgcccgatctcctctccctctctctctccctctcgagcctattctctctccttgatctcctgtatatattttttcgtctctctctctcctcgacagaaaagagccacaagatagttttgttggtccgccactccctcgacctctctcatctctgttacgcaagctccgcgccatctcatctcgaacattaatctctctcttcgacgaaaaaagggctacaactccacctctcccgctgcctctcttatcgctgttacgtgagcttcacaccacaacatctcggatgacagtgtgagcttcaaacgacgtagatttgagtttagcatagaatagctgttcaaaatttttgtatttattttgttcaaagacttaaagattttagttttgattgaaatatatgtttgcactctttttattttactgttggagatttatttttcggttgtatagatttattttttggctgtatagatttttgattaacttttacacaaattgttgtaaatttgtatggtatttttgttatgtatgatatttttgttgtaaatgtggttgatatttttcttattgtatggtatttttgttgtgttcattttttaataaatttattagttaattaaaatatacattaactcataattgatatatagttaattttattattattattcaaatataattaattaaataaatttaacaatataatctaaatcaaaaaaattaatatataatttttttttaaaaaaaaataagatatagtgacacactttgaatgtggctgttctcagattttttttctttaaaaaaagtaaatagatatagtgacgcgccacgtgggtaggtgttacttttacatttgaataaagtgtgactctaaaagcctataatgacgcacactgagggtttctaaaaaggtttactgacacacactgagtgtcactaaatattatctttccagttacccacattagtgacacgcagtgaagtgtcactaaaacgttttagagtctctgaacgagggtcactaatgtcaatgtttgtagtagtgattgctggttcgaagagagagaagggaaagagaggtattatttgatttttttggcttttccttaatttttctcaaaatgactaaggattttctaagttaatccttgctgaaaattgaagctaggtgtcaaca

SEQ ID NO: 235918 - DNA, 978 bp, Cannabis indica
ggataaacaatggtgtatggataaaatagagagttaggagcagtgatcgcaatattattttattataaaaaatagatggaagaaaaaagaagaaatgagtgtttcagatataatattagaattttatagacttatgtcttcggtcattatgaaataacggaagacatagtcacataggcctccacattatatatatatgggttagagtaatgaagacttttgttttcggttattttaaaataatacgtgtttttggttatttcaaaatagatgaggattaaagtgtccaggacctatttattcgattattttaaaataacttaagacataagttcacaatttatctctttctttttctccttactttttcctttgggttttattttttctattgtaaaaaattgaatatatacactatttctctaatagtgtgttatcttggctgataacttagactttatgagattattatttcctagcaagtacggtgatttttccataagtcaaaggaaattacaaatttggatgcattcaagtccaagttcactgcattctgatttatcaaatttcttacccgatacagcaacattgatctctcagttatttttaattgatagatattttatgtatgtttctctgtgtattttgaccgtgtaaaagctatccatagggatgtcactaacatataaaatattacatacatgtacattcttgtgatcatgtcttcttttattttttattttgaatatctttgaagcttagtgttttgagctataattttgtattaatgtgttactcttatttctcagctgatccaagaggcacattgaacaaacaaaggatcttcaagagaagatcttcctatgtcagaccgatccgagggaagtgagcacatatagcaagagtttaaaaaattcaccctcttaccgcgcattcaagaattagattaggtgccgtttgttgaagctaaagaacgaa

SEQ ID NO: 235919 - DNA, 815 bp, Cannabis indica
attgtaatattacattttttgtgttttttttataacaaaaacaatctttttctatcaaaaataaacaactcaattttacttagaaaggtctttggtcaaaaaaggttgatgaacccctcacacttacttggcaaccccggggagttctagtaagttgtgaaggtccattctgaaaacctccaaagtaatttggaaacaagttgaacaaatatatatatatatattttttttaaaaaaaaaagcaaacaagagtggatgagtaactcttcttttgacaaaaccacttctagtgaaactttttccaatccatccactactcattctcccgttcacacaataatcggtaatcctttcgcaatgaataataataataaaatacaacagagaacacttaatgattaccttcatgccacccaaacttccataccgtcatgctttatatttcaacctaatatgtcaagtctcggtgtcaaacccgacatctttatgtttttgttgacttttcatggaatagaaaataaaaatccatatgtgcatattctaatgagatcttggcctcttccattagttctctgattgaactgccttattaggtcgctagcctctttgttgcggtaatccaacttcgcctggtgagatcgaaggatgtactcttggtcatccatccatctcaagaattagcgtctctactgagcaaatatattgcaattagcagcatgtggttcttcagttaggtcagcttggtagatggcctctctaagtcaggctaactctagatcttctctatggtccacatggggctcgccaatagcagg

SEQ ID NO: 235920 - DNA, 942 bp, Cannabis indica
caagctgatgctgcagccagtccttctgtggtgaccggtcaccttctagtcaacaactcctcttacactgtgttatttgattcaggagctacacgcttatatgtagctatgtgggtaattgatcttttgggtaggccttgtgatattcttgaaagagggttcgaaaccctaatgcctagcggggagttggttatctccaataggcgtattaggtctatgccagttaggatcgaggatagggagttgagtactgatcttatagaactgggattaacggagtttgacattatacttgggatggattttttgtccaagtttttggccagtatagattgtaagcggaaaatggtgactttttcagccagaagatgaagatccatttgtttatgttggatcagttcaggggtctcagatctcggttatttcaatactaagggatagggatctactacacagtggatgtgtaggatttttagcggttgtaatttatttcagcagacccgaaacatttgggcctgaggtagtcagagttgttaaagattttctcgacgtttttccagaggagttgccgagattatcaccacaacgagaaattgactttgtaattgatttggcacatggagccgaacctatttataaagctccgtataggatggctccagtagaaattaaggaggttaagttatagcttcaagggatgcttgatattgggtttacctgacccagtgtatcgcccttgggagctccgattctgtttgtgaaatagaaatatggttccctcagaatgtgtattgactatcaggaactaaataatttgacgatcaagaacaaatatctgttacccagaattgatgatttgttcgatcaacttcaaggaaggacggtattttcaaagatcgacctacgatcgggttatcatcaactcagaatccaagaagaaga

SEQ ID NO: 235921 - DNA, 1117 bp, Cannabis indica
gatgttaatgaaacatacatggtagtaaatctagatcctggtaaaatatttccaacgataccagcatctcataaatggtatgtttgaaaactagattggaaaaaacatcgaagtctacgttgacgacatgttataaagtcactaaaaagtgagaaccacacggagtacctcgcatagtgttttggtatacttagaaagtatgatatgaagcttaatcctaataaatgttcttttggagtttcctcagggaaacttttaggcctcattttaatgcaaacggaatggaagctaatacaaaaaaaaaaaaaaaaatccttaaatcgagatgccctcacctacaatgccaaaagaagttcaggctttaacagaaagaatggtagcactcaatagattcataagtgtctcccatttttcaatgttttgtgaggcaataagaaattcgaatggaatgaagagtgcgaggaagcatttaaagagataaagaagcatcttttaacaccttacaattttggctaaactaataactggggaaatgctatacctttatcttgttgtctcagaacatgccatctgtgcagctttagtgcaagaagaggggaaaaactagcaacatgtttactatgtcagtaaaaggttactcggggcagaattgagatacccacctttggaaaaacttgcactatgcctaattcacgcatctctcaaagggtagatgcctgaggaagattaataaaatggtcgattgaagtgggacaatttgaagtaacataccacccaaggatttcaatcaaagggcgggctttggatgaatttttgatagaaggagtaaactcaggagaagaccctggaatagaaagcaaggcagaaacatggaaactatttgttgatggggcttcaaataagaatggctcgggggcaggagtaatagtgatgtcgccaaaaaatttcaaattccactatgcactgaggtttcagtttgaaacttcaaataacgaggcagagtacgaggccttattagaaggattaagaatagtcgaggcactaaaagtcaaaaacattacatgctttagtgactcatagctaatagtgaaccaagtcttgggagaataccatggaa

SEQ ID NO: 235922 - DNA, 1744 bp, Cannabis indica
attttgaatgaaattcaaaaaaacgttattatcattggttagttttaagacactaacaaggtttttctttatgttaggaactttaagtactgaattaagctttagaggttgagaaacagtaggaatagagtgagtaccaagatgagatatagtaagtttcttaccattgccaacagtgagagcatcttggccaaaataagattgttcatgttcaaaattttccatgccaagagcaatgtgattcgtagcacctatatcagcataccattcttggtcaagagcatagtcaggtatcattgaggatgtataggcctaatgttcttcagattcgtcaatttctgtcaggaaggcacgagaatcaccaatttttggggtaacaaaccctttgtcaaacctgtaatgacacacagctgccgtgtgtccaagtttgtgacaaacttgacagattaatcttggtgttgaggaagcacctcggccaaaatttttgggagggacacgattattatacggatagtttgagcttctgcctgatggattgtatcgatttagtgtcccattcgctgatctgttaggaccaacagcaagatttgctgagatcttggtgctggaatcagctattgtgaagtgtctttccaatctgctctcatgagttagtaataaagattgaatagactcaagagaaaggtcatcaataaggctagtaacatgaacaacaataggatcgaactcagggcctaatccattgagcaagtgcatgattaaatcattttcgtccataggagtaccagcaactgaaaggaaatcaacaagaatttttaccttctcaaggtagtccgaaattgaaagatttcctttatggatcttagagagttgtgacttaatctgtaaaatgcgggctttggattgactggcgtatctctgttctgatgcgcgccaagcagagtaggagctttggaattgagcaagtgatccaagaacggattcagacatcgacgaacgaagccaactgagaagaagttgatcctttctcttccagatagtgaattcggggttgggttggccattcaccgatctttcaggtggagaaataccaccaagaagtatatcatctaaaccgtgaccaatcacggtgggtataacttgagatttccaggctagaaaattggaacgatccaatttcacagtgagagaagagtgaagggaattttggaacggattccatggaggattggtcggagcttgagcagcggtggtggctgtgtgagcggagcaacgagattgaatttcaggattatgaggagccattggagacgatagtcagaggcaatctgataccatgaaggagcttatctatgctaagaatctaacagaattcaatctatgagattgcaattcaagactagcaaaagctgactagcctttggaaatgatttcatttatataggggagaatacattgacaaagcaaaagaaaaggataacagaaagtagttacaaaagtaattacaaggaaacagtgataactgttttaactaacaactaactaaacagttagtttaggtacagtagttgttgtatcaggcccaaataaaaccccaattaataatagcagcccattatcatattctcttttcaactttgaatgagcagcacaccagcgcgaatatggcgaaaaaaatcagaccgcgcgaaagagaaaaaatcgagcttcgttctaaacatttcgaggtagcttcgttctccac

SEQ ID NO: 235923 - DNA, 1006 bp, Cannabis indica
gaacaagtggcagattgtctcacaaaggccttaactcatcctaaattttaggtgctggtggacaaacttggtgtgacaagcgcacccctgcgtttgaggggtggtgttaagatatgatcaattgggtaatcaggggattagtgtttaatcatgcttatgcatagaaggggttgagaatgttctattttctgttatgctttttggccttatccaattctgttatgattgtattgttttgcatatcttttccctctgccagctggacagagtatattcccctgctgtaaatgattgtaaccctaaagctataaattcaattcgtctccctcagtctcatttgagctgagcatttgtatttctcaataggattataatctctcacaactggcctcagagccatggtaatgatttactttcatgaaatatgaattaaaacgatgtttgtgatgatttggatggtttcatgatggtttatgtgattatctgatgaatgtatgtgttttacgaaatttcgccatgaaaatattttttttctttctgaaaatattttatttggattccttgtgaaaaattaagcaattttaatttttacggaactcgattctgataaaaattgagaaagtcgtgaaagtttaaaatcgggtgccatgggtgtcgagtaggtgctcacgggcaccagaaattcggacaaggagcacccttgcgcgcgcgaattcagacaaaatcttgtctgagtgcatggtgaagctttccgtacgcaccttgcaacttgctgagggagatgctgcatccgcccatgaatgccgcacctgggaccctgcaaagtcctacctccatgagcgcacatgggctgcgtacagccttcttgggctgcacgtgcagcctcttgggcagccacctccaaaaatctgatttttgtgggtttttttttctcaaattttgaatatttcaattttcatacactaatatctaattaaaatattatttttatcatttaaacctaaat

SEQ ID NO: 235924 - DNA, 763 bp, Cannabis indica
ctggatagcccaagaaaacacaccctctggcagttagttaggtacaattagttaggaagttaactaactcctatgacacctagacagttaggaaataactgtcaaccgccaacagtaagtggcaactacttcacattatgtatgaggaggaagatagaatttcgaaactacctgattcagtcatcgtacatattctgtcctttcttccaactgaggatgtcgtttcgacttgcctaatttcagaaagttggaggttcatgtggtattgtgtccccaaaatctctttttccgattctaatcttgcaaatgatccaataaagttttacacttatgtcgataactatttggaacaccgcaagagaggcatgaattttatccgcgattcagccataactagttttaggcttcagatgcattatacttatgaaagaatatttgattgtattgaacttgaattcggtggaattggattctagttactcgtttagctttccatctttgaaagcattgtcattggcttatgttaggcttggagataatgtaatagagaagatattgatgggttcctcttcccttgagagcttagacttgcatttatgttgtttgactagtgattctcagctccgcatcaacatacaacatagtttaagcctcaagtttttgtatattagactcactaaggatttggtggagcaaatcgaactcataaatcttgaatatttgatcctagtggatgtttcctttcacaagttaaaagtctctg

SEQ ID NO: 235925 - DNA, 644 bp, Cannabis indica
ggagatgatgatgaataggattttattgttggaagagttcttgatctgccaatgatatgacaacatttgaatagcctttgtttcaatttgtttttttgaaatggagagttccaatattaaaatatatattcatataaaaatatattatcgaaagatatatggtgccttctatatcagaaatgcatagctgaacttaatattttttctaaacgattgtttcttctcactaagtgcacacgcttttccctttcattttacattttttttactgaatttattgttgagaactaagtatgatattaagcttaggagttgtcttttgtgttttccagcttcccgtctcacatcccgagataaatgagagtttatgtagcaattttgcatttgattactctgctggattggttgcattaagagcagagaactattgcgttcaattgtacagcttgcttgaagaccgtgaagtttctgaggtgagcccaatctatttttgtgtgatatttcaattaataaatgtcaattatccctaatgaaggatcttcatttttcttggtttgtaatggttagggtgcctcatgcataaccccaatttgtttcttagcctttatttatttttattaaaaaagaacaaaagcattactgtt

SEQ ID NO: 235926 - DNA, 1061 bp, Cannabis indica
tttgggaaattaaaaaaattgcatgtgtggattggtttaaaaaaaatagtcaaaaaccgcaatacccgtcccgcgaacacccctaaattatttttttagcacacttaaaaatataaaaatacaaacaaatacatttataaaagttttgattaatatttatttataattatttagtttttttaaatattatataattattaaaaaattaaaaaataaataaataatttagtgctgtctacagtgcccacccaaatatggtgggacactgtagacaaacccaaaaatggttatacaattgccgttcggttggaattggttttggtgtaatatcacaccataattgatgttttgcaggcccattagaattggcctaaattacattcataacccagttacccaagaatcacttgagctagttcaaatggtttagtgctagtacattcattccaagttataatttctcttttgaattcatttgtacttttttttttaagatttaaaagcactaaaataactatatatttaaaattaggtaaataatattttagattatatattttataaaagttacaaattaaataataaataacaatttatgtattttttaaaataatataaaatagattttaaaagtcaatttttatctattttttttattaatataacaattttaaaccagtttctagcacgaataaatacaaatagtataattattctcatcgtaacacatttaaatcaagttattataaagttttaatttgacgaaaaattaagttcatgatctattttgtaccactttgaaaattaaagggtctgaattgtcaattaaccaaacaaaaaagttcactcgttaacttttgtaaaatagaggattcaaaaaagaaattttatttgcaccacaaaaacgtataagtgcattccatttctataatatttattttacataatatatatttaattacattagttatttttaacttttttttcttccaattcatattcttaagaatatacttatcaaacaaaaataaattatattttaaatatcataaaaaaataaa

SEQ ID NO: 235927 - DNA, 867 bp, Cannabis indica
tcgtgtgaattgatattaattgatttgaaaggacaattttgtccttgtcgttttaaccgtgaacattgagttggtgtaggttaaacttggaatttcaccaagcaaaattcctacaacatggttgaatgtattaagctgcaatacatatatgattactataacatataatgcaatcaaattgcgaataagctatagtactataacatcaagtagccactttacaccatacataattacttatttattatcttcttattacataatataggcttatgagcctttcatatctaaacatataaatagttaagggtgttagtgatgaggaggatggtgatgcggtccgtgagggcctctaggcggaggcggtccatgtggcccggggggaggaggcggcggcccatggggacccgggggaggaggatgatgatgatgatgcggtccatgggggcctggaggaggaggaggaggaggcccgtgctcgtgtggaggacagtgaggtggtggtgggtggtggtggccgccccgcggtggcggtccaggtggaggattaaacatgttatccttgctttgatcttagctcttattcactatagttatgtctaatttgattagagttgttgtgtggatatgttatattgtataacaaaataccacaagcatatatagacatacaagtattgaagaaatattggtacaaataataagtagatatatgtagctttaaccttagccatatataagaaaatgacacatgtaattaggtgattgtgtgagatgaaaatgttatcttagccgtgtcatagatcgtgtacaacgttttttttagctatctgtacgtgaatattgaaaggtacatttgaataagac

SEQ ID NO: 235928 - DNA, 968 bp, Cannabis indica
atatgaaaaaacataatttaaagcctaataatctaacatagataataaaataatatataaaatattaaataaaataattaaatatataaaattataaatattaaatatgattggatggacattggatgatattggattgaattggatcggttatccattggatcggatgtctcatccaacatccgatccgatccaattggattattaaaatttgcatccgatgatccaattatgattggatatccgattctattggatcggttggaattgaatcggtcggttgaaattagattgaatgactttctgcacacccctatatatactcaatcatcatatacattactttgttatttaaaaatcaatagaatataccttattattcatgggaatatgcctaataatagtatgatcacctgagatccgatcatttaaactatttcaaattacagaggtgatttttattgaaaaccaataaatatctttatatattaaaagtgcttatctaacggaaattcatggtttaacggaatcattttattttattctgttagttttaacggagagttaacatccgttaattaattttataatcataaatacacactattcatcttcctctcgaatttctctctcaaacccaaacctatattctgcgattggccttattaaaattctacaaagacaattgcttccaattgtcgtcattcttcaacctcaaatccaaacccatattgctatcgacctgtatttgcgcctcacctattttctttgatcttctcgttgtttcacaatatttacgctgtgaatcgtcacctcttctccgcgattacaaacttttcttcgatttaggtatatgtgattctgacattatatattttgttgtttcggtatggctctttttttcattttgaatattgagttgagatgaaacagcctactatgggattaaattctcaatttgttgtctt

SEQ ID NO: 235929 - DNA, 891 bp, Cannabis indica
gctcagcaatgcatcttctcgtaacacttgcttaactatgcatatcatcgtattacacaatcagcaatgcatctcctcatactacatgctcaggaatgcatctcctcataatgcatgctcaacaatatatctcctcgtaatacatgttcaacaatgtatctcctcataatatatgctcatcttctcgtaatacatgctcagtcaggggcggaggtatatacaacatgaggatggccaccccacccccaaaatgaatatatatttatatatatacaataatttataattttcatttatatatgctttgtaaatttaattatccacgtcggcataagtaagagtgcatctgggagcgtatatgagggcttttgaaatcacagactaaagcacttgctgaaggaactttctggatagaaaagaaccgattggagttgactatctgtgactccattccatgaggaacggctagccatccgaaactcttttctggaggaaggctagttttcttgaggactacacccgcagtgggcatgatcgtcatccaggaactcccttccagatggcaaccatcatttcacaagacttcttccagattgacaggttaactgttcaagaacattttttgaaaaccttttcatttaaaagaactataccacatatagattttaaggtcttctcttcggtatcaaattgaacatacgtgtagttcttgcatttcattttcacttttgcctattttattctggctgatttacattattcatgttaatggtaagtcttgataagaacatttctatgccccaagtacaacctcctccacttaatatacaagtacatcaatagagcagtaactatcgagagagagactactaaggacccattttgaatttg

SEQ ID NO: 235930 - DNA, 1050 bp, Cannabis indica
tatcgttgcttaatgaagcaacctataagtaaggaacctactagaggtttccaaaagtgggtaataactcatttctaacaacggtaattaccgtatctttagattataatcgagtcacaaacgacaataatcatatcacatttggcatgctaagcagtgcaattagcttttcttacctcgaatccaaaattaggtatgcgggccgacctaagtggaataatgctcgacgatctcaggtcctatgtcacgataatgaaacttagtgaacaacttaaccaaatcctgaaagaagccctagtttcacaactggacaaactctaactcccactggcttagaaataggtttaacatcactaaaataccctaaactaggttctagaaaaattgtacgagcaaaaaccagtttcgaagaaaaactagggttttccttactggccaatcggttgattagttcctcaatggcttatagaaccggtcgatcggttcctgcagaaaggcaaaaaccctagtttttcacattaaaaccaaaccaaagcttcttcaaacttgctttaactttccaaaacaattctataacataaaaaatagcatactcaagcattcaaaactaaaaaaaaaaaaccacctcaaaatatcaaattcaccatggatgggtgacatttgagttcttgaactcaattcccccaacttaagacttagtgttgtggtatttcagccacgcaagtatacgtatcgttataaagttatagactcacaaagagtgaggtcgaatccacaaggattgtagttaagtactttgaaattaaacttttacttctatttggctatatcgaatttaagagaaaattaaaattagaaataataaaagatagtaaaaataggaagcaagtaattaatatgtaaattaatgatgattaaaagttagggtttttgatttcaattttatctatctattatggtctaacatgattcaattcctattaccaaattctatgcaatagcaggtttattcaagttatttatagtcttctcagatatataaatctcaat

SEQ ID NO: 235931 - DNA, 1036 bp, Cannabis indica
aaatggtcgcggctactgggtttaaatacccaagaaatccaattttcagccacaaaaatgcatgcaaaaacaccaatttttatgctaaaccagcccacaatcatagtaaactttcacctagcacaaatcaaataaatagagaagaattacacctaagtcactctccaacaacacaaaaaaatcagcccaaacacagaaccatttcaaccaaaacactcaaaccatcaaatatgttttcaataattatacagagatttagaatacagtttcatacattaaaacccacaatattaaccctcaaaaatcagatttaaacatgctcaaccacaagcccactcaagagcaaaacttcacaacatgcaaactcaaaaacaagaaaatcccccacatgtttcaccatcaactaacaacaacaataagggataaaaatcatatttcacaacttggaaaaacaaccctaaaactttctaacaacataagtgcaaaatccataaattaagcaagttcaagttacaaagaactcaccataagctcctctttttaaccctcatgcattcaaagcccaaaagcattaccctcaataaatttcagcaagagaaattaaatttaaaacactaataactacctcaaattgtagcaaagaaaaatccttaacacctccaagttccaagctccaaaagttagcaaaattcaagcttgaatccaagctatttcaagcaaaatcacaacttgggaagatgagtctaaggagagaaagggaggggtcggttggtggagtaaaaaccagaaaaatcattccaattttactcaaaaatgtcttttgttgaaaataaaccaattatgcaaaaattacaaaattgcccctagggcaacataacactcatttaggcatacaagggcaattaggtcaactccatcacataccacatattcaattaatttttagatttatcacatataaataaaatgtcaataattcaatccaaaattgtatttcgggcccgaactcggttgggcccaaaatacccttctgtga

SEQ ID NO: 235932 - DNA, 1863 bp, Cannabis indica
tcactctctaaaactgtgtgatttgcttgcaaggcaataaaaataaaaaggaaaataattaactaaaaggcttattaagatttaccaaaatgtcattgccaccacaccacatgctacctttagcctttgaaaaccttgggtcatctagccaaaataagaggaaaaatttatgtgttgacattagcgcccaagctccattgaaaattaatgaacgaacaactcctgtcaagaaacgaaggttaaattttgacaacttgttctcttgggataaagttgtgcttgttcattagaagagtaaagagagtagtcagatattttctttgtggaacgtgtcccgtgtttgaggttaaagatgctaaggttaattgtgtttctgatggaacttcagatgaaccacttgctagcattgaaatgaagaaaaatgtgtgtgctaagatcactattgtcaatacccaccaggttgacaaactgatttcatcaagacagtcaattagacttgcaatgtggaaggccatggctcgtttgatggacattgcgataccgaccaactattttgtattgattgaggatgaagaatctattatcggtgtgccagatgctgtcgttagttacccttgtggaggtggatggtccatcccctccacaggagccatgattggtgttgcttggaactgtagagggttggagaagacctctacagttttggaattgaaatccctgattcggtcatgctcacctgatttcattttcatagccgaatcaaaagtagaagttgttaatttggtacgtactctaaagaatttgcatttttataataacattgttattcatgttctgggtaatgcgacgggttttattcttgcttgaaatgtggattttactttcaaatgcttatgtgtatcaaaaaatcaaattttgggtattgtgtattctgaccctgagcatcatccttggttgttgtcttgtgtttatgggcctccgtactttcacgagaaaaagaaattctagttgaacatgatggaccttagtttcaagtttagcgggccttggttgatcttgagagatgtgaattttgtcctgagtaactcagagtgggtgggatccaaggggaagcaccaatttctcccattcattgttgagttaattaatggccatgctttgatagatatgcccataaaaggtgacaacctgaattgggagacaaggctttggttaacgagagttggttaaggatttttactaaagcagtggttcggtcgctccacacttgcaattcagatcaccgacccctttatgttagtattgtgaattccgagtctatagcacaaaggccctttcattttgaggcttggtggaccagggacccgcggagtaccctaattgtgagtcatgcttaggcgtcagtttcccataactgggccccagctagtatttttaagaaagtgggtgctacccgcctgaccctaggcaggtggaactgagagcaatttggtaagttagatactaacatctccatgatggaagcccaactccagaatatccaaaaatgcctgtggggtcgagaaagtgggcccaagagttggaggtgagacaaaatctaaatgaggctttacgacagaaagccttatattggcaacaaagatcccaggtctcttagatttaggatggtgataagtgctctaggttcttcttcattttggccatcatccgtaatagacaaaatacagtggaaagtatcttgaataaggatggggtgtggatctctaataaaagagacattgctagagaattcttaaattttcttgggggcatattaaaatacagtaccagtatcttgtattctgtaactacggaaaaactgtt

SEQ ID NO: 235933 - DNA, 1777 bp, Cannabis indica
tgttatgttgtaacattgatatttgtacagggcatatcaacttccttgtattgtctccgtacagtagcctcgtcgtcgtactgtagcccgctcaaagttttttgaattcgtcccgtactgggcccgtctgggccgtgtgaggtgggacggaggacgccttgtacgtccggccaccattggccatgggtagtggcccactacctgcagacacgattcaaagtgtcttagggtttaataccctttcctttttggatctggcaagggaattggaaattttctgctgtggtcatctatacctatccagggatatttctcttctctctgttttacctaatctctgtactgcttgtggggttatttctaatctggtttcaggtcctgtgactatggcggcggtgaatgaaaacactattgttgacgaaatcatccaggagacggagaatgtttgtttggacgatttctcgattgaagtttctcccgataatgaactggccaaagacacaattgctaaatcggttgttggaaaattttattcgaagaaggtgatatctaatggaactcttagaaaagctctttcgggattgtggaagcttagcccgggttggaggttccaaacggtgaggccaaaaaccttcattttccatctaggaagcccgaaggaagtcaagaacgtccttgagaatggaccgtggaacctgtgttgtggatatttgctggttgctgctcttccggaagacggtaaatgggagtccgcggacctttcgaatctggatatttgggtcaaagccatgggagttcctttaccatatatgacagaggcttgtattcatcagatggctggccgtatggggaagcttattcaagcgaataaggttagtagaaatggtgtgattctgaatgattttttgcgtttccaagttcgattaaagctggctgtgcccctcttggctggagtctctcttccagattatggtgataaaaaggtttggagctattttaaatatgaaaaactacctattttctgctttaaatgtggagtcattggtcatgttgatgctgattgttctgcaaagaagcgggtagttactgttcaggatgggaggtctattcccttgttcggttcttggctgcgagatggatcgcggttggctaacggttttgcgttgctagaagtggagagtatccatgatcgcagtagattagaaaatgatgatccggctttgaaagggatgcctctctcggctagtaatgaggctctcatcccgacgaaaggtgcggaagttagagatggccacacgagagtggagaaagaaggaatggaaggggtggtttcgcagcgggctgataactctttcaatgtggcctacaatgactatgtggatacttccaagttccctacccagcatgtggtgcatgtggctaaattatttaaagaaaaactggggccgataaagtttggcgcgacccgagaggacgaagactatagtcatgatcactctgggaaaataaagaagcttaagaagaccaagttggtgggccctagaggggttctgaaacacccaatctttaggaaagtttcccaggcaggtggtactggggcgggatcaaagcgcaagaaagtttccaaggatttggacattgattcaaattttatggatgaaagccgagggaatagttgtcttataattgtggataaatccggggtaaaagatgtgtttgcggaggcgagtggagttaatgtcccggaggaatctgataattgtgatgatagtggaga

SEQ ID NO: 235934 - DNA, 1249 bp, Cannabis indica
agaagtctctagtctcataatcaaagttctagatctttagattggaggtttcgaattcttagattgtgacaattcactgttacattggtcgtttgcacccaaaaacctctcaaagtccttcgtagcatcttcctggtgttcaattgctctgagcgatgattttggagataatagaggttgaaagacatcaagaagcattggatcagatgcagatcccaaatgttcttgatgtgcttcgtcttcatcatccgtgaacaaaaccaactctattcccagtacctcatccattgattttgttttccgcacatccttagcagagtttggccccttcttcctcactttcttaactccagattgttgtttttccaaccccttcgacctagtcttcgccatggcagtagcttcaaaagctgaaagtctagagagaaaaatctggaaaaaactgttttaatcttgtttagaaggccactaaattaagatttactttaatctaccgtcatcttaggattactattcacctaatagtctaagattctaagtatttgtgataaattgcaatttttaatattgtcaaaggtatttttaattgtgatgaagaatagaatctaggttaaataaattatatgcttcattgatttattgcctagattaatctatctccataaatcttaaagctttatctaagttaaaaaaattgcatgcttcgtggatttactgcttaggtaaaagagttaattattgagcgcttcgccttgattacatgtaatagggagattggaaaaattgactgctttagcattatctacgagattaatagtttgcttggaaactgaaattacattcattaataggaattaaggatgattgttgagggtggagaataacctttaactagtttctcatatcgtagtctcaagtttattttgtttttatttaagttattttactctaaaccttaaaaccttcctttttctaattcttgtcattaatttgtgaataattgaataaacatagtcctcaaagcccagtagaatggtttgataatgtctagattcaatgacattttgttcttttgtaattatttaataaaatatacaaatatctagggtttcaagttgtaatctagggtttaggcctcctatataaaggccttaattttagcctagaaactaagttgaatctaagcctgaaacctacctccaagctctaagtctaagtttgacaaattctcccttcttcacttcctctc

SEQ ID NO: 235935 - DNA, 656 bp, Cannabis indica
ggctctttctttgacactaactgtgaatcgtcccttccaatgcttctccaaattttttttcaaagcattgtggttaaaattctttgtggtataaagggtggccataagatgaaactgtggtggggctggtggaagtccctcatttgggtcgacatgctcagcaagtgagtggattgtgttttcggtatcagtgaggtgaagggctgcagaaaaagatcttgctaagtcttccatatttagcaatataggaatacacgaagaaagtattggtgttctaagcacaaaaaaggtaacttgctcaaaacctaaattcaagtttaaataggaaaaaagaagtacaacaataaagatgatagcagaggaaactgccatacctcgagttgtactcgagtagatcaggaagaacaaaaggcaaaaatttaatacaagatcaggcgggggattatccaaatccaaccactgactaggtaggtagacatagcaattaagaataaaccctatgagaagtagaaaagacagcaacaatcaagatcaaatagggatcatcatgagatttgttcagtaaggggatcaaacttgcaagagacgcattaatggattggcacgcctgcccccaaatcgtcaacaaagatgacgattctgatctcagctgataa

SEQ ID NO: 235936 - DNA, 1133 bp, Cannabis indica
ggggaagcatggctccggacatgagatgggtctagctccaagctccaaaacctcgcccaaggcaagcgatgaaagaccccagacgccgacggcttaatgccgactacggtcacaatcttctccaactgatgagcgcagatcagggtggaacgaagctcgtctgcctcccagccgttagaacgacaagtatagttctcctgggcaattgggcccttcatgacttcctccagagtggccaaagcagccgcccccttccgggaagatttggttccagacgcagtggtagaaatttttgttctgaaaaaagaaagaatccagaagtaagcccccaaaccaaaccctaatgtcaaaagagggaatgggggtcccctaaccgctggaaagaggccccctacggatgcttgccaaaaatggaaactcaaaggattttccttagcaaacatcgggtgcaaaaatcccaaaatcagcgaaagcagaagaaaagcgaaaaacacagaatgtgggaacaaaaatcgccccataccctaaataatagttcgataaaaggggtcgattgcaaggaagaatggaggaaaataacgaaacacaaataaaagggattctgtgtaccaagtaacagacttagccaaagctatttcccagaaatccaacatggaaccaaaaaagttctaccctagcatgcaaataaacagtaaagacatagagtgtccaagaaacttacatgaaaattgaagactgggggctggtgtcgatcgacggtaaaaagtggattggcagcgacagaggaatagtagcaagaaatctatggtgtctaaaattatttctcaaaggtgctcctatgaaaaaatggcaaagtggtgaaagtaaccaaatgaaggagaaagtttggcttttatggccagaacgggtgtaacgtagctgtgatcaggcgtaatcgtgcggtgggaatcgcaatcgattcgcattttgcagatccaacggtatgggtaaatgctcatcatggcggttggaaacgcttgagtatttgtctgacaccaattaaatgcgccagattattaatggacgggaagcgaatcgttgcctgcaaaaagtaataaattttaatgatgactgtcataaatgcagcacgcgcc

SEQ ID NO: 235937 - DNA, 2034 bp, Cannabis indica
tataaaattataaaaatatacttattttaataaaaaagtaaaaaataattgaagcacaacaaaatatcaacgctaaaataattataaattaactataataataaattataaaaaaaatcaaaaaaataattaaatgataattataatctaattataaataaattatgaaaaacagcattatttttagtaaagaagtatttttataaataaaaaagttcaaagtgttaaaataaaaatttatccccattgaagtagttttgtaatttttttttttaaattttggtcatgtaatttttctaaaaaaaatatcaaataaaaaacttgtttgatatgtataataaggatcatattttattaaataacaagtaacaatacgttttgttaatatttgtattgtattaattattatgaagataaatttaatacaatgtaaattgtattatttaatacataacaaataatatgtattagcttgtattaaaatatttagaaaagattctaactccgacctgaaaaataaacttggaacctgatccccgaactccaacacaactcgaaggtcaaaatctagaaatgagactgagattggggttggggttgagtttattttaaaaataatataattttacataacttgctaatacaattgaatatcaaaaataatattgtattaaataatattaatataatataatataacatgttgaccaaataaaatccaaagtgtaataaattttacgtgatcaatttagaaacggacaaaaaattaaatattatgacgcaatctaatttgtgattttttaaaatatataaatgaggtgtacctaaataattaataaactttttataaatatttctttcttagcttcgtttaccattatttgatcggtgatattaatagtggtcatatgttttacacttctcctttcaagttcgaattccccttcccaaaaaaaaaaaaaaaatagtgatattaataaagaatattgagatggtaaatattgcatgcagcacaactatttccggatgggtattcatgatctcagtcgggttcaatgcagcagcaaggtatatcttttatttttgtctatactaacatcatattatatttatatgtacaattaatttttgaattaagtaaataatggtaaatggcacaattaatttatttattatatgcagtgtgagagtgagtaacgagctgggaggagcgaatccaaaatcagcagcgttttcagttatagtggtgacagtgatctcattcgtgatctcagtgattgcggcaatagttgtgcttgccttacgcgacgtcattagctacgcctttacagatggtgaaaccgttgccgctgctgtatctgatctctgcccacttctttccctcactcttctcctcaatggggttcaacccgttttatcaggtacaaacaattaatacacacatcatcaacatcaacccccaatataatttatttatttatttataatataaataattaattaatgtgtgagtgttgtacttgatcattatatatatggatcccaataggggttgctgttgggtgcggatggcaaactttagttgcatatataaatgtaggcagttactacgtggttggaatccctttaggcgtgcttttaggattttacttcaacctgggtgctaaggtacgtatttatactattactactcatgctcgattattttttaacattccactttttatgcttaacatttttatttaatcaaaaaaattctcttatttttaattgttgctgacagaaaaaaaaatattattaaacagaaaaaaaattaagtttaacttaaatattttccatatatacattttgatataaatattttttaatatttttttaattaaataaattaaacataaaatcttaaatttatcatttattatccatcattagttaatacttctaaaattgaatataaaatatatatttatgtatatatagatgcaattttttaattagccaaatgagtaatatattgataccattaaaaaaata

SEQ ID NO: 235938 - DNA, 819 bp, Cannabis indica
tgaaatagcaacttcattgaattaaaagcattttgaatacaatagagccttctaatcaggccagacattatactcaaaaatgctacaactagaggaaattcgagcatgtctagcaatagcatgaacaactcgatttgctgatcgtttaataaaatgtaacttaacttcaattagagacaacaataactcatgacaatctttagtgattaaaccaaaggtggagaacatatcttggttagttctaataagttgaaaatactttttgtttgtatctattaatcaaaaatactctcatattatatttttattaaaatatactcacttttttgagtggaatgcctaatataccctcattttctacttaaatgtagcatataatttacataacctaaggcgtcttatgggaacatcatccataaaagtgggtatatctaaaaaaatatgaaaatagaggtaaaaattgaaataaataaagtaaagtgggtatacaatgtaatttcctcaagggcttaaggtgaatttaggcagcccacagtctttatctaaatgggcctccacaattaatagttcgggggattttcatttttatagtttttaaactataagtttgtaaattatgatattttttccaaaattttattttatgagattttttttaaaaaaaaaaagtgaaaaaaatatgggaaaaaccaacacaaaagaaattggttatcctcttataataattggttacttgtctagttattgtaaaagtacttgattatccttacctaattttcccttatttttaattttagaatttttataccacatactaaa

SEQ ID NO: 235939 - DNA, 866 bp, Cannabis indica
gtataaaaaacttgacgaacattgtcaaattttaccaattttgatttgaaactttttctttgaggttatttcaaaatttatattgttttgaaaaaaatttagcacatccttatagtacatccccaataaggttgttctatacactttctgtttgctttgacattcagtaaaattttatactttatttttttacaattgtgtaaggaatttataatgtaaacttcagcatatggttctttgagcgatgaaaaaaataactgaaatgcctacagctattaattctttgagatttgatcccacgagctttgggtctataatttgaaaattgaaaagagtgttagtgtgggtattcatacttcgaaactctctctaactcttttagatagatttaccgtatacacagactgagttgtgagcttggagactggtaccctatatttataggtgagatactctatgagcatatgtgctatattaatttttacaatattttgacaattatttcaaaaaattaaatggattaattacaatatttgggaaattaaaatctaactataattagattatttataatcaatatcaaataatcaattatataaaacctttgagcaaataatcaattatataaaatctttgatcaaatataatcaatattgattttctacgtataaacaatttacacatattgactgtactgattatatttattatatagaatcataaaatattctttatcttcttccacttgattagaatttaaatttacctcttaaacccaataattattcttattatataataaacacatgaatcataacgatagatcctcattatatggcgaggattatcttccatttattacgata

SEQ ID NO: 235940 - DNA, 881 bp, Cannabis indica
ggagcccccgtattcggtactggaaccactggctttggtctgggggtccttcgctccaccggaaccccaatacgaagggcccttctggcagtcgcctgggccttaatataagccacctcttgttccctcttgaagaggtacttctggtacttatcttctgccgtggcgatgatgtcgtctcgaaatatcttctccgcggccggagccctcacattcgggcagaagactttggaaaggttggattcgtccaccgattgatgccccaggatcagcttggcctttcgacagttttctgtcgtgaccaaatccccgacatcaagggccttcttgtcatacgtggcgaaggtcttggctcgttgaaggaaaagttgggtgggttcagtccgcatataaggggggatcctaacccaatccgtgagaagctccggatgatccacggcctggaacccggaggagaagaagaagcggtgacggcattcctaattggcgttccgacagttttctgtcgtgaccaactccctgacatcaagggccttcttgtcatacgtggcgaaggtcttggcccattgaaggaaaagttgggtgggttcggtccgcatataaggggggatcctaacccaatccgtgagaagctccggatgatccacggcctggaacccggaggaaaagaagaagcgatgacggtattctttcacatgcttctggtaattaaaagggaccgggccctcattcaaaggatgggcccggagaccataaaagccgcccttgagtttatctccctttttagggatggaaacgagttcataaaaatataaaatctctaccggactggtagagccccaacttcgggcagagtaaaaaataaacaagcctgaaagcag

SEQ ID NO: 235941 - DNA, 1026 bp, Cannabis indica
aaaaggacgaaaaatcctttagcaaaagaacaatagtttgtatcagagaaatcttataagaaagactcgtggactatgcaacattttaactccaaaaccacgtaaatagctttgtgttatttcttcttcttttactactattatttctgtgcaaatcaatcgcgaaataagctttaacatcgtaaaaaaaatctgcattaacaatttcgtgctttcattgagagcctatgtgaaaaaagctcagaaaaaccctcctaatcaaaagaaaaatctttctccatggttgataacagagaaaatgttgatactcatcctgaagagaccactcaccgtcctggaaaagagccaatgggctaacagaggcctcccaattcacgatctacacggtgcactcgttcaagaaggacccaacctgaaggtggctaaaatacacggtccacatgttcatggaggattcagagtgaaaattgccataacccagaagcagggaatgaagagcccaatgttgggggtgctcaacctatggaatatgatgatgatggtgcttatgatcccacgagatgcgtgccagttgtggagttggaaaatcaccaccttaggcgccgcctagaggaggcaaaccgaggaaacgctgagttggaatgggaggtagccgcggccaggggggtaaaggaaaacaacgcacaaagccaacctgatcctggagtgaggagaccatgaggtagacctcgtggttcacgaactaggaggcaagagacggctaaggagaatcctaagaacactcaagaagaacaatgtggggaaactgagggtcccactaagaatgaacaaccaaataaccaaccagagccttctcaccaaaatgagagcagaaggcgacccgggaccagggaacaggaaatcccccgtgagaatgagagaaatcctgagactcaacctgggacatgtgggtttcaaaccaacagagaaagggcacgcacaaaccccaacagggggcatgcaacaacccatacccaagggagaagg

SEQ ID NO: 235942 - DNA, 1130 bp, Cannabis indica
attgacttgagaacaaagaatactgtgtcaacatctactcgctagattgatgagaatgaataagttatcaagtaattaataagagagacacataaaatttatagtagtttacccctatgtcgcgatagtaatggggctacgtctacttcgagtttttatttctcatgagatgatgattagtgcagtaggctaagtattagaaactccaaactctagagagagagaatctagagagatatgctctcaccttgtggatagttttgtgaatgtgaaaaataaactatgggaaatctccttttataggtgaagaagcccacaaaaataggagataaaaacacaaataattttttttccatcgttgatgatgatctaatggtaaaaatagcttctagtaaagatatttaatttttggtgtctagcaggtcccactacgagatactcgaagcttatttttggaactcccttgggggtgaattttggcaatgatagcttcagaatttttcctgatgtatgagacatgacatcatagagggcttaaatagcttcaaaacgcaagttgaatcacattaattgaatgaatactgaatgagttatggtcattttactgaaggtagttcaggttttagcaccccaggttgacattccagcgcccaggttaacatctgacattaacatggacgttgtaaaggtgtagaaatgtccaagggaagtcctttgagatgcccaagtgatggtttgacacctcttagtctttttatatgttttggtaaagttggtcactccttctccgtgatattgctattttgtagaaacagaagactcgaaactttcggctttcaaatgagccaaaattaagttgtgaatttagctaatctgacttcatggatcattgtacttgtgaaaaacttgacggatggtgaaaattgcatcagattcggataagcaaaacccagagaaccagaccaaatgttgacctgggcgctagggccttaaaactaagctcccatgattctattttcgatactttcaaagcttccaaggcttctaaacttagaatggggtgtatccccctaagtttgaccatgccagattcaatggttggatcatatttgacatttaagcaattgaag

SEQ ID NO: 235943 - DNA, 2787 bp, Cannabis indica
gccattctcacctaatattatatttatataattaacaaagcaattagaaacactcctcttgcatgcaattatataatataatataaaaattggagtgaaagtaatgtgataggtgtatgtacataccacagaaatcccttgtatactataaaattttcttaagtacaagtaagtttatttaattacttgaataaatttaagtgcaaatgttgtgctggactatcagaggagtggctccaagaaaaataatagtaaaagataattacaatgttaattccaaacacgaaattgaaaaattgtcaatatattactttaacactcaaaatcaaaagatattttagaattaattatcaactaagcaaatgtgacttatattatagaagataggtaactatttatataataaataatacatggatattattttgaggctttagaaagagaattgttagcatttttttcagtattatatgttagtagtgtaagtaaatattaaatctcttataatttataaaaacaatttttatgctaatcaattataaaacaccaactataaaaaaaagtactaaacaccatgctattcaataagaatgctctttcagaaaagagctgctatttgtgggattaaaagcactcccgagccatgtgcaacagttggattggttcgcacaggtctatactcaattttgattaaagacactataaatccagtaaaaaaaaaaaagaaatatcagaatagaacatctatattataagtcttacaaaatatttcaaaataattactgagtttagtccaaaaataccaaaatacgacctgcgtacagaattatataaaagacaattgaaaacagagcataaaactatataacaaaatttctagtgagagttttagttatatataatgaattatactataacggttacaattcatctaccaagtattatttcaccaaatatattcactatatataacgctttttcaagaattctcattctctctctctctctctctcaagaaaaagacagagaactctgtatcttcttcagcgaaggaacttaattgagcgtttgttattagttatagtacatatatactacttttcgcaatggattccgagctcgaaaatttaaggacgacactcattaccagattgcaagaacttaatcagttcaaacacagtggttcagtaagaaaaggtgagattgaagaatttaagaatttatagaaattttggaaagcgatgtttatcgaaaacctaaatcgattaagctaaagaggaagaagaagagtgtaaaagaagtgacgagtagtagtgctgtggatattcatgaatctttaaagattggtctaaggaacagacttgagaaattggacatatcggaagagaggttccgcaagtacaatatcccaaaacgttatcaaaacggccagaaacaaccgctacagccttacttggaaagattacaagagttcatggaaaacacttggagaatagaatccaagaagaaaagagagaaagggtatttgagtttgcgtgagttgatgatgaagatagacacctcaaatgatgctcttgcccaatgtgctttcaattgtctcaggtatactcttgaagaaattgccaatgaaatctctaaactctttattgagtacataatgatcttggtcttgggcacggtcgtagctgattccaataatattgctaatactactaagaataataataaaatggtgccaatgtcacaaagtgttgatgatgttaaaagcatagtggaatgcttacgtgtggaagagaaaaacaatggtcatgagtctactgtaataaccacatttggctttgtaatgtgtttcttcatggatgcacttgagcttgcaggaccatcatggagcaataatggttgcgaaaataagagaatattgtttgatttggatgaagagattgaagacgatgtagttcatcatatcgttatggaagttcttcgtttagaggtgtgcatatgtagtcctgaattctttcctatgatgcttttaaatgatgtgttttactcaatggcaactcatattcgatctaatgttttcaaggacaaattggaaggtgtaattacagataagataaatttgtggaagtattatattgatcaattccaagttgaccttgaggttgatcattatgaagaatgttgttcagagatgaattttttaaggcaagtcttggaggttggggttcttgaaatatgctctgctgatcaatacgaaactttaccgaccttaatgacaaatttagtgtttatataagagatcattattgttaaataaacttgtttttactgaatattgtaataactcattctaatctatagtgtgatgtgtctcttaaattaaataagaacatgatatagaaagatgattcaaaagaagagaattatgattctgttccaaaatcacactgtcttcaactcttcatagacgaaaagttgcatcaccattcattttcattatcattctcattttcctaaaactaaagatatataattgacattaatactcttaagttgacatttttaatgaactcacttccaaattattattattttcaaaacagtaatgatgaacaaaaacggatactaataggagagaggaataatcactagtcaaacacgtttcaggaaaattataggacgctttaaatttctgtaaaaattttgttattaaatttttaaacacaaaaaaaaaaaattactttttttttattttaaaaaaaaataaaaataaggtttggtagctag

SEQ ID NO: 235944 - DNA, 1186 bp, Cannabis indica
cccaaaatgctcctcctctttggctattgagctcctccttggccaataaactcctccatggcctatgagctcctctttggcaaatgagctcctccttgacccatgagctccttcttggccaataagctcctccatagccaatgagctccatcttgttggacttctatatctagagtaaaaattcatgcataattattttagattttttaagaaataacagttactaattgtttgattgtttaaaatttcattgatttaattgtgtactattaatcctatttttctcatattagaaagtattagttaaagccaaacaaatagccaagacaattcagttgcagtagaagaaaaacaaatatagtcaaccacatggttttcatcatctgcagctgggccccacgccttcacacacccgtgatcatttttattttttaaaaccaacaaaaaacgtctctatacaaataattgagaattataagattataaatcacatgcaatgtacttgttcttgtacggacaaactgttgttgtatgtatatacatacaaccaagcacttaattattgaaggtgtaaattattggttgcataccccaaagaaaaaggaacaccaaacaaaaaatatatataaaaaaataatttatactataaataataagtacttaaattatatttttcataataaaaatatatatttttttcaaaagacataatttattaagatcaatttactattacagaaaaaattaaaaattgtagacaagtatccgtttaaacacaatttttttaaactagcaacaaatgttattaaatttgtgggcaacaccattcgctgagcgcacaatggcactgtaagaaccaccaatagtaattaataaagaataaatatctcataaaatagactgaaaactaaaattcctgtgaaacttattaatccaacaaattactattgtaaaatcattattaataatagagatactgaaactaataccacattataatatacctaaaaacactaataaattaaaaattgaaagacaaaattacaaattatttaattttagtgtttaaattaaaagtgttgtagcaatggtatcatatataaacattatacacgtgagtacgaaaattctgttcaacaacgttgtaaggcaacctgttgcatgtatcatatgtatacatacaata

SEQ ID NO: 235945 - DNA, 1055 bp, Cannabis indica
actttttttttttttttttttcattggacgggttacaattagatatttgcaacctaatatttacattaggttggtaaaaatacactatgacccaaccaaactgaccgatgtacaccctaatatttagatatctaattatatatgggatattaaattataccatttaattaattttagtgatctaatcgatttaacattcatttaatgttaaattagattggttttttatccattaaatgtacttgtattaattcaaatttatacaatattttaaacttagtattttttttaatcaaattagattcatccaatttttttaatcgagtatttattggatccaatctgatagaacaaagtaaaattttaatattaattttcatacataacatatatatatatataagtatggaaatactttttaatgagtattattcattcatggttactaaaaatttaaccataaatattaattttattaaaccattaaattttgatccaataacaaataataaaagagaaatttaaatttatatgtttaatttaactacttaattaagaaaatatataaaataatatctcttttcacattatataaaaaatatttaaattaaactcaatttttttatcttcttttttgtcgaataactttttttattaatactttcaaccaatagaacaacctagcccatataatgtaaaaaagagagatttttttaattagatagaaaaattaaatataaaaactcaaattttcttaataatatctatttatgagtaatactaattaagagtgtagtcatatatatttttcgcacaaggtggcgtggcactcagcagggtgacacgtgttgtacatattttggcctgaacagagtatactcatttatagttctgtctaggataactcataaccaaatatgttaagtatgattcttcagtaggtaccatccgagcagatcaagtatgcctagtaaagcgccattctccagaaagaagagcacggtgattgaagatctacagagatattttccttaaatatctccatgattatagct

SEQ ID NO: 235946 - DNA, 1553 bp, Cannabis indica
ttgatccgtcgccttttaataagcccttttttatagacgacattttgtactataaagatgctttctatggagttgatatttatacgaatggacttgtttctttcgaaattaagtatgattcgtcttataaaccgagtttaaagttggttggtgggattcaaacaaacaagcgtaacaatgatcatgatgttgtttttgataagaaatatttggtggaatcatataaaggagatcttttgcaagttcaaaggtatgtttacatggagacatttcgtgtaacaacatgttttgatatttttaagtggagttttgatcgatcaaattgggaagaaataagtgatttaggtgatgaagctttgtttgtaggtgataattcttcagtatcagttgatacatcattaagttctacaaaatgtcagagtaactgcatatattttaccaacgataatagtattcattcaaatactaataacccttcagatatgggagtgtacaatcttgtaactcgaagtgtgagacgtttcaacattgatactaatctctttactagaatgggtggaagagcacccatttggattgtacctaacatatctataaaaaattataagtaaggtctctctacttggtgttatgtttttttttttcttcttttttttttcttttggtaattggtttccaaagatttgaattttatgaaacattgtattaagattgtttgaaatatttttatttcatgttgattaaaattaatttgattggaacaattaaaagataattgtggagcttagtcttccactagtttcggagctacgaaactaactgggaagcgtagtcctttcacgggaaaggttcagtcgatggtcagcggcgacgtagttcttcattttgcttcgttttttctgcgattttctggtttgggttgcgattttctgggtttgttgttcaattttctgcatttttctgggtgttgcggcgagttcattggcagttttttctggaattcttcttggcagtttgtgctgggttcggctgcgattcgtggggtgtactccatggatttggagttggtgaatagactttctgaggttttggttcttgatgaggatgatggccctgttctttccttgaataaggctggtattgaggaaggaaaaaagaagatagatttgtgtttggtagggaaggtaatcggtcctaggccgaccaataaagaagggatcgaaaaggctatgaatggggtatggaaaatccaccaccgatttcaggtggaagaattgagttccaagaatgtttttcgttttttctttggttgcagggaggatcggcagggagtatatggtggtggaccatggacaattgacaaacaattgatttgttttgttaaaccaatggggctgggtaaaatttcgaagatgaattttgattttacttcattttggatatcgattaataatgtcccattagcttgtatgactgaactttttgcaagagaatggggggagaggattaggaagctagaagacatcaagattgttaatggtaccatgaaagtg

SEQ ID NO: 235947 - DNA, 530 bp, Cannabis indica
agaagactatatataactggactggactaagctacttgtgtctttgataatgaaggatattggagaccaccactacacttatggctcattattctgaaaccaaagagataaaagtaataacttgaataaacttttcttttcaaaaacaaataaataaaaaaagacttaaatatgtattgcttgactcaaaaagcatttgagcgacctagaaagttggtcatttttgtcttcttttcacttacaggcctgtacaaattaacgatcagggacaggtggaccattcttatatctacatctgctagtaaagaaaaggtgttaacgcgtgcaacaaaataaaatttaaggaaaaagtgatactcacctattttttatactacaaaaatacatattttaatttttttatgacctatttgattaagttacttaatttttttttttttttttttgttaaatttctaaataatttaaattatcgaaaataaatataaaatttttcaacacgcttattaaattaaaatatcaaaaattct

SEQ ID NO: 235948 - DNA, 2041 bp, Cannabis indica
tttgaagctcatgaagttaggcaggccttatttcaggtttcgggtgacaaggcccctggacttgatggacttaatcctgccttttatcaaaagaactggcatattatggggaatgacctcactactgtcatccttgacactcttaataatatggctgatttttcttctatcaatgagactctcattgtcttgatcccaaataaatccaatgcctcttctcttaaggattttcgtccaatcagcctttgctcaacgatctataagatcatttctaaaatgctatcaaatcgtcttaagagtgttcttggagacctcatctcccctttccaaggtgccttcttgtctgagcggattatctttaacaacatatttattgctcaagaagttgttcatgccataaatcatcgaaaacatggtaagtttggctgggtgggtcttaaacttgatatggagaaagcgtttgatcgtgtggaatgggattttcttttggccattcttaataagttcaagtttcccattgaattaattagtttaatccatcaatgtatctcttctgctacaattcgttttagtataaatggtcaaattacgaactcccttcatccttctcgtggtattcgacaaggggatcccttatcgccttaccttttccttctatgttcggaagggcttactgccgcccttcgtcttcaggaaaaagcggatcctttaggggtatctccgttgctcgtactgcccctcctgtttctcatttactttttgctgacgacactcttcttttcactgtggcttccccttcttcttgtaatgctcttaaggaagctcttaacgcctatcatttagccactggtcaaaaagtaaattatgctaaatcctccattctattttcgcccaatactcctactaatatctctgcttatttttttgattccttaggacttgaaccgcggccttttatcagtaagtatcttggagttccccaatgttttgggcgttcaaagaaatctaattttgattttcttcttcagaaggttagctcacaactctctatctggaatggcaagttgttttccaaggcaggtaaagaggtgctcttaaaagctgttatacaggctattccttcttataccatgtcttgtttcaaactcccggcctcaatctgtcataaaattgaaagactaatggctcagttttggtggggatcaatggggaaaggatctaaaatccattggaaaaattggcgaactctttgttcttcaaaattttttggtggtctaggtttcaggtcccttctatcccataattaggccatgcttgctaaacaagcttggcgttttttttcaaatcctagttccctcctggccaacattttgaaagcaaaatattttagacataatggttttcttgaggctaagctaggcattctccatcttatacttggtctagtctcctttggggtagagatcttctcattaggggtttgctgtggaaggttggtaatggttgctctattaggactcttcaggacccttggattccgggtttaaaatttccttgcctgagaagtaatgatttgcctcctgttgataaggttagttttttcatagacaataagggattttgggatagaaacagattgtcccactactttgatgattattttgtgttgtctattctcaaagttccaattgggggccctcaaagggttgatactcttatctggaaccaagaaaattcaggtactttctctgtaaaatcaacttatcatcttgctaataatgcttcccttcctccttcctcttctaactcctctttttctaatgcctggtggaaaactctttggaacttaaatattcaaccgaagattaaaaatttctcttggagagttttccaccacattctccctgtaggccttaatttgtttgttagaaaaactattcctcaaccttgttgttctttctgtacaaaccctactgaaactgtcaccatgccttgctagattgtcccagagcttcaaaaattcggaaggcctcgcctctcc

SEQ ID NO: 235949 - DNA, 3616 bp, Cannabis indica
ctaaagaaagtatcttgatttatcatatataaaatagtataatgtaaattatagaatatcaggtgttattattgtactctttaattttgttgtacattatgaaagaaagaaggaaagaaaagacaaaatgtataattagaatatgaacccaatcagaaatatagattttcattaaaacttgcttatgacgaacactcttgaaagtttacccagtcacactcaaaaattatttaggctttacaaagtcattaggtatattagatcttttatttgagtttacaatttgaataaacaatacatgtatgaatattggatgtacagaaaaagatatgtgtgaatattagaacttgtcaaattaatgagattagaaaaagtcaatacatttacattcatcatcaacttaaaaggttcaaaaataatatatatatttgaactttgatagcgatgagcattaagaagacactaactcaaaaactaagtcaaaagcaccctgaagttataatcactaactaagttcacgagtgaactcaattcttgtaaatcttctcgaaagggttaatgtttagatccacaagagagtaccaaaaaagattctttaagtggcttccaaaaagatggacacgtaccatgtattaacaagctagttctaaagctttgttcacgcctgttgacttgtaagaagcaataccagaagctttcaaaagagagctcaacaaatcattttcaatgcattcgtacctagaagtaatccacatatacaagttacagaaccataagcagtagtataaatcacatgaagtaatcggcataaaatatatatatatatataaatatgaaaagagaaagatcacatggtctacataaaataaatgaaattaatgaaaaactaaatcatgagggtatgtatgttcaataatctacttattttaaatgatgcaactaaaagagtttagtattcactgtaaattagtcatttcttgaaaaagaagaaaagggttggaaaatccatcagcataaatttcccagcaactgatgtcaagttagttcatttaggcatgcttgtaatgccactttatcataaaagaagagaaaaagagtcaaaatctaacagagaaaggatgcacttcagggtatctaaggtgaacttacaattttttgcagatattatcaacagttcttgataaatcgaggattttaattttcactagcataagtttatgtgacgggtacgtatcaaaaggctcctctagaaatgaagaaagaacttcaacatttgcctcaagctgctgctgctgattctcaaacaagttcagctttatcagtttctcctctgcagacagattcctgttgaaattttcttcaccgaacatgtaaaatgcaaatgcatatgaataggcgagaatcttccttgacctggagagcctaaagagacctttagttaaccaatcaaattctctatttgtcgagtctctttcttccaaagctaatatcttcccttctaagcttgtctgtagcttcatttcaagttttaaagaatccatgtgagctttgtaacgattgtggtagtgaatgtgacgaaatagatctttctttgcacgctcatttttctctttagtttcttctttaaatcgtccacaactatggccttctataaatgcatacgtatgggtcctgccagttgcttcaccacaaagccaactgcgagataggcataaaacaggtaaataaataagaatacatctatatcagtgtgccaaaaacatatgaaggaatcattaatacactacacgacaaatccatatgaaacctaagttgtataagaggatactaccccatttaaactaatcaagctataagagaatcaatatatggcatccaattaaaatatacacgtatgcttcagctattcaatttaaagttcattacggtatgagtaatacaagtcagtttaacataaattgctatatgttctcacaaaaaacaaacaaacaaacaatcaaataaagggaaaaaaaacaatgcatttagttaaaactaagtccttgtggaacaaaatcttgaacataaataattggtgccaactccatattgtattttattaaaaagttcgataaaacatctcacatcaaagcgcaaaccaagcttgcagaagagaaagaaataaaaaaaaaaaatgaaaacagataacaaatggaaaacactattcagactacaaatcaaggacaattttatttgacactgtcttaaggggaacatgttgaaatatattacaatattacaatttgtatgtggttctcatgtatttcaagttttaactccctagtaactatattagaagatcgaatgtgtacgaaatatgaaagatgataatactcaccaaaatggttgtccacagatgcagtttactaagttgcatcctccattcttttcaaccaacttgtgacattttgggcagtgctttgtatgaaatgaaatatagttaagtgtttctgaatcatcctggcacttcttaacccataatgcccacatgaaacacggacaaggtgagtgtgtttcagataagcaattaaaacaaaactgcacaccacatgtacattgaacctcacacactacatcatcttcaatacgaatggcatttccacaatggggaacacttggacaccacttaacctttctactgtcctcaatatatgattccagaagaaagcggtcaaatttctcagccaggttaggatctcttgcattgactaaagttctaactttctcttcatcgcaaatagcatcacactggtattccatacatgtaatacgcctgctctgtccctcatttatctttacaataaaatgctctgtccaacctgagcagagcaaatcaccaccaccccaagggaaaaaaatcatcatacttgaaagaaagttataaaagtcaatatagacacagccaatcaaccccgtatgctatcaaatacaacagaaaatattttccctaagaatttcagcatatcattatttggtaaagtcgctccaatgaaaaaaaaaatcatgcatatattaaagttgcagattgttcttactctgaagaatagaaaaagaaaatcagactacataggaaacagattaagtagtactcacaatcgttgcaaaaatagtgtccacaatccatggttgtcacattatctgcaggaacttcttcaatgcaaacattgcaactaaccattgatgagagctttgatgaggcagggttgtcatgctccactgaggtcacacctgctttacggtataactcatctttccctttctccacaagaattgcgagcagcttgtcaacatcccagcagtagtgaatgagtaaggttcgtgcgtggtgctctttcaatgataggacttccatcacattgctcaaatcctccctctacacaattcaataccaaagtttatcacaaaagtctagtgcacagcaacaagtacataacataaagataatcaaagtgctggaattacctgagcagctaatagagactcttttgtaatgacctgcaaaagagaaataaaacaaatttccttaattgcaaagacagaaaaagagtaggtgtagaatgtggccacactcttttgt

SEQ ID NO: 235950 - DNA, 1645 bp, Cannabis indica
ttcacatatacctcgcgtgctgctagaattaagaatgatgacctcgctctacccattcactgtatggggaattaccctttaggcgaggaggagctaagtatgcagtagtagcagtcaacttcttcagtaaatggatggaggtcgagccccttgtttccataacctgcaagaaagtcctcgactttgtcgtcaagaacattgtttgtaggtttggaattcccatgaagatagtatctgataaggaaaatcaatttgatggcgacttgttcactgaattctgcgagaggaacaaaattatcaagagcttcacgtcagtagccaggcctcaagcgaatggacaagtggaaggtgttaataaaaccttaaaagatactatcaagaagaagttagacgctgccaaaagtaggtgggttgatgagctacctcaggtactctgggcccatataattaccgagaagacggcaacaggacacactcctttctcgctagcatttggctcagaagcaatgctgcctgttgaagtgaacatatctactcaaagaagagagttgtataatcaagaagaaaacttggaacttctaaaattttccttggatctacttgatgaaaaaagagcttagtcgcaaatcaccaacgcaacgtatcaacaccgagttacaagatacttcaacaaaagagtcaagaaaagactattcaatgttggagacttggtactaaggtgagtatttgaaaatacgagagattcatctgcaggagtgctcaacccaaactgggagggtccatatgtcatcgaagcagtagttggaattagagtttataaattagctcgactcaatggcttgctattaaagaactactggaatgtggaacatttgctaccctactaccaataaataaatgatgtaactcgcattactcatgtaaaattttaaacttcagttatgaataaagagaataatttatattatctaagtaattacaaagtttaactctttaaaaaacacataagagacatttatgtatgattaagcagagttcatttggaaatacatggtatactgcaaacccaccatttcaaaattttttgaaatttaaaggttctcgactaaacctctttgacgaaagaggagtcgaactgttataactccttgaccaaacctctttgacgagagaggggtcgaattgtttcaactttctgatcaaacctttttgacgaagaagggatcaaacaactataatttttgattaaaaacctatctgacaggaaaggaaaatcaaaagttataactcacgtgtaaaactaaatactaacggttcgcgcgagctaggaaagtgctaaacgagacatcacaatatcttcataaaagtgcttgaacctagaaaatagatagataacctaattattcatacgagtaaattaaaaatatacaaagtgataaaatcattaaaagtatattcaagtttgcttaaggtagattataactattatagcaaggcagaattgacaactgttcgaaaatcaaaaagtttggtagataactaactacttaaacaggaagattacaagcaagggaaaaacccaaaagtactttacatttgatcaaaatatagttgtttacattgtgaattaaaacacaagcaaaca

SEQ ID NO: 235951 - DNA, 2163 bp, Cannabis indica
tgttaattttttgttatatgtatgttattttttgttgttttttggttgttattttcatgttacttttatgttgttttcttgttgtttttatgttgttttcgtgttattttttggaaaatcataaaaatgtaaagaaaacattctttgaatgtaaaaatataaatattttacaataaatggtgccttatgtaattattccttttgataaactagacttttatagattactatgggcttttaggcttactccattaggtgttggacttatagaattaagatgtaacattactattagcacaagttagtattaagtaaacattaaaaatagtagtatatcaccttaaattgtaaaagagtagtaatagtagtagtactaaggtagtatagtggcatatatatggggttgggttggtctcaatatttgaaatgatatattatatgaggaatgatatttagttacataaaagtgtgtgtatacgtgaagcaatattctctttaaagtaaattttattattatatacgttatgaagactattcgaattttaatttgaatattgggaacatctagcactaagaaaatggacctagtagatatagcagttggtgaaactagttacagctagaatttgttggagaatttgtagtgattaaggtttattaaatgataaataaatatatatagtgaaaatttactaactttattcttggacttgaaaagaggaattagtggagagtattgttgtaggataatagcagaagttgttgtacttggacgtctacccgggatagcactaggaggatattcaaaatttaaagatttaaaccttaactagggttaattaatattaacgatatgggttagttggtgtagtattgtgggtgtagaggtctataaatagagagccatactcttcacatttcttcattaaccaacgagctgcacagttaaattaaaaatcacgttaatacgcctaaactagtagggtgttatatttgcctctcaatttttcatcaccacatattgagtctaagaatctagtgcgagtcaagccttcttaaatctaggttattggaagttcttcacacgtttcggtaatctttagtcgaaactatagtcatctttttctttggtgagttttacgcaagcttggacgcaaaggttcgttggatagtgatttaaggtattatttttgaaggaaatatatgataatcatgatactagaaaataaattttatagtaggatcagtttcaagttactatcattgtttaaaatgactatttaatttaagatttgaaactagaatttacgagtactgaaagaattggatctacgcaaatgaaaggcaatcaagctattttctcgacatttgaggtaaagaaattaagtagagactttaagttttttgtatgaaataatattcaaaaggagtgggaatgaggtataagacttctaacctatttttgttttatcattattatattatattatttgaataatgggcggtacaatgggttcacattatttaaacaataaatatgtgtatgtggtttgaataatggacagtacaatgaatttacattatttaaactatagatatgtataagtagtttgaataatggtcagtacaacgaattcgcattatttaaactagttatgttgtttaaatgatgaacgatacaatggattcgtattatttaaataatgatacaattatgatatgattatgacatagttatgatatgattatgatacggttatgatatgctatttaaataatgtatggtaattagatactatttaaattagatatattgtaacttatgtgatatggtttgatcgagaagatagtggtaaatacttgaccgttgggtctatatggtagataggggggcatttagtagtaggtacgattttatttaacccaatcctccgccatttagtctagcagttcgggtttatttgccaaagtcggactcgggcgtaactattattatgtgacttagcttagaaactagttattagttactagtgacaagattaagcttatatatattgctagttctctaaatatgtgcatctaagttttagttgtgtttttttttttttttttgtagaatacgtgacaagcatttccttactgaatttagtagctcacccttat

SEQ ID NO: 235952 - DNA, 812 bp, Cannabis indica
aacttgctctgtatgttcttagagtgattcatacaaattatctagttttgaagtcaaatggcagaggaatgctacacttattatagatttatagatggtttttctcaaacagtttataatcccacataaaaatatttttactttaaatgaatgtggtataacacaaagataaactaaactatctacaactgatggagattgtcattatcaatattttattccaaaaattgttattttctcaataactaactaagttttgtttactctacttttataaggcaataataagagagaaaatgatagaagaggatattctaataattaattacatgtaaatttagttatctcataaattaatttattttatttttttctcaaatcataaagagtgattgtatgtttttttttgtttaagtagcaatatatgtagaatatcaaattctggaataatgtaaatatttgaatgtggagacattttaaggcattaaaatcataaaattaaagtgagattagggaatgtatctaaatgttattaagagcattcctatttttcaaatcaaaaaattaatggcagaaattagggattagacttgaatagtggattattagggattcattgttaaatgtgataaattacaaaagtatatctataaatagaaaagtgtaaaactaattgcacattattttgtttctactagggttgtacaaaaaaattcgtaaaccgcccaaaccgaataacccgcccaaaccaaaccgaaaaaatcgataaaaattacaaaccgaaataacccgaaaaaattacaaaccgccca

SEQ ID NO: 235953 - DNA, 1298 bp, Cannabis indica
agttcaggggacataatttagtatatgtcaaagttcgaaggacatgatttagtagatatcaaagtctgtggaatatggtttagtacataaacaattactgaaatagtaaaattgaatgaaattagacaaaagtccttaaatccaacaatctcaatagttaaagagtattcttaacgaccttaaaagttcaggagacatgatttagtacatgtcaaagttcaggagacaaaaatcctaattagcctttattttatgcatatatacatgtttttttttgttgagtttatacatacgattagtaaatatattgagaattttttctgttgttaaaaagaaaaataatatattgtgtattaatgtatttgtttagtataagatacacaatctatcatatttttgaaagttgttacttttcttaaaacaataaataccttagagagagtaaaataattttaatatgcacatattattatggaatttatttgcaaggttcaccttaatattaaacaataattaatttaaattagtttttaaaatttacttttaatattttttttacattattttatattaatattaatagttagtttgtcttaatattttattttataagtatattttttaaaaatataataaaaaaaataaaaaaaattaaaacaaattaaaaatatatattttatataaaataaaaatgattaaaattagatgcaatataattttaaaaggaaaagaaaaactaaaactcatctacattcttctattctattatccgtcctctaacaactgaaaaatcgaattgtttactttttaatataatgacatgaaatacactcgataaaccaaaatgtttattatattttctttccattttgttttctccaaaatgttttttctttcgatataatgacatgaaaatacactcgataaaccaaaaataccagtacactattcaaaatagaaatgattgagaaataaataaaaatacaaaaaaaaaagaaaattatctaaaaaaaaatctgtatcaataatttgtataattcattattgggttttgggcggtttgtatcgacgtatttagtttttatttattctaattaactattatttattattattgttcactccattaaaaaaaccaaacaaaatgcagcatagcagaaagaaaaatatacttaggcacaaaccaaaaataaataaataataataataattaaaagaggataaaataccgaagacgtatattgtataaactataaagcacttggcctatttttctctctcatcttctttctctctct

SEQ ID NO: 235954 - DNA, 703 bp, Cannabis indica
ttatatttttaaatatttatttacgttgaccaataaaattgtgcctcgtgtacattgtgtacacatagacgttccaccatggctgttaacagccaaaaatggatggaaggggctaagtgctaacataacttgggtttaggaggttttaccaccaaaattttagaattgggggttagttgcaaagacctggtcacttaaggaggttatgccgcaaattacccattaattatatatgtaatatataattcaaaatttaataaagtgatattataaattttaaaaataagtaatttttaatttaaataataaatgaaataaaattataaatgattcataataagtagtatgtcattttaaatagcataagatattataaattagtatagaatattatcaattagcataaaataagtataaaatattgtaaagtaagataagatattgtaaaatagcataaaaaagattttttttatcttaacttgatctatttggttataaaccaaagataggatagaaaaattatagggtaaatatcattttaaaaattactaattggactctttgtttttttaaatgacaaaatggaccctgtatttttcaaaatagtaaaaataggacactgagtttaatttttgacaacttttttttttaatataaccaacttgaaaacaattcctaacatgaacagatacagaaaatataa

SEQ ID NO: 235955 - DNA, 1350 bp, Cannabis indica
agcgagaaaacaacaaaaacccacgatgatggtgatagagatggacaatatagatctcatctttagaaagaaagcaattagggatgtaaacggggcggggcgggtgcgggaattgctcccccacccccatacctgtttcttaaattcaccccatacccgccccattacccgtttaaattaaagtgggggtagggcgggtattacccgacgggggaaggatccccatcgggtagccattacatatatattttagaaaaataaaatgatgtcttaaaaagaattaaaagcaaaatcataaaaacttagtaaaacagtaaactcaagtggaatagtgtgtatagtaaaaaaaaagagtataatcaataaaaagcctaaagcatgaagttattttaattgtagtagttatgattttaaattttaaagatatacatatatcatatcggggcgggtatctattcccccgcccccgccccgttttcgattcgggtatgaatctttaaacccatacccgcccccgcccccgcctttgaaagtctacccccgtacccaccccattagggacgggtacccgcgggtataattgccatccctaaaagtcaataagcaataattggtgaaatttttttggagttcaagaataagtcgttgaccctaatgatttcaaaactaagcaataagcaatttttttttcctttttttgatacatgttgtaattttttttattattaataatatatatggtggatgaaaattaacggacacgttaatctcccaatttttattaaaagaaaaagaaacgttaaaaaataattgttaaactaagaattctgttaaatcgctacaatttatataaagaagatatatgggtgagtattcaataattacaataaaatataacaatgatggttacattttttatgacatgctctaacaagttactaacgagtgaaatttctatttttttgacttaaattaattatatacctaaaataaagtacttttttaattaaaatttcataaaaccttttttgagaaattaatatttataatttttttacttttttaattttaatgaaataaataaaatcgtattataaataatttattaataatttttagtaattttaaattaattacaaccatctaataataatctaacgtctaaaagtaatcgtaatcattgttatatatttaatataattattaaaatcccttatatatatatatgtgagctaatataataggtattgtaatttttacctatcaatagggatattaatttatagcccttgatttaatccaatggttcaaatcaactcttgaaaactacaccaaaattaatatattttt

SEQ ID NO: 235956 - DNA, 1724 bp, Cannabis indica
tgatttttccaatgtgacaacttctcagttgtgagatgtttcaaagctcggtcgactgagcaacaccataaacttgaagcagcgcggactcgtttcctccataggtgcagcatcttcacggagtgggacattacattcattgcaagacaatgcaactttatggtgcacaatgtggcgaagtgggccaagactacgaatacctcaggctttcttgacactgagtaattggacaaaaagatcatagatgactatcaagaatggatcccggataatggatgagtgtttgactttgtatttcggcttttgcctttgttttcttattatgttgtttgttttgttcttcccagcagtttgtctgtgtttactgggctttgttctctgtgttagtttgtttctgtattggatgtttatcttttaatgaattgggtgctttggcacccaccctttcataaaaaaagataacaaaaaaaaaacgaaaaaaaaaattttaaaatcccatagtaagtgtaaattacttaaaaaaaaaaaaaaacaacggtattggataaaattctgtcccacaataaaaaaaaaaaagaagttaaagatttcagaaaattgtgtaaatatctcaattaaaatttagaccgaaccaatcctttttatattctttaagatatactcacttttgtagatgatttctccattatatcccttaagttaatgtaaattatgtactagacttaagtggaggatgaggttatattgaacaactcacgcacaaaagtgagtacattttaatgaaatataatatgaaggtgtgtttgattaatagatacaaaaaagatgtattcatcaacttatctcaacacactttgccataagtttataggggaatgcccaatagaaactggcagagacattacataggtaacgagaaaacttttatcattttctagtacaacgaaaatattggatactcattaataattaaaagtgggtaaataacaatataagtacctaatatttgtaaaaatataattttcgttcagttttgtcaatagatactttattactagtgtattaaacataacacatataagacctatataaatattttttttgtaagtatataagatccatattctaaattattgggtttggacaaaaatattatcagttactttcaatttttttaataaatttaaaatagaatctgtacaaaaattatgattttataaatattagatacttatatcgtcaaaaaaaattattatgtttataccgctgaacaaaaattaaaattgtaaatccttatgctatagttattcctaaaaaaaataattaaaattttaaagtaaaattctccaaataatttttaaaaaattctaaaatgttgaggtcaaaagtccactaagacttctctcctggtgtattattacatgagcactgatattgagcatcagtagtgattaatatttttttatagataattgaatagtaatattttctaaaaattattttttaaaattatatgtaacagatacttaattacatcatgatgacaccgagaattctcattattagatactgagcatttaccttaaatcttttccagcaacccatgtcaattgttaattgttaattaaatattcgtaaatattgttaaggatgcacaatttttttttcctttttatttttatagttaattattctagaatatttaaaggtttatgtctatagcc

SEQ ID NO: 235957 - DNA, 1131 bp, Cannabis indica
gacccctacccccccaccccccccccccgacgcttttatgtgtgggtctgcctatggctttattaaaatagattgttaaaggctttactctgaaccaacttaaatgattcaaaaaaattgtggaagaatgggaaaaagagttgtctagattcattgtaataactagtatcaataaggacaaaatattaagaaatcctaagggttgagataaattatttcgctgcatgattataaatattcttactttaatatctgtttatatttaaattatttagaaatatgttctaaaggtgtttaatatacgggtaaatattattttagatcttatgttttataaaagttactgaatagactctttgtaatgttaaatgacaaattagactatgtatttttcaaaatggtactaaatagtaccctgaactggctttttgtcaaaataaaacttaataataactcgatctagaggtgttattgtaaaactggcaaaaaactgtttgtgttaggaattgtcttcaagttggttatgttgaaaaattatctaaaattgagctcacggtcccatttgtatattttgaaaaatacatgatctattttgtcatttaacaaaataaatggtccaatcaataaatttgtaaaacccagagttcaaaatgatattaacactttataaatttatgtattgtaatatgtaaaattaacgtgaaaataaaagattctagtctataattcccaacaagttctagaatagtgtgtgagaacttaatactactcgttatcaattaattttgagattacacttcatacttcttgaagttgcccaatttgttacacaacgatcgtgttagtaaacaggttttgtcgtatctacagggagacaaattacaactaaaaattagtttagtaaatataaaataaatgtgatagaagaaattaagatacaaaattaaaatgatgaaataagcaaattgatcagataaagagatcagtaaggtagaaatgtagttatgcaagttctaatctaataccgatattgctttcaaacacagttacaattctacacaattaattacaatcaaaagatatatatgttaaaaatataaattagttaatattgaataaattgaatctcac

SEQ ID NO: 235958 - DNA, 1771 bp, Cannabis indica
aacaaaaaaaaaaataatatatagaataagcattttttattattaatttttcaaccattacttattgttttatttttatttttttaacactattcatattgttagttttgctataatcaaccacgggctatctataaatatgctttacgtaccatcaatttaatcatttgttttagatactaaaaggaattaaaatattttctagttaatataggttgataattaattacttttataagtcttattaaccattgaattatttgattcatgtattttattttattgcataaaaattttataaaattttaaattaatctaagtgagttatattagatcactcataagtagttagcactatcgtgttaaaaatgtcagtcgttaaaattactatatatgaagccttgttagttcgcactattggccccttacaattcaatcctagttctgccccctgcacataggtaaataggatggacaaattcgggacttaaggtttctgataatttgtatttatgttcataacaatctcagaaataatataaattagtagaatatatatgtgtagaattaactataaaattgtgttagttttatttttgtttatgcaatattaaatttattgttttattttattatgtatatattcaaagtattaattatttagtatgatttaatattaatgaaatttcttgttaacaaatagaattagatcacttactaattagattatataattatgaacaatattattatttgacacattaatatacactcaatgactcaatatatattgtgataatgtaacatcttatataagtggttaaatattaaaatgcaataatataatataacatctttgaatactcttacaatgtttgagaccttaaatacattttagtatttttcacaatcactacactttaactcgaatgacattatttcttattcattttgtcataatggtgtgatataataataatttgattaaatgggacaaagtaaaatatcacatatcaaaactgaaggatcaaaatccatatgtttttaggtcatatagttcatggaccacatatatatttaaatatatttataggaataagtgtaggatttatttataagtggggacattatgaatgaattattacaaatttgattacacatgctaatttaacttttgaagaattgagtgactctatcattgtcattgattacttgccgcccaaaatattcctttttgttcatccatgtaaataatatatattataccatttgaaaaatatgaattaatatataaaattaactatataatataaattgcaaatatatatatgtatataattaatgtcatttgagttttgaaacgaagaattaatagagaattgatagttttagaatgatatgcttagttcattacctagctaatcatattaactcaccaacatttcttgatagattaagtcaccaatattattacttggagtaaatagcggcataagtacccaaagttttatatttgtaagcggcataaattcaatgtttatttttagcgacacttaatatttgtactgtaattttcttccagtttcgtcagtatagactttgttttgaatgttaattccatttttgacctatttaattgacacaaatattttattatttcctattaatttcggctggtatgtgtttaatatggttttctattttgtgtattcaaagttggaaggaaagttgtttagcttttctatttttggaaaaaaggtaaaaatggtaa

SEQ ID NO: 235959 - DNA, 1454 bp, Cannabis indica
tatgccttaagtgtttcgcctggctattgctttacgttggttatcgaggacgtcttgggttgcctatcccttgcggtctcgaactactatttaaagtccttggacagttgttcccaagatgtaattaatggaatgatgagtaaatttgttgaaccagctgcttgctgctccaactagcgaggtaggaaacaaaatacaccgtaaattatttgtaacattactggctcgcattatagtgttgaaatcattcaaatgcgagaccggatcggtggtcccatcatacgacgagacatgagggtttttaaattcctggggaaaagaagtattcatgatgtctggatggtacgactcgagttcctcatcttagtcgtatctagattgttttcctaattttcccactcgatacctcctgaacttatcttccaactcgtctattcgcaattggataggatcctcttgctttggactgagttattggcaaagatcaagttttttctgattcaagtgctctcgcagatccggttggtaataattactagcagacctcgttctactcacagactgtgtcctacttacggacctcgtcttgctcatggactttgtcctacttactcatggacctcgtccttgattaacttgcagttttactggttcccgtgctttctcgatcattagcacgacgagcactttctcctcttcgagttgatcgatgtggttccttgagcaccccgaggtcacacttgcttcttcgcgccccgttcttccccctaggcgtggttcgtcgtggttcccccgctgaggtttgtacgatccctcttcctatgggtttgggaagaacgctgacaatttcgcgttggtgacctacgttccccaggttgtgtcctagggtcttcctcctttccacgaggaatttcctgttcattagtttctagttgccccctattctcatttctatgagatggttcgggttgatcatttggattttcagggggaacttcatttcctcaggttgtttttcctaagcagtttcctgtcttttggttcatgagccacgaggtctgcctcatggtcttctcattctagggtcaggttgattttgattgttattcccttgtgtcaccctagctgcagctgcatcacgctttaattcaacgttctgctggtttgcctcctctaggtggcacctaagatgtcgattttctatttctacgataagtatgtatcttgtagggtcataagttccctcatccgtgggctgagcactcccaaaattgggtcattcatctctcattctaggattctagccattcccattgctgagttctcctcgaacgtgttgtccgtgtgttgggaccgccctcaggttgattcttcctggaatgagtgatccgagtgctagggccacccgtcaagttggggtccttatagagcgagtggtccgtgtgctaggggcc

SEQ ID NO: 235960 - DNA, 619 bp, Cannabis indica
aaatattaactctaaaattacgaatatatactcccaaattttattgctagactactactaactatgctaatattttttgcatggatactcgaattacactagattaattctggatcagttttacattagaaaactgtttgcaaaaatgaacataatgttattaaagggggaaatttccaaagttcgagtggaattttttacaaaaaaaataattcaagaggcaaaatcctacaaatttcatagtttgggaggcaaaaatcatatttattctagtattaacggtacccttttttagcgatatcggggcatgctttaacactttcttgttgttttgactgtagtgtggcaccgacgcgccggtcagtacttcccaaatgctaggagaagtcagtaggttgtagactttaaaaaaacaatggttttgtattcctgttctgttctgatctgtgttatttctttcataattaagctttgcatttgtttatttctaaagtaatcacttgtgtttttctgttgtaggcttcttaaaccgggaggtatttatatgttggtaaactagactctctcctagacatgttttttatcaatttagtaacttttttgttctttctttcttttt

SEQ ID NO: 235961 - DNA, 1506 bp, Cannabis indica
aaaaaattaactaaaaatttatttcgaataacaaaatagataaaaatgtatcggcgtatgtacatttttttcaatacatatatttttttagataattaatattgttgttgcctcctgaggtaggttttttttgaataaatgttttatattttacagctggaatagtgtttttttttcttcataatttttttttttggcacacgctgtataattattgcatcataataataataataataatattttgatatcttagctagctaggttttcttcctaaaagatgggattctaatctaatctattaatacatatggcattatctacggctcatattaaggaatattaatatattaattttaattatcatttttaaaaaaaattaacacggtccatccactagtcttaacaaatacaccaaaaaaaaaaagcaaaattgaaattgaaaacttattttccaaattaaattaaattataaccaaacagtgcctaattcattcaaagtttcaaactaacctgaattaatttcgaagatgaaaattcaatctcaaggtgtgtggcagccgggacacgtggaaagctgtgattggctgaggcagcaaaagtggggtccacgaatgagaaagacgaccgacaatgaggtgtcttgtccacgtcagcactctcatggagcaaccaatagcatggcccagacatgttggacctccgagtatgacatcattcatacgtcactttagctttacatttataatgtaataattttgtaagagaaatttacatcaacattttttatcctttaatcaatttttttttcagtattattcttaatattctacactatccgtatagagtaatatatctgtataaattaaaaaatatgtgtattaaaattggactaaaaaaatatgtcaaaatatgtcatatataataatactaaaaatatgtcctttaatccaaaattataaattttaatataaatttaatatgctatttaatgcttatttaataatttattaaaaatataaataataatatataaagataaatataaaatttaataataattacaaaattatttaatgtaaactagcatgctaattaaattttaataataaaatattaaaaatgggcataataataaatataaaagtataacattaagtttaacctgtaaataaatgtatctaagtttaatttttagcggtaataataattaagttacatttttgaaactctgtaggtacttgactgttaaatgttaagtcattatccacgtgtcattttcttattagtatattttaattattttttttaaaataaatatttaatgacttggaccaattaaaaattgccacgtgataatttacataacagttaataactaggtatctataaaagtttcaaaattacaacttaaatattattaccgttaaaaattaaacttatgtatttatttataattagaagttaaacttaagtatttatgccgtaaattactctaaaaaaaat

SEQ ID NO: 235962 - DNA, 557 bp, Cannabis indica
agacccaagttgactctctcaatttctcaaagtatgttttcttctaatcttccatttttgttctctaattttcttttatttgatttttctttaaattgtttgttatcgttatgagggcagagggctcatattaggttggcttctaggtgtttgtggaaattccaataagagaacaaggagagaatttagtgcaatcactgttgaaacaattctctttgatggttttccttttttttttctgttttttaaaattataaaactcatgcttagactgcatttatattggttatcggtcttgacaattgcaaatcaatgttgttgtcatcccttcttcttggtattcttctcttgtcacatcatctacgcatcaccattggtccgatttctgattacctctttcttttttgatcatatcttcctttaaacccctcaaaatataaactcaattaaatctgttaacttgatttggctagagggattgtcgttctactagctgtgtttttcattgttaaagtgggagttatttattaaagtatctttaagtttaatttttgaaa

SEQ ID NO: 235963 - DNA, 544 bp, Cannabis indica
atgtttcatttcattaaaaaaaacaaaaaaacctacctgaaaagaaggcaagaaattaggccctatttaaatggaccctttgcaatagaacaggatgcacaggcttatagccggcctcgcatttagagtccggacgtgaaagttatgcatgatgtactaagtaaggtcgaagtagtaaaagaatgacaaaaaatggcttgtggtgctataactccataagtgaggcgctatagcactaattttggaaaaaattatatttttgcacataaacaaaacctcgggaaatattgcatggcaccattgagttgtctgtataattttattttaaacctaattttaaaagcatcatattttctattttttttgactataaatagattcatatatttcatctcgagacaattagagagaaacataaatcaactttgagattagaaaacacactaaagaacaagagagaagagattccgaacaatcatcatcaactatcattagagtccttttcttattctttttctttattcttttgtttagttatttaatt

SEQ ID NO: 235964 - DNA, 1179 bp, Cannabis indica
ttttatttattaaaaataaaaaaaatgttaaaaggtattagtgatatttacttattttttaaatattaatattaatataattaaatattaaatcttacataatttaataaaataatttttaaaaaatatccatatatctaaaaaaaaatattaaggagtacagattttattactaatatcaatcatcttaaaaataatagagaaatgctaaaaggtactagtggtgcctaacacattcttatgtgtaaatattgctattgatctaattaagtatcaggttccatataatttaatataataatttttaaagagtatcattagctaatcacaatgcattatgttaagtatgtgctaaaaactactgtacttaatagccatgctcaaaataataataacttaatatggtatttatatcatatttgttgggagtataaccttattgtctgacaagggtatactaccaaccaaactatatttctctatgagattcaattgagttccaatggattattttctgctccctctttatagtaaaaaaatgtatagatttcacatacatatgtatgtattttagtgtaacagtacacactgtcaagaggttctcgtaatgagatcatcaaaatttagaaaataataaaaaatgagaatccaggcaaggaaggaggtttgaccagtcttcgttgagtgagtgcaacgtgtttgttttattgctgcaatgagccttaaacaaagcccaggaaggacactatacaacgtaccacagtagagtccaatcccatcaaagctgcatcctctactcattgactacggtagtaattaagtcattaataaaaaaaggaaaaaagaaaaatccacttcataatttgacatttataagaagagaaccccaaaaaccaccgtggtccagcaagcacgtgatattttcccctacactcctgctacagccacgtgaatccatgagaggtggtttgccaagctgggttgttttttatgtttttgtttagtttattctcaaaaaagttaatataatatattcgaaaaagggtaatgacagcaacccaaaccccccattaattttcaatttctttatccagaaaaaaaaatggtaaaaggatacagcttttgtcctctgttgttagcactttttagttagctcctcaacgtgctctctctctctct

SEQ ID NO: 235965 - DNA, 877 bp, Cannabis indica
gtcaatagacaagaaccataatcagcgttacacatatcgatatagtcaatataatgtttggtattacatatagaattattgtgtactttgtcgttacgggctttccatatcgtatctgccataaagcataaaggaacaacccttgtacatccacaactctagctttaagatcccacaagaacttaacccaattccaaacacaggttccagattctaaaatagaaaaaacaccctagggtgaagacctccaaaggtgaaaagtaaagttgcaatataggaaaagatgttctattgttttctctcccttattacaaataggacaagaaacttcctcaatgtgtaatccttcagccaaaatggaacgaattgacagggcgtttgagagaatgctccaccaaatttatttataatttttatacatattatattgtaaggttcattgttttgacagattattttaatagtgagtccagtcttatctgtggcattaatctgttataactgcatatcagtattctgttaatgtccacatgagtctgttatattttaacagttggcctaaattgctcttaggtcggttgaactacagtataaatagctagtttcattctatagtgggttagctagctaattgataatcttggttagtttagatttatcgagctgtattgtggtatcttgtatagtttgtcgttgtatttcaagtttgattgtataccttggtgatggatatccatagcagaaagatcagagcctggtggtgctgagttcagactgaagggagttcagtgtcatcttcgtcatcaaatctgaaggaatttcagattgaagaaaaatgtcgaagaagaacttaactgctacacaagaaatcttgtgt

SEQ ID NO: 235966 - DNA, 804 bp, Cannabis indica
tccacgagggacaaaatgcctcgcgtgtaaattcattaaccaacaacttatccacttcctgcatgagtgccccttgtctctcgaaatccaagggttgcctgttctatctcttggctgggtaattcagattgacatttaagtggtggcagataatcttagggtcgtccctatcatatctccatggctccaggcgaactgagcttggtttgccctcaaaaagcttattagttgctatttcaattattcatctaggttcttcccaacgtatacacactttgtgtgatttcatggatctagaacaacttcttccaactcctcaattggtttcaataaatttctttcatcttgaatccgaggatcaagatcttcatccttcttctcgccttctttagtcaagactgccattagctagtaattggcctttctgttctacagctctatgtaatagcattcgcaagctagcatgtgctcacctcacactactcccacacccattagtgtctgaaaattcaaggataagtgcttaattgaactaactgacactagtccaattaacgctagtcgacccagaagtatgttgtaagttgatggcaattcgacaaccaaaaagtcttgcattatcatggtggataaaggtgcttcgcccaatgttaatggaagcttgattactccttgactagagacactgtcgcctgtaaatccacacagatttaccatgcaaggttttaatttagctttttcaagtcccattttcttcagtgtatccctataaagggtgtttactgaactttcattgtccaccag

SEQ ID NO: 235967 - DNA, 1304 bp, Cannabis indica
aaataggaaactactaaatagaagttaccctaatttttttacaactaatatacagctaatactctaacaataggaaaagatgttctattgttttctctcccttattacaaataggacaagaaacttcctcaatgtgtaatctttcaaccaaaatggaacgaattgacagggcgtttgagagaatgctccaccaaatttatttataatttttatacatattatactgtaaggttcattgttttgatagattattttaatagtgagtccagtcttatctgtggcattaatctgttataactgcatatcagtattctgttaatgtccaagtgagtctgttatgttttaacagttggtttaaattgctcttaggtcagttgaactacagtatataaatagctagtttcattctgtagcgagttagctagctaattgataatcttggttagttcagatttttcgagttgtattgtggtatcttgtatagtttgttgctgtatttcaggtctgattgtatagcttagtgatggatatctatagcagaaagatcagagcctggtggtgctgagttcagactgaagggagttcaatgtcatcttcatcattagatttgaaggaattttagattgaagaaaagtgtcgaagaagaacttagctgctacacaagaaatcttgtgtgtataaccaaaaatcttagttgttgttggtaatacattactaattgttgtaaagattgtattcaattcctaattgtgaactggagattgtaatacgaatctttgggatttagtggatgttattaccctaattcgggaaattcaagcactagtcggttgaaattcgttctcaatgcagacgaagcttgtaattcactgtgttctttactacttactctttaatctgattcttaaataataaagttaaaattaatcaatctaatcttgagcaactcggtaatttgaatcatgaattttagataagttgttctttcatatacaatgtatatgtattatattttgtttgctagctagtgcgctttacctagaggacaagtactacattatattagactaagggataacatatttgatcattatttctccacaaaatatacagagaattaatttaataaatatttatttatatagatgtttatagaaaaattgtagagcactatatttgtttatatcgatagagacatttaaaaaaattaaagtaatttttagtatcgaaaataataaattagaaatttaaaattgtcaaaaataatatttaaatattaaattatatatataattatttattta

SEQ ID NO: 235968 - DNA, 2255 bp, Cannabis indica
gaaacattgttttaacatccatctgatgtaactgaagatcaaagtgagcaacaagtttcattataatcctgaaagagtctttcgatgaaactagagaaaaagtctttatatatttaatgccttgttggtgttgatttttaacacgcaagtgtacatatcgattgtaagtaattactcacacgattgaggtcgaacccaagaattgttgttaagtactaaaaaattaaacttttaaagagaaattacaactaaaagtaataaaagcataaaataagtaaattacaataaaaatggacaatgattagaattaaggttattaattttaattgtatctatctaatatggcataatataatttaatttctatttatcaattttatgcaatagcaggtttactcaagtaatttatagtcgcctaagatatataaatcttaattacaactaaattttatactcatgaaaaattgaaatatgtaaaaggcattaaacacaaaaatcctatttgttatccaaaccacataggtactctcgtcctatatcaaaatgtatctctatttcactatagcataatcgacacttacttgtcagatctcgtatcgatatcataaatatttaattgatgaccaggcaattaaaataattaataatgaatgttggggaagaatcaaatcatattaaaaccattaaaagatgtcaaacaatctccattaataccataataattgcttagctactcttgttcattacaacaattcgatacaaatcaattaagaatataagaagaaatcgttgaaaagctctgttgaaaagtcttctaggtcactttgttcctctaatttaggtactctctaattgcctgccaaaaagtatgaaagtcccctcttttaaatagccaaacaaagctaaaaaagataaaaaaaaaatcaatatttggaattctacatggacgggccacgacaccgggcttgtagtgtcgcggcctgtgtcttggccacaatatttcccaaatttttttagcacacaggcctcgacacgcaaagggacagtcatgcccctcaatggtggattttaggctgtgatttccctacgcactctctacctcaatactaaaccccagtgttgaggcgcgcccatatcttggtcaaaaacaatcttctctgccaaattttggccttttaatgctttgacatggaattttggtgttgaggcactactccattatttcaaatttgtttgccttaggagctccaaatgcactagaacttttggatttttccttggatgaatttcttagtgctctagcattgagtgtttattattttaccttctttgtcatattttttccaaacttctccttttttcttctaaactaaacctgcaaaattgtaattaccaaaagagtaaaattgcacaaaacaagggttaaactatctaaaaacactctaaaaactgtactaataaaaacttggcaaatttccctaaactaaacatttactcgtctttgagtaaagaactaacaactaacactacaagtcaatcaactgaaacattagtcacaatctttcaagtaagccaaataacatgcttttgtacaaaaattctacctatgtgttttaatcaagaatttcagctcaatcacacccttgactcacctcaattttttttcattcagttcataaaacaataattagcacttaacttacaagtgaaacaatttatgcatgccaaataccacctttaatccactaaccaaatatatttcatatgcttgcaatactcattattctctactaatataaatagatgtataatcaagaatcaaaagacatttctaggcttgtagcgataggctcaggcaagtggatggaatagtcatttaggctcgcctataccataagcttctccaatcatgtcacccaaagtatttttcacacaatcccaatacctcttttttctaattacatgagagaacttttttttcaacaagattttaacaactttatattgatttttttttttctgaattggacattggttgtcagatttttctatcttttctcttttttcttttctttcatgttcttgccattcagttttttttcatcttctctcaattatcacacttttttccacacacatacaacaaacttcccatttaaattttccataactatagatctacttatggtataattagggttaaatctttggatattcaggggtttatctttttctttttttaggctcaatatgtg

SEQ ID NO: 235969 - DNA, 1925 bp, Cannabis indica
tggtaaatacaagtctttgtccataggtttaaccgatacaatgactatataaaatggcctagttttttgctagaacagatcaccattattattttatattttatttatattttaatcacttcatgtatgcatgtaattttatttttattgcttttaaagtaggttgaatttgtaaatgaggatgtaaaaccattggatatgaagggttttcttgaaatcataatgggtcttccattgtttatacaattgttttgctcgagtatgacatttgtgagtgaaattgtgtgtatataaatataaatatttaccatttgcaattacctcaccactaaatcaagtttataagtccataactacaaaatttagtgcatcaccaaaaaatgactaagaccaaatccatttccaaaaactattccttgccactaactcttgttacggctcagctaagaattactgtctggacggccatgtatgtccaatgaacttaggaactccttcatcaatttgcacgaaatctcctccatcttcctctcggtgcaggagataccagtcttaggcgatagaaccttgctgcaattgtgtcatgttgtaaagcgctcttaactcactgaatgcttcaaaaaacaaatgtgctgacttgttagatgaggctcgaaagaggattatcgagcttgcttcgaccatgtatcaacaaaacaagctccagggtcaaggaagtgaccaggtgaagatggtggaagcatttctagaagctgtcaatgactacctcagaggtgaagcgagagtccttgaggtgattcatctcgattgaggtcttgggaactcacgaagaaaataatcctcacgaagaaaccactcatcgtcctggaaaaaagccagtgagtccctagggatctttcgatttatcatttgaacagaccacaagtttgaggaaaacccagaatctgggaatcaaacttgaaggtcctagaatgagcagtggcagatcttttcctaatctagttgatgaggatggcgcctatgatccaacaatgtacgtaccaattgtcgaattagaaaactgccatctcaggcgtcgatcggaggaggcaaatcggcataatgctgagttagagcgtgaggcagctatagtagggcagcacaagggaatagcacccaaaatcaacccgactctggagagagagaactgcgaggcagacctcgagactcgcaaaccagaaggcaggaggcagcccaaaagaatccccagaatgctcaggaaagacaacttggggaaactagggcataccttgaaggcaggatgccaaatgatcaaccaggaaccagggaacaggaaattcctcgtagaaataagggaaatcttaggacacaacctagggtgcatgggtcatcggtgaggaatcgtcaacgtcctccccaagatcataaggaaagagctcgcacaaatctcgataggggaaatgaaacgaaccatacctaagggagaagaacgaggcgggaagaggcgagtgtcgccacgacgcacacaataagccacagttgatcaatgcgacgaggagagaatactcgctgcaaccatgattaagaaggcataatacaatctatgagtagaatgagatccgtcagccgtcatagccattcggacctacgagaacactttaactggaaaaaacctgatctttgccaacaactagttccaaagcaaggggattcaatccatttgcaaatagacaagttggagaataagctcaggaggcatcaagtcagagagcaaggaaaataattgggatttgattttgctacagaattcgagttaggagcgtctggatcaaagaggaaagacgattctaaggggtcgcccaaagataagaagcacatgaaacacgacaaatatgtacccgtttatgctatttataccgagctta

SEQ ID NO: 235970 - DNA, 714 bp, Cannabis indica
taccggagcttgaaaaggctgttgatatttggaaagagctgatctgtaattcagcaggtagtttccagcaaaggatgacaactccatggcctttttggctttgtgtccatgtattactcggtttctttctgtccagattgcccataaagtacatattatttgttccatttcagccttggagtgaatacttgtaagatgaaccaagtaatcccctttatgcattgatgaggctttataccaatcaaagttgaaaccagaagttctccacacagctttggcatacttacaaccaaagagagcatgtcccacagtttcccacgcttgtcgacatattgagcaagtggaatccgtaataattttccttttgacgaggccggtggcaacaggaagggcatcatagaagactctccaagcaaatattttaattttttggggtagcttaagtgcctaaaaaaacttccaccaggggctgttttaatatgaacccgaacaagcatcaacatcttcaagtgaggaagctaagtgataacccgtttggtctgtataaattctagatgtgtgatgatgccaaattaaagtatcactattcctaaaaaaactcaaagggatagtaagtattcgttgaacatcaagttcagaaaaccattgctgaagaaggtctagatcccattctctattatctttgataagactagagactacaccattggctgg

SEQ ID NO: 235971 - DNA, 909 bp, Cannabis indica
ccataactctctcgatattgctcggaattggacgattcaagatgttcctctaagataaaagagagatctagaatttttatgttttgattttctccaaaatctgatcatatcatagtcaaatttacgcttgaagtttcagtattttttttttttgtcacaattttttcttattttatagttcatcttttttgtgagatctctttttatctttttccatcttatttatttgatattttctaatctttttcattttaaatctgtaaaaataaagataaaaaatataaaattgatccaaacaagagtagaactaaattaaaaaatctaaaaattaacttaaaataatactaaaatacctaataatacttgctactctaagtgagtacttacaagttttatccgagtgttcttaataacattaaatactcacacaaattttggtgtccaaattcctccaacaagatatagaaagctcattctactaaaataacattttgttattttaaaatgcaaccaaataaagaaatgaaattaatttttttttttttcattttattctatttcattacattcaatcaaacagaaacttaggcacaaatatcaacaattgcactgatgaaggtttttgttatttagtgttaggtagttaaagttttgtgatcaaatcatcttacccaacggtattagattcttgcaaccttagttaataattagtaatttctggcctaatcaataagctgattactcttgggcgcgtttccaaaaattaataatcaataaaacagaaaaaaaatattcgttaacttttattggatttgcttaaagtacaagctaaccttttcttctcgcaaatgtaaattaataataataaaaaaaagagattttaatgacattgagatgtgtatttttttt

SEQ ID NO: 235972 - DNA, 594 bp, Cannabis indica
aattatacactaagatttaggtgcctgcttgtgagattggaagctagccatcttgatctagttcaacctaaaaacctaagtattattggatttaattaatttaagaaaagtagagatattaccttgctctctctcttccatttgaccctagcacaaaacagcagctagactaggattttttggagtaatcttgaggagaattgtttaaatcaagtagggtaatcctaaggtaagatccctagcttcttgttgttgagtttttaagttgtttggttagttcaagcatgttaagttgtgattcagttactgtttaagttagggttgttacttggttattttctgttgtttaatggtgttgttttaggtctgaatcttctagttttggtgcttgattcttgggttgagcaagtttgaattttaagaactaaaacttggctcacaatggtattttgaaatactatggaaaattgttgctatttttggttggaaattactctttgatgttgttataggtgatttggaaggtttggtttagtttggacacgaattggacaattttggacttgtttgtgttacctagcgtaaaccagttaa

SEQ ID NO: 235973 - DNA, 522 bp, Cannabis indica
tcttatttcttcttctttttctgcagaaaatcccaaccctctttctctctctcgtctcctccctttgcaagagagctcattattgcacacatctgttatgagatgcgaaaacaaataaatcaaaatcaaatcaggaattaagaatcataatacaattacatgagaagattgaagaatttctaattagatttaaacaaatacctaagaacaccgatggatgatttcaaatgagagagaagaaattgagggttagggtttttgggaaatagagggaaatcaactgacgtgtgtagggtttttggagggaaatatatttatgtcgttttcagttttggatggtgcgctttacttgaaaataaagaaaataataatataaaataaataaatgctttttaaaagaaaatggggcattccgagaatctaacccaaagcgagagtcataccactagaccaagtaaatgataaaccctttgcaggggaggagacgagagagagaaaaagggctgggattttctgcagaaa

SEQ ID NO: 235974 - DNA, 846 bp, Cannabis indica
ccctagtttttcctatttttgtgatatttagggtatttccatattatttatcgatagggaaatctttagttttgattttaagtcaccgaaaagtattttagcatgtctctcatcataattacgaatattgtgatatagggccttgtaaagcatcgagttgatgtatcattcaggctaaccggcacacctaagcacataaacaaggtaagattagcaaaaagtatacatgtgaatgaatgaatgtgtgttattaattgtttacactactaacactggtatagtcatagtgctaagggtgttcgtacagtgtagatttaagggtagttacggtgttaccaatacgagtactagggggtatggagtgcatgtggtacaacactcagtaactcccaaaagtacagtaatggccctacaaacacaactgtgaagtcggtactctactgcatgtggtacagcgatcgtacttttgttgagaatgttcttaaccatttggtgagccttgcatttaagctcaggacgacttaagtacaaagtcgataccgcattacttatatatgttttatgcatatcttactaagcatgtcgactcattagtttgctaccttttgtaggtaagggaaaggctaaggtagaggagcagtgagttggagctcggtaaggattgtatatatcgcagcagtgcatcctggaaggtttcgatcttattatcttttaattcatatttttgttatcgccctgtggtttgtaaaaatatatatattatgtaactatacttatggtatatgtattttcaacagtggtcttaaattcgggatcccgacttacgtaattttataaatttaataa

SEQ ID NO: 235975 - DNA, 2216 bp, Cannabis indica
attcatccttgttattgttggtatagtttcctcaaccatttcattacagatagcatgaaaattgggagttaaattggattctttaacacacatattgaattgagtataattatgaatgtttggtgttataggtaatgtacctgattgtgtgttgttgttataggtgaagtcctctctttcatctgtctggtgcaccattttgggaatcgattgttgatttatttcttctaatccgactgtttgtgcatttttcattgtgtcttctcttttggtggattctattctaccaatgttatctacctttagccatgagccgtaagccatagtagtgtgcccatcctccttagtcaccataattggactaattgcacattggcgcatctcatggccaatcaatccacacctgaagcacatatatggtaatcggtcatatttaaattggagccaccttcttcttccttcgtgcgggaataggaatcctgggaatatcttggattgaatggaactctgcaccttgaatttgaaaaaaccgttaacagcaatacgattaacttccggttcttggacatctattacttcccctgccatgccagctaatcgagccatgtttgtctttgtaattgccttcacagggatattgtaaattctcccagaaatggtaaaagatcgtaattctttatcccattctgttggaatacccttcattcgatccaaaatgagaaatcctgcattcaaaacccatggagatctgcccagaatccgctccagtgcagtgttctctttgaaagaaagaatcaagaagatggcgttgtcggtgttcttctttattttcaaatcccaatcattttcccccatattccagagtcgacacaagatgctcttcagtagagatcgagtgaaagttttcatggtgcacagccgaccaattaggcaagattttcctatatccttctcccctgcctcgtttatttcccatccgtcttcatccgttaccgttaacttgttggtgcgatccaacagttcgtccatttggggcaagcttgaagagcacatcttaggattaggctcttccgaggagagcatcattttttatttttattcaatttataaatattaattaactaattaattgacaaaatctctcatttttttttaattcaatttataaattaaaccttaatctctttcctaccaaatttttttatttttctttctaccatagctttttattttatctctactttttattttttattcaatttataaatattaattgacaaaatctctcatttttttaattcaatttttaaattaaaccttaatctcttttctagcaaaattttttagttttctttctaccatagttgtttattttatctccactttttaatggagtataagaattttttgttttgtttcatcatgaaattcccaattaaattctaattcttattttttttcttctcaaacttagatttttcttttatatagtttttggttggagcatatgggttttttttttttttattttgttttatcataagattttatttattaatgtgttgatgaattatctcatagattagtgcaacatcaaccaacaccgtattcaacattgaaaattgttcatattttaaatttagtttttttttttgaaaagaaaatcaactttattaaccttcaaaatcagctaccaagtgaggtagcacaacagttgggacattccccaaactgaacatacgattagggtaacaaatggaagctctagcaagactatgagctaccatattagctgaccattttacaaaacataacgagacatttctcaactctttcagtaaacatctacagtcacaaattacaataccaaaacaagataacatttctacatgactgcgaatcgcttttacagcagtaagacaatcggtttcaagaaagacatgctgccagtttttattcttgagccaacttaaagcctccctcatacttaacgcctcagcaagtgttgggtccaacttttcattgtaaattttcgtgaagccttccagaaagcatccccttatcatctcgggaaccaactctcccattcctgtccgagcctcaacttcaaacatcgctcaatgttaatcttaacactattaacaggtggacaagtctaatgctccgcaccatcacccttttgaagatcggggaaaggtgtttctatttgaaaattt

SEQ ID NO: 235976 - DNA, 1059 bp, Cannabis indica
aaaaataaaaaataaaccctaataaccctaacccattcccactcttcttctcgttctctctctgtcaagccgccctgttcttactcttcttctccttctcaatctccaccaccacttcatcttcctcatctccttcaaacacccatccatgacctctaaaatcggaaccctaatatcaaccacttcaaacacccaaccggcgatggcagaggtggagattctgacgatgaaagcctcggtctcggagaggtggatattgctctcgctggttccaggagatggagccggttctgggtcgtcgagatcaagagggtttggcgatcttggtttgggggattcggggatctgggtttgggtcgtccatttctggtcttctcggaagagagagattccttcatcattgcctcacaaacaactcatttgtcacgcccttccattcactttaggtttcttcttccaacaaaaaattgcttgtcatctataatgaaaaataaaatgacgtagataaaggcgtagtctttacaagtattaacggagatagaggggaccggtgaacggagcccggccgtgggtttggaagccggagttcgacggttggtgggtttcgtcgccgtcacccactagcgagggagtttcgttaccgtcgtgagtttcgtcgccgtcagtgacaacgcgcagtcgagagataagaatctaatactttagatctaaatgaagactttgaaaaagtacatatgaatctaccaccatattttgaggaaaaaatgggttcgaaaacaaattcttatacgacctcaaacaattgcctagagcttggtttgagaggtttgggacagctgtaaaatgttgtggtcattaagagaaaacttgaatatggactaatatgcatgccatacattcctacaacaaagcaaatagcttatttttaaattagcttgaaggaaagtgttggaaaataagaaataaaatcagaaatatgtgatttattccctaatctgattcttaagcttatttataatttttatttttataaaattgtatttttaacttttaattttt

SEQ ID NO: 235977 - DNA, 1385 bp, Cannabis indica
aaacttttttttagaagagaataagaagagagaattcttttttttttaatattaaaaaaacttaaatatttttatgtttcatatttaataaataaaaaagagagaacaaaacaaaacaaaaaaaaaacaaaacaaaaaggagaactaaacaattagcctatttgcattgatatattggctgctcgtttttggcatgtttatgtatacacatgtttcaaaaaaattaagatgcatcggtattatggcttaataaaaagaaaaatggtatttataggattaatttttaaatttggtctttcagcgtaattttctctagaaattcatggtatcatattgaatattgattctcatatgtttactaaattttggaaatggagaaagtagcgaggcccacacaaattagggagaaaataaaagaaaaagttctcctcccatttttataggggataccgtttcctttcctaacttagtttattttaattttaattttattaattaaaaataaaaaggacaattatgcccttcaaaaatctataaacaaaaaataattacatgctctaataatgacaattttatcgaattaaagcatttcgattacctttcttcattatgtaaataaaataatatgattttatttttctttccagacagtttagtaaatagcataataaaatattatttctgattattttttattttatactgatttatttctcccattaattattttgattccagttacagtaaatttagtaaggtcataagtattacctataataactgtgaggtctaattttccatcaattataagtgcgttaaaaaaaaaagtattacccttaaaaatactagtattagtaacggaaatatatttaactatatttatatcaccttccaagtcttcctcttccatggtcaaagctcaaaataatgacaaatctgcccctagaaagtactttcccacgttggattacattaaataattattattaaaagactatgttccctcataccgagatcggatcgcaagtgaactcagagttttgaaagttgactttcttacagtcaaagaaaaaaatgctataaagttagtgtgacattttatagttagccacttcgattaaaattatctgaaaaaaataattagagagcaatctatggcttctgctgatcagcctaattctcaggaaacaaacaacaacaatgtcattattattacacgcatggattctaagctgttcaaagctgcaatcaatggagaaattcaagtgttcaagaatcaactccaacttgaccaactattgaccccagaaaagaacacagttgtccatgtcaacatcattgcttcaaaaacaagtattcataataatacaacaactttcttggaa

SEQ ID NO: 235978 - DNA, 548 bp, Cannabis indica
tttatgtttttaaaaacttaaaatgtgaggatccacctaaaaatacttgattgttagtgtatcttcaaaaactaaatcaaaaatataattttaagttttaggctacaaaaataaaaacaacaattttatgtttttaaaattttaaaattattgaatccaaatttttttcaaatattcttttacttttttattttgaaattcttgaccaatcacaagttacttttttaaaactcaaaaatattaaatcacatcacaaccaattatatttttagaaataattcatcacatttaaaatttaaatttttgtttccaaacctctctttttaaaacacaatttttaaatagtcccttaagttttaaggaacatgataagtgtcgacttttatggatattattggacacttcactgacccactcactggagaagttgcggcctgtcttttagccatggagacggcagtctctttgcatcatccttttgtgttggcggacagtgattcagagactgttatcaagaacctaaaaggggatgactctatttgggggat

SEQ ID NO: 235979 - DNA, 618 bp, Cannabis indica
atttatagttggcatggagttaaaaaactaaccatatttttggtagacaacttttacatatatattttattctttgaaatattaaatttgtaaatttaatatcaaaataataattataataaaaaaagtattttattattaaattgcttagcagtttttttatttttttttttgtcatgaccactttagttggtcagaaaaagtaagcaccaacaaagaggaggagtctttttcatctaaaaaaattcattatctatcgtaagggcatgcttagccaatctatgagctgcaacaaaaaattacgactaacataagagagaaatgccctaaaaaaaatagataataaagctttgatgtctgaaaataaaacacatttggcccatcttagtcttaccaataaagttagagtttctgtaaaacaatgaaagatggctaaaattagtaatttctttaaaagatgttaaaataagtaatttagaatttatgtcatgtataaatttaagagatagtaaattttaaaaataaattctaataaaaacttatttcattgaaacttcttagatccttgaatagagaagtgagtgaagtagagaaccacctataaaaatatatgaaatt

SEQ ID NO: 235980 - DNA, 1073 bp, Cannabis indica
acccaccttgtcaatcaaactattcatcttcctaagccaaggtcatcttcttcgtggtatccctctgtgtattgtgcttactgtgaaacaatgggcaaaaaggctgggcgtcttgtcaaaacgtctgcattgtctggtgatggttcgtcgtccccctcgccaacagtggaacctcgcttgtctcccactaggtctgaatcgcctccatgcacaccaaacctaggtaagacttcttcttctgtaagtcttccaagacgttttacacgctccatgtccattccttttgcgtcgtctaaagaccatcctcccccatccaccacgttacccaaccttctccctgagtctgactcgtctcaggccccctgtcgaagccaaaaccgaaaaggaaaactgtttcctctgatgctactccttcgtcagtgtctaagaaaatgaaaactcctcaacctagtgtgtctgagccaaacacaactaatgcaccgttttactccaatgataagttgcttagatttcaagaaaatgtttgtcgtcgtccactgtggcctgaatatcgagttaaactcaagtactttcctaggattaaggagttaattgaaaaacgtgggtggtccctgtctgttactcatctccaacctccaaatgagaacctggtcagggagttttatgccaacttagatgagagcattctaaataagaaaagtcaattcctctatcttgctgatatgggaggtaaagggtttcggtttgccccctcaacaattagttgtgtcctgaaaatcaaaaccatcacccatcccacatttaatgatgagtataagcctgaggttaaggatgtaggtgctgaaattactggcaatcccaactttgtttggaatggaatagagttactgattagtggttaaaaatacacttttatttattttaaatgataaaataaattgagttttaattgatattttcatgaaattattgtaatatattttataaatgaaaatatttgattttgattcaatttatgtctttcttgtaggaattaaagtgtatttttgttgaaagaaagaggaaggagaaaa

SEQ ID NO: 235981 - DNA, 959 bp, Cannabis indica
aactcctagtttattctttttgagatctgctatttcattgatctagaaaattgaagtcaggactatttagtttatgacgtaaattaaacgtggtatttcgtggttgtaattttagtttcatagttaatttttctgctacttttttatgaattcgaaacaaccctttatttttattgattcatgtcgtcttctcaggtaaagtttctggaattaatagtggttctctttctagttgggtttcgtttcggttgtgttgggttgctgggttggtcgtagggctgagcatcgattggtttggtcattgttttatataaaaaaccaaaattcgattttcggtctgcattggtgcaatcgaaaactgacctaccaatctagattctatcttaaaactgactgttttgaacctcgtactggtcgatttaaactgcccaaatcgaactttttttttctttaaaatatgatccaatttattctacaaatacattattctacattttacaactacaagcatacaattaattgttcagaaactaattattttattcttttaactttaatattaataaaataataatatattattatatattattaataactacagtacataaagcaaaaaaaaaaaaaacttaataaattaatatatatgtattacggttggtttcggtttttttggtcggcttatctccaaaaaaaacaactgaccgtttaatagcgattttaaccgttagtagtttttttagtttttggttctatcggtatcagttccaacgatgttcggtaggtcagtttgaacggtttttttggttttttggattttatgctcagccccagttggccgattgaaggttaaatcacatgaaggtttcaattccaagaagcatagatcatgagttgaaggtgtgtgtaaaaaatatttgcataattttttttatttgagttgtatatttatttatttg

SEQ ID NO: 235982 - DNA, 1026 bp, Cannabis indica
ccttgcatttgagttttgactaatagatctcgaatatacttggcttgagagaggtgtagaccatcagatgtgtgcttgacttcaatgcccaagaaataactcagttcacctagatctttcagagaaaactcattgttgagatcagatatcagttgagacaaaacagatgggttgctgccagtgatgatgatatcatcaacatagactaaaatcattgttgtagcctcaggagaatgttgcacaaacagtgagtgatctgattttgaggaaacaaatccaaacttgtgcaatgacagttgtagtcgttcaaaccaagctcggggagcttgcttgagcccatatagggctttgtgtagtttacaaaccaggttaggcactgtagtgtcttcataaccaggtggctggttcatgtaaacttcctcttgaaggacaccatttaggaaagcgttgttgatatccaactgtcgaatttgccaattttgagacaatgcaagagttaacacaactctaatagtgacaggcttcaccactagactgaatgtctcagtaaaatcaaagccaggctgttggtgaaaccccttggcaaccaatcgagccttgtacttgttaagtgttccatcagtgttctctttttccttgtaaacccacttgcaccctattgcttgtctcccaggaggtagaggaacaatagaataggttttgtttctgacaagagccaatatttcatcatccatagcacccttccactgaggcatttgaagtgcttgagcaactgttgaaggtatggaggaaacactaaagacttttggtttgtgtataccagacttagatctggtggtcattaagtgtttattggaaactgtaggtacagaaggaacaggagtagactcatggtgtggtgttgtggaggaggatgagatagcagggtcagagacacttgttataggaaaggatgacacaactgaggatcgaggtattgcagagggaattatatgttcaaaaaccaggtggtataagaggtgtaga

SEQ ID NO: 235983 - DNA, 806 bp, Cannabis indica
attaaaaaataaaatcatagtttcaaagctaactaatcaaaataagtaactagaagtgtatgggataaaaaattatcttaaaacaattttttcaataaaaagtaactaattgatatattatttacatcaaaagcaaccaaaaggttaatacatgtttctcacatattaaatggttattttattatttatatatgtataaattttgaaataatctttttactagaaaagtaaccaattgattctaataataaaaaaagtaatagcaaaactaccttattcttctattttgttgtagccgtacccttaagtgacaattaagtccaatgagtaccaattcaaaaatatgtagtaatatattatttgatattaaaaaattattatttatcttatttgttaattaaaaatatacaaatttaaataggaaaacaaaattagtttttctttaattaaataaaaaatagagaaaaatataaaagttttctttttaatttttaatacgtgatctattaataatatatcactgcgtgtttgaattgacatttaaaggtacgactacaacaaaattataagataatgtagttttacggctactttttggattagggttaatgtgtaacaattgaaaatgttaaaagaattttatcgtaaatttctatttaatttaataattattataaaatattagtaatgaaggccaaacttataaataatgctttatactaattaatgttcattatacatacggtttgaatttaataaaatatttctagggaaaagagaaagaattcaatcagatttaaaccctc

SEQ ID NO: 235984 - DNA, 821 bp, Cannabis indica
ataaaagatacttccactgtccctctctatttgggacctttcggccaatgtgtgctagttttcagtgttgggtctttgtcctgttttaaaatttataaattttcgacatgtacacccacaaatttttcgatatttggccttgtgggattctttcaaattaatgtcacgttcggccatgtggtctcctaaaggtcgttcgttatacccaaactttccaggcccaaacgtgaggaaggtgtattatctaaattttcggatatttggccatgtgagattcttttaaatgtcacgttcggtcctgtggtctcttaaaggtcgttcgtcatacccaaattttccaggcccaaatctgaggagggtctttgacctgttttaaaatctacaaatttttcgatgtgtacacctataaatttttcaatattaatttggccttgtaggattcttttaaatatgtcacattcggtcctgtggtttcctaaaggtcgtttgttatagcaaaattttccaggccttgtggtgtcctaaaggtcattcgttagttccacattgtccatgtgtggaaataaattatcatatataagatgaatgaactactccttttattgtcaattagttttgagatgtaactttattcattttattttaaattctaacaagtaaaagaaaactaaaataatttttatatgtgtttttagtgaaagtaaatttggctaatgtatagagttgatgacaattgatataatattataaaaggtagtaaaaagaatcaataaaataaatttttttctttttgttgataaaaataaaaagagtttttttag

SEQ ID NO: 235985 - DNA, 606 bp, Cannabis indica
ttgattatttaagctttagtcccacaccatttttgaatataaagaagaaaaggaaactgattagtgtgcgtaatcaaacttctaagctctctctactctctttacttagatttactgtgtttcacaaaataagtagtgagctcgaggaccgagaccctatatttatataggtgagaccttccatcaagatctctgccacaattaattattagaatattttgacaattaattctgaaaacggataattgtggcaaaagtctccaaaaatatgagttgatacagtttagtccccaacctgaaaaattggttgtaatagtcctcaaggtcacgttttctgtaattatgttggtccctctttctaacagatccgtttactaattaaaaatgccatgtgtcaacaatttattggtccaaatcatatttttaatttaaaataaattatttataaagtaaaacagtttaaataattaaaagttaaaaactttaataattccttgtaattttctcttttcttttattaaaattaagaaactttatccaaaaattaaaactaaaacatatcattaatcccgaacccgacccactcaattttcctccttcttcatc

SEQ ID NO: 235986 - DNA, 958 bp, Cannabis indica
gaattgggatggacttcacctcactgaagcaatgtataaagtggtctctgatatgttccttaaaggatcatttatgaacccttctttcagttacttgatagatagaaaactacaccaaagataaaaaacatgtttatgatcattatattgtattaattaagtatgtgtcattcatgatacaaattaacatagatatagtctatttcttacttcatttattggaaattaatgtgaaacttttagtctttgaaaagaaaagaaatttattcatattccatgaacttatttttttatgtgtgtactcttttgtttaactcatgtacaagatctgattattcagagcgggtagaactcctcattcgatggagtagtgttgatccaaagtaatccgatttctttttaaatattggattagacccaactcacactccaatagaatttgtttaagatcgattatgacatgcaaacatacatagacaaatataacctttaaatgcaaaaatggaggacttcaaatttgtactaagtatggaatatttgtctcgtattatgaagaaatttagaggactttaagtttcatggaagatgtgcggagctagcattaaattatttgagctttacagatgatgtctttattttttgcaatgaaaatttcaagtcaatttactatttgttgcagggcttgaagttgtttttttaatcttcaggtccaaagagttgtgctggcttctggtttccaaaaaatttctttgtcgtttaagtatctttcaatttgttcaactagaatcttgtcaaaggaatgcgaggttctagttgataaaatagtgggccgaataagaaggtggagcataaggaatctctcttttgcaggaagaattatttgataaattcagtgctcatgtcaatacatacatattggagccaatttttttaattcctgaaaggatcttgaaatcaa

SEQ ID NO: 235987 - DNA, 1654 bp, Cannabis indica
ctgttaaaaagttgtgtatcatttaaatcaatttatatatgtttgacacattaattaatttttcatttattaaaaaattaattttttcccttaaaatattcaaattaattgatgtgtaacgataagattagtttaatacacctacgacacacaatctttcaatattgattcctttataatttattaggagttttatattatgtattatatgaacaataacaaatattaattaagaaaactctaaatatgtctaattaagatgaatttaatcaagaaatatttgtgattatatatcttttgtagcaagtctatatataaatgtctatctaattgaaaaaattacttcagttaatcttaatattgaccatatatataaatcaattaataacaaaaataaataatttcttgatcatataaaagtgtaattatctaatatagaatctatatatatatcctaattattaattttttaatatcaatatataaggttataattaaattatatcattatataaatatatatagaaacttacagacggtggcggtcttgaaagtttgggttccgtcaatgaagttatcctttccggtgatcctagtcttagtagggccatcaccaatcatcataacatgagtcatatgcttatcaaccataactttctcagcataaactccttgcttaatataaatcacaaaagttttattattcttcttaggaacatcctttaaagcctcattaatactcttgtacttcccactcccatccttagccaccaccacatccgccttaattttcggccctttcgccgccaacagcctccgttgtccctcattcacccacccaggaccgctctcgaagccgccaccgctcgacaaaaggcggcggctaatgttcatcggaatgttgtaactcgataagattgtagagatctctgtcaccatagcaagaccattgcttgtaagctcttgagacgtctttagaagcgatttcattcgctccccggcctcaccggtcgtgttttcgaaaccatctagacatgtttgctcgtaggtaacagcagcactaagccatatcttcaaatcatccatgtattcatcaagtttagacatctcaaaaggtccaatcctgtgaaaagagtcttggaggtcgtcgatcgcgtagttgagaagctcgtcgcaattagccaacgcttggtttgttcttgaatcctttgcaagctcctttaatgtcgatgacttctttatggcttcgccaatgtaatttacggctacgtcgaatgcaacctttacgagctctttcgggtcggttgtgttgccggccgccttgcttaatgtgctctcgcaagtttgtttgtaatcggtgggttgacaaatggcctgaacggcctttgacgtggtagatacactacccgcaggtgaagggctggcggtagcttggtagtcggtttcaccgcggttgaaaccgactgctaccgccaccaccatcgccaccaaaattaatgtagatgtaccaatgatggcaatctttttctttctatcattcccattatgagaagaaccaaatgacatgttgatgatgatgatattctttgattttgtaatctatgactaataaccaatatatatataaatccttttttttactttcctttttttt

SEQ ID NO: 235988 - DNA, 2323 bp, Cannabis indica
tcctgcctcctggttctcgaaccccgaggtctaccttgtgtccttctcactccaggatcagcttgattttgtgtagcgtttccttaagccttttgttggttagactttgccagacgttgctatagttggcaattttccaatcaaccaacgatacatacctagtggggtcataggcattctaactcctatgtacataaccacgagcattagtatcggtttcctcattcccaatttcttggtttcgatcatgacaacctttgcatgttcttgaacgtgttgcacaggttgtccctgacgcgtgtggcctcggtgaacccattggttcttttccaggacgacgattagtctgttctggatgaatgttattgttttcatcatgataagccatggagaattttttttccttttggttaggagggatttttttgagtttttttcatgtaggctcttaacaaaagcttcaaactgttaacacagattttcgttaactaattaataagcctttatcgtaataaattagacacaaaaactataagaaatttgagaagaataataataacaataatgacacaaagttttttacgcggttttctagttaactctgcatagtccacaagtctatcttattaagatatttctagatatagaattatggttttaaaataagtgatttcttttctctcaaggatttttttgtcccttttttctgtataatctgcccctatttataagaatatatattggaaattgtttacatttgaatctgaaatacataacggtctccaagaaacgtgggctttgaccacgtccattttaacatgtgtatagctaaaaatttgcataaccgtttgttactcttacctttgaagtaatggatacggacatgagatagaagcatctcgctagaggcatgtcactttgtacataaatgaatgacttggtttacatgtattccagcaattgcatgagcaccagtgtactgagcaaacttaagaactgctctttgatcataaggccttgcagactggacaatcatgtgctcaaagttctcaagctatttcatttagttattataacgtgaattatacgctaagtattccaacaaccaatttgcctcgtcaatagtttcttatgtgtagcaaggtagatgtcttactatgcgttgtttgtagctcccttgggattatgccttctgaggcaagatggtttctcgtcaatacatgaatcaatagttagtgtatccttgtcccgcttaagcctatacagtcagggagttacaaatatactctatttattctatatttgatgagttattcaattttgcatttaatgatataatcattattatatctattggttcacattccccgagattgatatgtgtcactttctgaagtacagctgaatttcgggtataaaaatactccatacatctgatactggtatactttaccaatgtcctagaaaggacataacacttatccaagttgtaagtataccttatcgtcgattatcatgtcaacctaaatcaagtgaactgaaaaatcatgggaattaatgcttttgaaaaataatcatgattatattctactgtgctaacgacaatataatcatgaacaaatatacatatttatatatgttctgtactaaatagaatttatacatataataatgaaataaattatgtgaaccatgcaacataaaagcgatttctgatcttatattaattagtaaagtagattatattgaaataggttttatatagggcacaaaacctaacacatggaagaggacatcaaatctaagaagacaagggaggaagcgcttgagaaggaggttgaaagtttggagtcggtcgccctggaggctttctacaaattttggaaggccaaccccgaggggcactttgattacctcgatgaaaccaaagaggcgtatcatagttaccatgttgacaagaagacaaataaaaccttgaggcagctaactcctcagctctaaataaccaaaaaactgagaccccgacctccaatgaccaagttgatccgtacaaagacccatgggccttttttcaatacaatatggtcgaccaaatggtctttaaacttggtaatactttattttgttttaagacaactagctggctacgcagcctttagtcttggacttatatcctgctttgttttcatttttttaaatgaatattttccctttttttagaacttacacatgcacggctatttcttttgagcttgttatttacctatgctatgtacgggtataattgcccccaagtgactgagcagagttatgactcttggtc

SEQ ID NO: 235989 - DNA, 1378 bp, Cannabis indica
aaccatgctttcttatctacttctataaattcctctctaatataaaggagagccccagaaatcactcctgcaacattcccacaatacaaagaatcaattaaaatctcattttagaatacatttacttgaataagaagagtcttcattttcacaatgcaaaggttaagaacagtactcatatgtatacattgttactaaagtatgtaaataattattctatgcaaaattgttgagcaagacatgcattattattaattaagagggatccagtccacttaccagtgtcatatccaaaaagaagtcctccaattccagcagttagtgaaagacgcataatatagggagttctccaggagattttccagcattctgaaaattctgtcttatctgctttgtgataacctccctccatttcatgtaaatctttaaaaccaagctactttccatcactgatcagtttcctgtttgaaattaacattattaagttaaagataagtggaatggtaaattagtgtaaagttgttcttgttacaatgataccttttctgagcacaaaactcatgataaaagcatgcaagaacacaaataaaaaagaagggagaaatatgtgcttataaaatctaaccaaaccgtatatttgaataattttagtttattaaattaatgcaaagcaatataagatgtgagtaatattcttattttggatttaattaagttgtttctctccattaacaattttacgttactgtcataaatttcttaaaaaaaatattggtaaatataaatttccttaaaatagttacatttgagattatattaagtgtgtcacatacattttttattgtatattagagattaaatacatatcataatatatataaaatgagagtgtatgtatttttttgtatactctttttctaactacattattttccaaaaaggagaaaagtttgattcaataataaaacgtaatgaatgaaaatcatattagagattaaaagtaagaagacgagtaccttaatcacttttttcctcactagtagagtactatatagttaaatatagatttataatagtaataatgtagatcgccttgcttaaatgttttttctcgctctctatttttgattatggtgtgggagttgccataccagttatttatagagccatgtcctaattgtaatatgattacattgattagctaggtttgaccaaaaaaaaaaaaaaaaaattgtaatatgattaggattattaggaaaaaatctcactatagcatttaaaaaaggaaagatatatccttaagaaaaaaaaaaaaaaagaaacgatatatattttaaaaaatatatttaaataacaaattatttttactattattttc

SEQ ID NO: 235990 - DNA, 1201 bp, Cannabis indica
aatgctatggttattctcaatataaataggtccaagattgtgtgactttgaaacaaaaaaacaatggccggtttggacaggttaacccgaccaaaccgttagtcggcttatagattttttttttgaaaattgggcgggttgcatttaaattttcgcaacccgaactttagattgggttagaaaatatgtaggataaaccgtccacaccgaccgacgtacagccttagtttgagggataagtgcttcaaaatttaaatatcaagatactttccaaatataagactccctttagtttggtgaagaaattgaatgggtttgggaaaagaggatttttgttgggttgataagtgttgagtcaaagaaagcgtaatttgtacttggaatacccagtcagatcgtgatcttttttctataattactagagtgcacattttttctatggggatgggccccgtgaggacccgctcttaatgggacagagattccccatctaaatgggaaacggagcgaggatgtggattattttttgtccccgactgttaaacggagcggggacggggattacactccccgcctcgacagggactcgtttagtattatattttatatttctagtattattttataatttataatttatgtttgtctttttttagtatgttagtattctttttataaattttaagttgtgttttgaagaataattaatttattgaataataattaatgtgtaatattttaatttttatgtaatttaatatattatttttttcaaaaaaaaattattataaactttaatttttgattaggggattcctcgccccgtccctgcccccattaggggattttccatcccgtcctcggtggggaataagcggggataggtattaaaatccttaatagggatggagacggggtagcactcttcgccaatttttcgctcggtgtacatccctaataattactctggaaatagaaaattatagtgacaaaagtagtttttacaaaatgatgatgtgaatttgttatttttagcggtgtttatttatttattttttatgagagagatatttattgctagtgctctgaatatcttctatttttcttttcattagaaacattattatattagaaggaaaatttgatttttcatgcataatttaaagttaaattggttaaaaaaattaaaggtagtcataat

SEQ ID NO: 235991 - DNA, 576 bp, Cannabis indica
tcagccattttcaattccaatatattcttttatatttgtggcactgcttaagaatgtgcaattatgcagtcgaaaattaccggtcatctctaggataatacactccagtcaaaaaactactatattagagctttactacacgatagagaaccgtcgaaataccacactcagatactactgctcggaatacttatataatataatcgtaaatataaattaaaaatgattctttttctttgagaaagatgtatttctcgcgttagttataatgcattatataaaaaatgcacgtaatgagaagatagacatttttgattatgtgaaagataagtgggatcgtgggaacggtgctaaacataaagataagaaatcgactctgtttaccaagtaattaaacacctttaaaaactgttttaattaattaaataaataaatttttttcaaaaaaataaagtgacaccacaaccgcccgcttgactcagccagatggcgaagcgaaagtagcgcgcatggtgatccagtgtgtgagtcatcacccacgcacacaaaactaggtaccccttggggccccaactc

SEQ ID NO: 235992 - DNA, 787 bp, Cannabis indica
tatcaagaagtttagtattgctcagacgatgagctatcctggttcgaggagattccatcgtcgtttgtggtttgttgcattgttaatcatgtgtgacactgttcaccgcgtcaaaaaaaaaatcacttatccacgaataaaatagacatcaatatataagagttatgaaatctttgatcaatagttgctagtatggttcaccgatgcccgttattcggtgcaagcaatctcaatttggatggcttatgtagtatgatatttaagtgaaagtgttgtatataatagagattatatataacaaggaccgatatgtaattaaattgtctttatcaaacatatcgtttactataaaggcttaattcacatcataaagatgatcaatagtagattactttgaatcctgagtaatcatgaacttctgttgatattattattattattattattattattattattattattattattattattattattattaaataaatacaaagatttattaattaagaatttctttcaaaacaatggaacatacttcagcggaacaatcctcgaactgaagcacacaacctgtagagaaacaagagactcttgccaagcaatgagccaacttgtttgcagatcgtttaacaaaacacaactcgatatatgggaaaactaaaagtaaattacggacatcttgaacaagtaagccaaattgagaaaccataaaaaattattttggatagcttggtcattttcaaaataacgtggtcccatggatgatatgcaatccaactta

SEQ ID NO: 235993 - DNA, 721 bp, Cannabis indica
tcaaagtttgaggggcatgatttggtaaatatcaaagtctggggagcatggttactttagtacataaacaattactgaaatagtaaaattgaatgaaattagataaaagtccttaaatctaacaatcttaatagttcagggggaatttttaacggtcgaaaaagttcaggaagcatgatttagtgcatgtcaaagttcgggggattgtgtcaaaatagtgacacgtaggaaacatgtctagactattctggaaacatgctcgaacggtttatgagtttccagggagtagtttgttcctagcgatatcttttagttcccaaacaaccatgaggagagttgactaactctaaagtagttttttgtcatgaatctcgaacctgaatccgggacgaaaataaggagccgactaccttgacgttcctagctaattgataatttaattcctaaatagttagcttttcgaccaagaatcaattgtggatgatcctgacctcattaaataatcttcccaggatcaacttgatattatgatcctgagtctttcttcttagaggtacgggagaagtgacattttgtttcgttatcaaattgggagtgggtctaattctcttttatgggcttattttccttgttgggatccacgtctcgtgattattaggagaaaatacaaacaacaatattaattatatatttacaactttttaaatatacaaaaaagtgt

SEQ ID NO: 235994 - DNA, 1668 bp, Cannabis indica
gattattttttaggaatttttatttatttgctggacaattttagggttagaaaattcttaggttattagattcatagatttttgggtagttgatttaatattccaaaaattgggattacacttgttcaaaagtatgacccaatttattcgagaaattaaaaccccatacttcttagaaattgattgtcctaaaaattttgcacccttccaacccaaaccaaaacttatgtacttaaaaccattcttgagataaacgatgccaaaattagggatcatctaataaaaaccaatcaggatgagtcttcaagtcgctaaagggaatttttgtaggaaataactgatggtaaacgtcattttctacgagatgcagcttggcctgaaccccaaaattaatcttctattcctttagcgagacctttgtttttacctcgagtcactattaatttttcaccaggtgacttagatttcgaaatcatgacttcacaagttcgaaaatcaaagacccctcaaaatcccacaatcacctttgaggcagaacttattgaatccaaagttaggtcaataggagcttacgtgggggaggtactaaaatcttgtgtcatcaaatatgaatgaggatgccgagttaggtccgttgctaaaggggaatttagttgttttccccctgaaaggataattcgagaagaagggtgtagcaccagcgaaccatctagtataggcacttagagcgtagagcatataaaggctggagcattacttcctctcaaagattactataaggaattctacaattaccttgaaattgcccctgtccaattaattccaacctcctatagaattctggcatgtctgaaggtcttataccacattttggggtgagagtgcccaactccatttaaaattttatacttctactcaataaaggcccaccccgcaaggaagcgaggagcaggtggattttattatctcgagacccacacgaatgatcataggatcatagtgaggcagcccaacaaaactgagttcaaagatgatttcttctggacgtctggcctcgccccaattaatataaccgcattttgcatcatatgtaagtatttctgtctcaacacttggttttgagttttcaatttagtaactgttgacatttgcttatttttcttattgtattgacatcaatttcgaaaagacctatcccaactcgtgagatggaagaacgacacagaactctcttaggtattctgttcggactacgatcaactaattttttactaaacgaggccaacctgaagacatgcaatctccttggcagctagcaatctacttgtgacattaaaatccaaaatactccaagtggcaataggtttcagtccttgttgacgaggaagacaaggattatgtggctcagatccactacttgaagaaagtatcccctcgagaagctaaagaagaagcatctcggtaataattgcggatggtctcctgctgtgtttagagccaatcgtaccaagttagttaggtttaaggatagccagtataacttttatatctggaattgcgtagatcacatagctcataggtttgacagttggtatcccaaattccatattcaattaagttgttatagctcctactgttgggaatgttttttaccaagatctagattta

SEQ ID NO: 235995 - DNA, 512 bp, Cannabis indica
gcgagggacaggaggccaggggcatccttgctgactaatatcaagcagcatccgggagaatctcttaaggcttacatgagtcgctttagtacaaaaacagccaaagtgagaaatttaaatgatagcatttagttgacagccctccaggccggaataacaaatgatttatcaaccgcgggaggagagctatgggatgatctatagggtttccccaccaaaacattaatgaatgtaatgaaagatcacaaatctttgtgcagaaggaagaggcgcaaagccaggtgaagatgctcaaatctagcccaagagacaaacccaacacaagtactacaatagcgagcaccgtaacaactaaagcaagaaattcaaaccacaatgggtcgaattggaaaaaggaaggacgagtcaagagattcgtcaaaagataagaaaaagcaaaagaaacacgataagtatatttcgatatacttggtatatacgagattaaacaaaactcgtgaaaatatctatct

SEQ ID NO: 235996 - DNA, 632 bp, Cannabis indica
attatcaacttcatctttcaatgttttgatggggtttggggccaaacccaatggcctaacagactccaccgaagcattcctacgtgcatgggaagctgcatgtgcctctactcatgataccctcatatacgtcccgaaaggaaggtatttgcttcgcccactggtcttcaaaggtccttgcaaaagcccccatatcaccttccgaattgatggcacccttgttgccccacaggactaccgagtgttgggtcgagcgcagaattggcttaacttccaaagggttaccggtgtttctattgttggtggtgcactcgacgctaaaggccctgcattgtgggcttgtaaggccaattcagcaaagtcatgtccatctggagcaacggtacgtaatataaagagattatttcacaaatatacaaaaataataaataaattataaaatatacgctatacggaattttaaatatgtttacgatttttatgattttatttatagaaaatacagtttttttatgttgttttagttgttgcttgaatgttattttcatgttacttttatgtaattttcttgttattttaatagaatattataaaaaatatatatataaaaaaaaattaaatgtaaaaatgta

SEQ ID NO: 235997 - DNA, 1398 bp, Cannabis indica
ggggcttgtaagttcgtgggtcacggtagagacacatacatttggagagatccttggatccctcatttaaaaggtttcattccgaaaccaatgagagacattccgcctgattcgaactgtgtggctgacctcctcacaaattctggctcgtgggacatttctaaactaaataatctatttgacaaagacactgtctctgctattttgaaaggaggcaatccttcggggcaggaggaggataaatggggttggaccttagagtctaacgggagattcacaagtaaatcagcttacctaactcaagcgcaggaaagagccagccattgtgtggtggccccaatgctgtggaacaagttatggaatagcaaagtgcttgagcgacataagatcctttggtggtgcattctctcagaggcgctccctgtcagaacagtgatcgggaggagattccaaatagaggatacaagctgtcctttgtgtggagtgggggaggaatctgttgaacacctatttctctcgtgcgatgtggcgttacacctttggcgctcatctccttggggcatatatccggtctgtggcaatgggattcgtgtctgggactgggtgaaatttctttggaatcttaacaacaggggtattcgagtggaggaggtttttctttatgcttcgattgtggttgataccatctggcagacgagaaatgaaaaaatacacaataacaatcacccagatgttttaaaatgtattgaccgtattcatacttcttttgcagaattacattcttttctggtgccatgcccggctcctagtttgacggaaagctggaatccaccccctgaggattggatcaaactgaattgtgatgttagagtgggattagaaaccatgtgtactgctgttgttgctaggaaccacctgggcaacgtgattcggatccatacgtctcagttggacttttcagatgctttatgcggagaggcggtggcttgttgttttgccatttctgtggcttttgacttaggtttaaagtttattattgttgagagtgactcgagactagctatcaacgccttcaatgggaaggagtcccattgagctcttgacaactatgtctccttttgtatgagatccactcattcttttattagttgtaattttatgaatgttagtagacgatgtaactatgttgcccattgaacgtcctaattactacaagttctaattgataattctcaacagattaattctatgttctgaacaaaatttaaaatcaaagaacacagaatttacaagcttcctctgcattggaaacgcatttcaaccgagtagtgcttgggttcccttgaaccgggtacagtaacttccactataaaatcaattcaattacaaattccagtt

SEQ ID NO: 235998 - DNA, 840 bp, Cannabis indica
gcatgggaggataagagagaataacctagattaagactactggaacaagcatgccacagatgagatagaagcctcactaggaagtgaggacaaaccttacctcatttgaagtacacatggaagagacaaggtttgtcctacttaaagtacaaggaacaccaaatcacctgacatgctaattcatgtcattcaattgttatagaagcttggggaccacatgtcattcaaaattatagaagcttcactataaatagcccattggagcatttgtaaaggagaggttttttgggagatcaatggaacaatagtcttatattattattttgaaagattagaagaattttcttaatacatttttagtcttgagttcttgatattgttgttgacggtgagaactcatcaactaacttgttggccaaaaaatcaaactatgattcaagctcacatctacaaagaatagaaagataaaatatggattcaaaatgctatctcaaaatggagagaaaatgataaattttctattgttctcaaggtttagttacaagaataattttccaatctccctcacatctgaaaggggcatttataggctctaattgcttgaagtacaaggtggtcccaaggggacaatgtgtcgcttttaggctacacgtcgcaggtgtaggaggtgaccttgcgcctcgtacctttgtctggtgtcaagtggtccctggatgtaagagtgtggctgcagtgtaccctaggttggtcctcagaccttgtaggtgtgttgcctccactactcataccttcttgctcttagagtttgcaggaggcatagttgtacgcttctcctttgca

SEQ ID NO: 235999 - DNA, 516 bp, Cannabis indica
aagaaagtgaattaaaccagaaaagacagtgtccaattagctttcaattcatatcacaaatatagaggaatccatctacatgtttttcgcttcattgtactattaaatagaataaacacttctctattatgcaagtgtcaacaaacagtcaagtacaaaatacaaaatgacccctggtgaacagcttgtgtcaaacaacataacaatggtatacacgaaaaaacaaactaaccttgcttatttccccatatgagacaatattttactgatcagagcttccttcttaccagcaacaggaatgttgtttgctgttagatagtactttaactctgttacagtcaaatctttcaactgcaagacaaaaatcatgaaatatttattttctgaaatctatagttagcctttatacattttctacatgctcaaagattcttttaaaaagccaccaaaaagccaccataacggtataaactatgcaaacttttaatatgtctaagttctttgtttccttgtatt

SEQ ID NO: 236000 - DNA, 727 bp, Cannabis indica
tgaagagcaaaggcgtctgtttgatgaatggaaggatgaagagattgaaacgttgagggctcaacaagcagccattaacgaccgaacaagacaggccaccatgctgatacgaagagcctattaggctaccaaccagcaacctgcaaccatcatcccgcttggtgagtcagacgaagatccagccgtgaacgcttctcaaaccctgaacggtcagctacccaatccccagtcataggtttcgcctgtgggccaagcagtaggcggacagaccttgtctagtaattcgtcaggggaggtcgtacctaataactccgcccaagttaacggttctggccaactaatcaatcaaaccaaccagtcactgagacaacctggtgtatctatatttaatagattgcgaatgcctcatgatctcatatgatctgaacaaaaggagagggctagacgagaagtatgtcgcactagtcatttagcccagggcccgtgttcaaaatcccactcaaagagatcctgacgtgaccctggtcggccaagaggctgaacaagttaatccatccgtgctggcacaattggatgaactaaaaaatatgttccaaggcctagccggtcagaagaacaatgacctcaagttggaccgagcacgtggatcccatttctccccaaagatcaatgtcctagagttttctcacaagttcatgttgtcgacctgaaagatgtatactgggaa

SEQ ID NO: 236001 - DNA, 669 bp, Cannabis indica
ctcatccacaagctcttgaggtgtaaccatggtgttcaagaactcatcaacttgttttagaatttcttcctatcatataaatccaagtttttaattttttatccatttattcacacacaaatatattatatatatgaattaataaaagaactaatttttcattgtacgtacctattatcaaagcaagtggtaccatggttctatgatgattaataacaaattaaaagaaaagatgattaataacaagagaaagcaagaaatacatatgttatatttttttacagagatattgatattgacataatgtttaattaattatgcagtagttttagagtacaactattatcaattttttacattttaatatcgttattaatttaattaagtatcaggtcttatatactttagtataatgaataactataatagaatatcgttagttaataataagacgacaagtttagaaagtggtaggcactaatagtgcccaaattttgtaagaaaaataaatcatataaaatttttattttcttcttaatattgagccaaatagtagaatggatataattcatgttattactgggattaatcatgaaagaaaataggagatttttttaccgatatttgttgatgagtaaaaaaaaagggaaataaaaaagattgtgtaaa

SEQ ID NO: 236002 - DNA, 1444 bp, Cannabis indica
gtgttcacctactttaacttattttgccactatagtaaagaaagagatagactcatatgaaatagagttcttaaatctaaagcaaaatttattcatttgaaagtttaagaaataaacaacccaacatctcatatttcaaaatttagggttgtttggcatatgttaaaattcttcatcctaaaagaattaaattggctagtagagcatatgaatgtgtgtttattggatggatgataatagtaaagcatatagattttataatttaaatgcacatgttattttagaatctaatgatgttgatttttataaacataaatatccatttaaattgagaaataatgggagtgcatcatctaataacatacctgtaattagaaataatgagcataaagagagtatggaaactgaacctagaagaagtaaaagagctagaatatctaaagattttaaacctaatttttgtgaatatagtctagaagaggatccttccaacttccaagaagctttgactttattagttgcaggtttgtggaatgaaactattaaggatgaaatgaactctcttgagtcaaacagtacttgacatttaattgttttaacaccaggttgtaagtggattcttgaaatgaaattgagacatgatggtaatgttgaaaagtgcaacacacgtcttgttaccaaagggtttagacaaagagaaaatataaaattctttaatacatattcacatgttactagaattacatctatttgtatgcttattgctcttgatgttattaataatcttattgtacaccgaatcgatgttaaaattaattttttgaatggtgaattaaaagaagaaaatttacatgaatcaacttgaaagttttgttgtttctggttaagaacataaagtatgtaaagtagataaatttttgtatggtaaataggcaccaaagcaatgacaagagaaattttataatcttgtcatctcacatggttttaaagtaaataaaagtgacaaatgcatatttattataaatctaaaaatagtgtttgcactattatatgtttatatgtggatgacttgctgatttttggatcaaatattcatttcgtgaacaatgtgaaaatttgacatgaaagatctaggtgaagtgaatgtgatccttggtatacaaatcactaggtctgaaaagggaatttctttagatcaatctcattacaatgagaagatcttaaggaaatataaataatttaattgtaaactttcatgaacaccatatgatcccagtgtaaaattattgaagaacactagtgatggtgtaagataatccgaatatgcgagcatcattgacagtcttcaatatgacattgaatcgagatctgacattgcctatgtcatggtattattatgcatgtttactagtatacctagattaaagcattggcatgctattga

SEQ ID NO: 236003 - DNA, 1201 bp, Cannabis indica
tttcatgttatttttgtcaaaattaattttaattaaaaaaatatctaataagataaactgtcaaaactaacatttttcaaatcttataattttaatttagtaaactatatttcaaaaataacaaattttgaaaaggttatatggttagcaaattttgaaatttaaactagattattttaaaaaataatattttaatattaaaataagatcattcaattttaataataaaattaagtaatatctgatctgataattaaaataaataaaataatcataattttcaaaaattaaccataaggctatttttgtgaaaaatcaaatttccaaaattcatagcgtactaatatctaaaactaattttaattaattaataattttattttattctgataattagattttaattgaaaaattatattctacacaaaattctaccaaaatttgaattttgtttcaatgaaaaattatttttgaatcaaaaaatatgacaaaaacaagtttggtgcacaggggtatggattgcataccactgtgcgtggggaagaggggatctaaccgaggcacaaggcttcgtggagcctgtttggtcgagggaactcgacgtgacacggcttcagagagcccgtgtccgagtttcctcggtcagggtgtctgaaactgcgtgatgatgtcgagtgtctcccttggtgcacgcgcgtgtgtgtgcatcaacttcacatattttcatccaaattcaaaaaatcaaaactaattcataaaaaattcaaattgagttctgtaaaagactaaattcattaattttttgtgtactttctagtcaaaatattttcataacgaaataaaaaatatttttacaacacacattacgatttccatacaatcatcaaataagcacataactatcatgaaaccatccaaatcaacacaaacattgttttaaatccatatttcatgaaagtaaatcatcactatggctttcaggccagtttctataatatattttatagggatctagatttactaccatgtatgatatttaatgtaaagaccgcttagtttaatttggaaattagcagttaatcatgtttaattatgaaaattatttatagctatttaaataattatttatactgttattgttgaattctgaaatgcattttatgtcatttagagattttcataagtttgcatttccggtgcc

SEQ ID NO: 236004 - DNA, 2543 bp, Cannabis indica
tttaaagctcattgtatataaacttttagcattagcctttttaatcaataagagaaatattttttttcaattctatttttatttcaatatggtatcagagttagaaaatctctaatctgttcttgatagttgtcctcaagcttgtcttcacaattcttttcttctcttcgttctctgcttccttcaacaatggtgggatcatcttcaacttacagagatccaacctacaaaacctatttcgttcaagcattctctttcttccaaacttgatgaaaacaaatttttatcatggaaacatcaaatcctcactgttgttcgtggtcatcatctccaacgattctttgaaccaaactctactcctcccaagttcgacaacgaagctgatcgaacaaccaatacaatttcacaagattacataaattaggaagcacaagatcaactccttctttcacggatgttgtcctccatgaatgaccagatgaacactcgcatgataaggcatgagacctttgtgactgcctaaatcgcgcttcaagaattcttcactgcacaaacaaattccaagataagttaattcaagactcaactcctcagtactaagaaaaagggttcctccgttagcgattacttactgaaaataaaatcgattataaatctactaaatttcattggacatacattctctacagttgatcatgtcgaggccattttcaatggtcttggaccaaaatatgacatcttctacacctcctacaacattcacaaagaaaattttaccattgcagagcttgaagcccttcttgtggctcaagaagcgtgaattgacaagagtataaaggatctcgacatatcatctgctaaagccaatcttgctcacaatggaagaggaggtttttcaaacaatcaaggaagctatggtggaaatccactttacttcaatggacaacaaactcagggatcatataacacctctcatgattcctatggtggatcaaataatcatgaaggcagaggacaccctagacatggaagatggtcgaatcaaccctggcaccaacaacaacgaagacctatttgccaattgtgctagaagccaggccatgctgctcttcaatgcttctataggtttgataagtcattttttggacctgtatccgttaataatcaacctttaaactccctaactggagcacgattacatgccatgattgccacagttgatacaatccaagattccaattggtatcctgattcaggtgccacgaatcatctcacaccagatgctcagaacttggcaagtagctcagaatatcttggtcaagaacatgtcatgataggaaatggctcaggttttcatattaccagtattggtcattatgcattcaattccccattgcatcctaaatctctaatacttaatatttaccaagattttcaaaaatgaattataaacgataagaactaaagaaacaaataattaaaaaagaaagagtgaaaagagacaaaccagtttttatgtggttgggacattaattagtcttagtccatgagtcagtgttatttagtagttcttagctcaaaaagcctttaggaataaaagaatatatattctcaagtttacctgagcaagtgttgcaagagaattcaacccttaatccataggatgcgatggaagcccggggaaagtggaggaagtagttcttctggttagaactagggtgattgatcataatgagatggataaaaatataaaagtaacacaaggatttataaaggttcgacccccttaattagcgagcaatgacctactccctttttagttgtgttgattcttgagataataccacgccgacgcagattataggcttgaaccttggaatttctagctatgattctcttcaatgttacagtagtgagaacttaagtattacaaattcaaaatttatgagactttgtgaaagaaatagaataagtgtctagtgagtaagtgagagaaaggagctctagggcttatgagacttagaatccaagtcctttctaccttgcctaagaccctttatataatttagggcttacaaaaaataatcattcaaacaagtatccctctaaaatagggagaataacatttttctatcttttatttaaattacaaaaaaaaggtatatagctttaggatgaattcctatcttcaaggattgttggatctggaattaagcttgtggatcgttcagaaagcttgttgtggaccccaccattcccttaaattccttttggtgttctttgcatgtgctggccggccagccctattcttagggtctggccggcacatggaactttgttggccgaccagggtgtggtccggctagggtctcctggctggctattttatccttgttcgaccttgctttattgccttagagcccttgaccattggtataccgtacaaggtgactttgttcacctattgataggctatatgctacatggcctcaattttgtctatgtggacatgccacgtgaagtggataaaaattgggataaca

SEQ ID NO: 236005 - DNA, 973 bp, Cannabis indica
actttcttactggaggaaaaaaaacacatcaatggtagccttgcatagtacctttgatttgacctcattgcccatttggatctcatggttaccctttgactctttaaaggtcttgaacaatgatttgtcatatgtggtatgaacggtgccacatgtattaccaccatcccttaattttccctgccatggaattcacctcactaagagtagcaatgatatcctccttgataatatttactttgggtctcttaaagtcttttctatgcttacaatccttagcatactgtccaaattttccgcacacaaaacatgaaccttttccacctttgaattagttaaattattgttgtaaatcggattgtattgttttgttaaccatatggatcgatagattcttgtgaaaaaaattaattttactattattaatatattatattctatctgcagtaatagttctctctcttaaaataaaaaacacttcatattctatttgtatgaatgcattacactatactaaataatttaacaaatattaaatatttcaaacattaattacctactaaaaaatatttactctaatggaacattaattactttaattataatatccagcatgatacaacatgattaaaaaaacattacaattaaaaagtaattaagcatatactgctacatatttatacaatttcaaaagttttatgtcatcacaaattcaagacatactgattttaactgtgtactatgtagcctaaatttatacagtattattattctcccagttcattacaaaaacaaaaacaaaaaattacactaagataagattaaatcatattataataaattatatatatgtgtgcaatacatactaaataatatatatgcacaaattaatttataagatcttttttttctttcaaaaaatagctttttgttaaagttgattattcattgcgataaacaaacgaagtttaat

SEQ ID NO: 236006 - DNA, 479 bp, Cannabis indica
ctaaattagtgacaacttgtaaatagtatgttttagtcacacttacaagtaactttttgttacgactaaaaattatatttagtcacaaaatatttataccgtgactaaaattatcactaaagttaagtactgttttttctagtgctttatatattcaattttatgatattttttaggaagattatcataaaattaaaaagcagaaaattaatatttgaatttttcttactaattcttaatattttcccttaaaaaaatcttcacatatttaatccccatgtgtatcaaggaatcaaagtcaaagatttataatgttttgcgtttcaaaaaaaaggtcaaataatgtgggttttgaaagaaaaaaaaatgcctccaactatctatataaacaccccaaaactcactcaataataatctatatcgatatagcaaaatcaatatttatatctaattacacagaaaaagaaaaaagaaaagaa

SEQ ID NO: 236007 - DNA, 1382 bp, Cannabis indica
aatttttcttactaattcttaatattttcccttaaaaaaatcttcacatatttaatccccatgtgtatcaaggaatcaaagtcaaagatttataatgttttgcgtttcaaaaaaaggtacaaataatgtgggttttgaaagaaaaaaaatagcctccaactatctatataaacaccccaaaactcactcaataataatctatatcgatatagacaaaatacaatatttatatctaattacacaagaaaaagaaaaaagaaaagaattgaaaatggctgatgaattctgtcctggtgcaggtattaaatccaatacttatatatatatatacacatataattatattagttaattaattatctcagtaattttattgctagctattatatatttctattaatatttataaaatgagcattattttcaggtaatttttttaaaggtgcctaatccctcccaaaaaaataaaaaagttatatgtacagtattaatttttatcaacatataacatatgaaagtttagtaatattatacaaaaaaaaatatgatatataaaaataatttaatataatacaaacaatatatgaagacatactaaaccaaccttatattacttattatatgagactccacattaattaaattatactaataataatataaaatatatctacgtctttttaatatttgtatgataaagtaaaataatattttgtaattaagaaagagcttattattattattaattataattgattatatatatttatatataggtaaaagctcgtggccggaactagtgggaaagaatggagaagaagcagtgaagacgatagagaaggagaatgaggatgtgaaggcaataatagttgtgaaagggactgatgtgactgcagactttgactgtggaagggttagggtttgggttaatgagtctggcatcgtctatttagtcccaaccattggttaattattaataatatatattatgcatgcatgcataagtacgtatacttaataatttaataaatatatgtaattgttacaataatatattaatgaaaataaatgggattgttgatccctcatattaaatattctttatatataaattattattattattattattattattattaattaagtagtcgattacgttaattaaagagattcaaaatcataaactaagtcaacggataaataataatgtatggaaaataattggaagaaaattgtattgaatattaatatatattaattaaattgttatctgttattaatcattaattaattaatcttgcaattataattcttgtacatagtatgctagaatacttagctatatatattaataataagaaaataattattatattttt

SEQ ID NO: 236008 - DNA, 561 bp, Cannabis indica
cttgaaaataattttattttcttttttgttttcttagattcaattttatacttaaatttattgtaaaaataagacaaacatggtctaaattttggattttaaatcagaactccaaagttcaaatcaactaccatatagtgcaaatccaaatttcaaatataaaacaatcaaccaccataaaatccaaagcagctagtacagtaatacaaaaccagtccaataggcaatcatctaaaggttcgaaatatacacagttaccaatgtcagaacttgaaattatgagatacggattagaataaatatttagtttgtgtttcatttaatcagtgattttcttccattacaaatggttaaattgatgctattttggtacattactagttcagttttgaagtgagaactctttacttcaatggaagctaattacaagaatacaatagtgcttctatttcttcttcaaaatctagacattcaaacatgttgaacatgatcagttcattaattagttctaagaattaaactctatatttgacaataaaatgaaaaattataatatgacct

SEQ ID NO: 236009 - DNA, 1704 bp, Cannabis indica
atagaattttttaaaagaaaataatgaatgccaacaatttacaactgttgggaatactatacaattataaactgttggaaatactatgtgttccccacagttgtaaactgttggcatgttattttattttattttatattagatttaatttattttatttaattataaataaataaataataaaataattaattgaaaaatataaaatagagtgtaaccttaaaaaaatataatttttaatggaatttactaatattactgtaaataaattataattttttacatattaaaataaaaataaaatgtctaaattttattaatgtaatattctatcattattattatgactaagttttatgcctccagcttatttcctccgacggttcctgcaacaacttcggtttggacccctccgccggaggactggatcaaaatcaactgcgatgtcaaagttggtggagactccatgcgcatggcgaccctatcgagagatcacattgggacggtggtttgggccgttatttccagactcaacttcagagacccgttgattggtgaggcggcggcgtgtcatcttgctcttgattcggctcgcatagaaagcataactatgtcttggtggagagtgactcaaaactgttatcaaagcgctgaaaaggtctcgctattttttgaatattgataattatgtctctgtctgtaatcaactctctaagtgttttttatcttgtaatttttcttttataagaggttgtaatttcgctacccataatgtggctaaatgggccttgtcccaaaacaattcaggtttcgtagaggtatcctcgataccaaagactatcatttgtaataatcgtgaggtctaattttccgatctatctaacgctttattattcaaaaaaaaaaaaaagttttatataaattataatttacaaagaaattttacaatttattattatttttataattttatataattttatttactgtaattttatataataatatataaattttattaaaattaaaatttttatttatttatttattcacaaggggattagtgtcaattgaatgagattaaaaataatgtttcagagattaaaaataatatcaggtgaagataaactcttcagctaaaatattttttatatttttttttaaaaatatcactttttataaaaaaaaataaataataaaaaaaacaagtgtaaccctaattagaataaccaaattgaaaaccctatactcagccacacatctcattgtcttctctcttcactttttatttttttctttctctctctttcatgtcgcagagagcacgggaaccagacgagggggacgtcgatgatagggatgagtttttcccaccaacgccacaactactcagttcgagagcacggggacgttgagggggacgaggttttccaccattgccaccaagattcgacgggacaatggccatggaaggaacagaactccacgacctgaactcaaacgccgaagagaagacgaggacgaagatcggcggggcaaggacgaactggcaagatcattatcattcttcaaagagacgcatataggattgaacctaggctgaagtcagtcgaggctttccaagaggagagagtaaatgacgcgttctgcatcttcttccgagagagagagagagagagagagagagagagagagagatctgat

SEQ ID NO: 236010 - DNA, 1229 bp, Cannabis indica
ctaaccctagtggaatgctataaatagatagtgaaggcttcaggaaatttacactaaatttctacacttttcttctgacttttcattcagaaaaaactgagcctctctctctctccctatctttggccgaccccactctctctctcttcttccttgaatttcgaaattcttagtgttagagtagtgcccacacacagcaagtgatacctcaatcatagtgaggaagatcgtgaagaaagactttcagcaagaaggagtttcagcactaaagaatcagagaaagagatccaggttcagatattgataatgctctgctacagaaaggaatcaagggctagatatctgaacggaaggagtcattatattccgctgcacccaatgtaaggtttcctaaactttatatgtgtttatttcatcgttttagaaagttcatatttagggtgttaatcaacatacttgtgagtagatctaagatcctggtaaaataatttccaacaattcccactattttattattaatttttctttttcttttaaaaaaggtctttattttttttttttaatctcttagaatataatctacaagagatattgtttattcaaaaaaattatttttaaattataaatggctcaatttattttttttgatgaattaatggctcaatttttaagattataactagatcgctaaaatatttaaaatggcacaatgaaaacacataaagtcatgatcaaataagcctaatatataaaggtaatgtccgtatatagtaaaataatgtgggtagatagaaaattaaatttaaaaaactggttaacaatattatttgttcaatatttcttattaagtaatgaatcaagatctccggttaaaaagtcatcggaatattatgttaaaccaatttaagtttgacacatcaactaatggtttatttattaaaatattaaccatgtatacagttttttttcacttaaaatgctcaaattaattatgtgtcacaataatattggtttaatacactatgaaacacaatgttttaacataaatataggaataaccatcataaaaaaataatttttaatgtagttaaagggaagttatcaattattatgtacatattttactttaaaaaaaattaaacaataattaaaacctcaaaatattttatacgttaattactatgcattttttcaaaaataattctacatgttaatactatgcatgagtt

SEQ ID NO: 236011 - DNA, 547 bp, Cannabis indica
caattttgtcttctccatatttctatatctctagagtcaatatatgtaaatttggtgtatttgatatgccatatatatgtaaattaggttttcgaatcttatatttaatgtttttattggtttaggtagttttatttgtcactggtgccggaaaagtcgtcagagtttgctaccggtgccgaaaaaatcactggagtagctatcaatgccaaaaaagttgtcggagttactaccaatgccgaaaaatttatcagaattggcattgtttctggaaaaatcactaaaaaataccgagaaactggtttcttgatgaataagctggtttcttcatcaaaaaaccaatttcttgctaatttttccagtgacaataccaattctgacaaattttctaacactggcagctactctgacgacttttccggcactgacaacaaactttggaaaagtcatcggaattcgcatagtcaccagaagaatcaccaatgaagaaaacgagtttcttgatgaagaaaaccagtttcttgatgaagaaactgttgggttttat

SEQ ID NO: 236012 - DNA, 981 bp, Cannabis indica
aaaaattaaaaacctaacaatatgaatatatattatatttgttatgatttttaattaatttttttttgtcaaaataaatatataattctaaaaatatggttgactatatataactcaccactatgtatcgatcatgtattcctaaactatgtatctacaacatatgctaaataagtgtctgggatagtaaaatactatatatttgacctcttcttttttactctccactaaaaactagggctcaacatgaggcgcggccggtttaccgggtttcgggttcgaaaaaatgaaaccgaaccccggttggcgggttttggttggccgggttgactgatcagttggcggattaacccggtcaactctttaaaaaaattaattttttattcaaataatttttcttttatctttttatttattaaattaaacatatatatatttatatataacaattttttaaactgcatacataatacatattcttaatatcaatactatatatgactcactgtgagagtccatcgagagagagagagtgtgccaattggatgagtcgttgaagatgaacactttttttctctttcatatttagttatgtttttctaaaaaaaaaacaaattttaagatgtaagtctttttatttgtaaaaaattgatttattacatttttaattaatttattttagcttgatccaattaattaatatataatatattaatatgtaataaaaataaataaaaaaatatataatgtatttatatgcaggttggctggggggttcgagttcaacccgaaacccagtgtccccaaaaacttaacccgcgaacccgcccgaagggcacggggttgaacccgactcgctcgaatatttttttttaaaaaaatttgcaggttgaccgggtcgggtccaggtcgaatccgctcaaaatattcagtcctacaattaagacctctaataataactaccacctaaaacaatacatt

SEQ ID NO: 236013 - DNA, 1080 bp, Cannabis indica
tccaacaatggcagatatggttgttcacaaatttcaataatagcggatgcgatttacatatttctgttcaagtggtttttatatattcttttaaaaaatattcttctagtacagtttaaataaataacaaatataattactaattttatttcatatattatatgtgctatgcactgaaaagaagtgtgtgaatttgtttggccacaaacaatacataaatgaatgtggacttcataaaatataaaatattaaacaaagtttaaagcatgatttgaataaaaaaaaaaaaaaaaattactttgttcattattttatactaaaatttttactttgagtatattaatgaaagattcctatgtgcaaccaaaaacttttgaatgaaataaaaggtataagagcaaaaaaagatttggcttaagcggattagctactcaatatcagagccaggtttcgatcctgggacctgtgggttatgggcccaccacgcttccgctgcgccactctgatttgtgatatctattgtttgacataatatttaaccttatttgtatgtatgcacttttcttcgtataattgttcgtgttttccagtctggtccttttacctttaagttttgcaaagtgacccgtgaaagaagttatttggaaaagattagataggttctgtctttatttcatttaaattaaaagtaataatgactttgttttttttttggaaacaagtagtaattacttaaaagaatgtttaatctatagaatgaatataccagttataattataattttgtctctttaatttttattttagcatttaagtactcaaaacttaagtttaaattcttcaaagaaaatttaaatttcctaacaattattcccactaacaaaatttaaagatttattataaatataaaaacacatgctccacatgaatgttaccatatatgaatgtactaggtgaatgtacgtgccgagccacgtattgctagtttcatttaagatactttttaagattttgaatatattttatttttaaagataaaaatttttgtttgaaaaaattaaatatttatatttgaaatat

SEQ ID NO: 236014 - DNA, 1159 bp, Cannabis indica
cctatactataaatacactttttaaaccattgatctatacgacttttaaaaattaagattgtgtaaaatgtatttgtttgtaggttcttaaaatttcattcttgaaaaacaaaatctgacacccaattaaaaaatattaacaaccaatcaaaattaactttattttttatttttctaaaaaaaaaaaccaaatttttaatcttcattttcatcatcatcgacattcccctcaaactagccccctttttctatttctcctcatccttaaagtcttctaaccagcctctttttttcatcccccctcatctttataggcttctaaccagcaatagagggaggcagtgcggctaagtttgtaatagtgagagagagacgattgccatgatctttgtccaccatcattatcggcgaacgagagtccattcccaagtactgtaagttgcttgtactctgtacctttttaagtctgatctgatttgggtgattggaattattagaaattgtgataaattaatttgggggtgattctttggcaacccattttggttcagttttttgaattgcaaggtccattcattgtcatctctaatgattatcatataaattcattcttttttatcataacattcggggccgaaatgccatagtatttgacctataatgttctaagtttagggcaagaaatatgaagctcacagaaatcaaaacaataatccaatactaaattctccagcaaaggaaaacatgataacaaattcttcgaactattatcatctaatgacttccaacaactatgattcatctgttcatctggtcatcgacttcatcatcaagaggctgcctgaaagtgattatgatgtagaaaatattcagtcagcttggaggtctgcagcttgatagagatgcaagggcgttggtaagccacttctctggcatgacccaaaggactgtcagagataagtttgctcgtctcactcaaatggcgacaattctcaacttatcgacagaggttgttgccgcaaacggaatgcaatctactattacggtgcgggggactgtcacttagcgactgaatgaaagagagagagaaaaaagagattaattaattggaggaggttaaaaataattaattatttatttaaataattattattaattt

SEQ ID NO: 236015 - DNA, 1347 bp, Cannabis indica
accaatctgcaacccaagggaatcaattcacagctacaagaaatcgcaccagatctcaagatgaaaccagtcccgtctacttcaatcacacagtctctatcaagctcaacgatcacaacttccttttatggaagcaacagatcttagctgccattcatggcaatgggttgcagaaattcattcaaaatgtaccgcctccaccccaatatctcagtgatactgatcgtactgctcaacgatttaatcctgaattcttggattgggaagtccaagatcaacttctggtttcttggcttctctcctccatgacagagagcctcttgactcgaatggttggttgtaattcagcacggcaaatctggaaagctttggagcaacactttacactgaaagtttcgtcaaagatccttgagtttcgaaccaaactccagaaattaaagaagggcacaatgaatctcaatgattatctccttaaggtgaagcagcacgttgatcttctagcttctgttggtgaaattctctctgatcgtgaccatattgctgctatattcaaagggcttcctagtgactatgacactttcatcatctccaccaacacgcgtgtcgaaggctacacagtgggtgagatcgaagccttgcttcttgcgtctaaatctcgaattgagaaggaggaccaagaagctgaatcgagtatcaatatggccatggttgatcaagattctgcccttgaagccttctatgctcaaacaaatcgaagcttcagaccccctgcctatcctcgaggtcagttctttcccaacaattttaatttttctaaccattcttccttctccaattccagaggcaatgttagaaattcagtacctcctcgagtaccttatgtttctacacaaggcagaggaaggggtggacgattccctgctacacagaaccgtgtccaatgccagctttgccacaagcttggccacacagtcatagactacttttaccgtttcgacaagagctttactggagtgtttcctgccaatgaccaatctcagttgcaagcaaatgtagcccaaacaactcctactgctgatgatatctggtatcccgactcaggtgcaactaatcactgcacaccaaatggccaaaatgtcatgactgctacggattatgatggccctgagcagctgtatgttggcaatggagctggtcttcccatttctcaaattggtaacacctatcttattcccaagtcttccactaaacctttgattctaaataaattgttgcatgttcctgatctcaccaagaatctgctcagtgtttcgaaatttgcagctgacaacaatgtgtattttgtgt

SEQ ID NO: 236016 - DNA, 800 bp, Cannabis indica
ccttctccttctccctctccttcgtggcttctgaaccagggcaaaaaaccaaaagtttctaccattttcaaacatagttcttgctgaagttgatcaaggagttcaacccctagctcttccaaacatctaaggtaaaacctaacaaaaaatttattggttttctagggttttcattagtattcattgtctatttgtacttttacctgttgaagaagtttagggaggctaggaaaagcttcttaaggttatttagaactgtttagaagttgtttgaactgttttgggtggttttagcaaaagtgatgcaagtttgagttcaaagaactcaaaccagacttggttatgataacttaaattttgttgcgaattgggttaagatttcttcataaaaaatgttcactatgatgtttttaggtactctaagaaatttggtaagagtttgattataattaaatgagtcatgcaatttttaaaatcaggcagtggagtttcgggccgtctgatttaggcaaaattcaggagtccgtttttaaaatggaccgtctattttgagacttttcttgggaccccaattgagtgttttcttaatacttagggtattttcatgatatctatcaatagaaaaatttttagttttgaatttaagtccccaaaagtgttatggcaacacttatcagtttttttttttagaattgtgacttagagcctccgattaccagcaactatttccacttaggttgaccgacacacctaaaattaaaattaaggtaagactactataactcacatacatatgttca

SEQ ID NO: 236017 - DNA, 1612 bp, Cannabis indica
tttgtcatttgacaaaacagagagtccaattggtaacttttacaaaatacaaggtccaaaatagtatttacccttaattatctataaaattttatatatatatatatatatatatatatttttgaaaagaagacattgattgaaaaatatataattagacctcacggtcattgcacaagatagtgctaggtatagcagagggttctacaatacccgagatattctaagcataagcccatctagcgacattatgggccgcaaagttacaacttctagaaataaaagaaaaattacaagataaaaacttcttagagagatgattacaagcagacaaatagttaacaatcttccaattggattggacacctttaatagcatttataaccacttctgaatcactctcaacaaggataaaatcatgcttcctgaaagtagcagtttccaaagcaagctgacacgccgccgccttgccaatcaaaggatctgtgaagttgaggaagttggccacaccccacaaaaccgttcccaaatgatctctagccaaagccactatgcacatggactcaccaccaaccttcacatcacagttaattttgatccagtcttcaggaagggtcgaacaaccatgaggaaacacctctattgtcggggaaagcaagcaggcagcacaatctgtaaaacaattagagatacagtcaatagcagttttaatgttacacggagaatagttatgaactttctcatttcaggttgcataaagaaacagcttgtccgtatctacccctttcgtcttcaggttccaaataaatgttacccaatcccagaccctgcttccagagtcggggaccggaaagattccccacggggaagctctccacaaatggtacgcaaaatcataatgaaggaacaagtgctccatagattcctcatctgccccacaaaggggacacgatagctcgtctatgttgagtcttttcgccaagagtcccctaatggggagggtatttgacaagatgctctaccacacgaccttatgccgctccaggattttggagctccagagtttattccaaagtcctggtgccacgacatagtcaggagctcttccgaaagcctgaaccaggtaagccgatttagttgagaagatcccattttgctccttagtccatacccacatgtctcctcctactccaccaggtttacctcctttgattatgtcgcgcaccgttcccgaatcaaaatgagtctggagtttcggaaaatcccactccccatcctccgtaatcagctcagcgaccttagtcacacttccagaggacgaaccactaggtttggcgtaaaaattattgctatgcaacacccaaggttctgaccagacattaatatctttcccgtcagtgattagtttgaacgctcctttcagcaataagtctttagatttcaccacatttttccagaaccaagaatcggatcccttataggatccctcaaagaatggttttcctttaagatatttggccttcaacactccacagcaaagcgattgcttgtcattcaggagatcccaaccccacctttgctaggagtgcctggttcgatctccaaacgtttt

SEQ ID NO: 236018 - DNA, 1237 bp, Cannabis indica
acaaatctcttgtgtcaagttatttaattttctgcgaatattttttatatattctgtatgatctgttttgttgctgcaaaactggtttctgcggtaacagaattacattctgcttctgtaggcgtatacagttttatattttcgtatatattattcacatttgcaaaaactcggtttttcattcttaacccttaaccgacgacatacacattgttaatttctatacctgcagtttttatcaaaaaactgcctctaaatgacaatttcgaactaggcttgtatttttacaccctttagtttctctttttataattttggttgaaaaaacagtctctaaaggtccacattgtagtagtggagtgatccatagaggcatttgtaggaaggagaggaaaattattagcctttggattaaaaggaaatcaacggaaaagatttactcacatgcatgcttgtattaggatccacgtgcaaccaagatagctccatattgttccaacaacatattgcatggatcccttgtaggatatgtatttcttaaacatgaattttgtctctttttgaaaaaattgtgcttccaacgcacccaaagaaaaatatgtctaaaagaatagagaatacaagagtccaaaagcacactttgaaagtgcacttgtagacttaggggaaaagtgttaaccccaaaaaattgctgagcaaatatatcaagatcataccaaaggaaaagtgagaaggaagtgtaggaggcacaaggcaggagctctttcagacacgtgtcacaccgcccaaagcgaagagccttgctcctcgtgctggtgcgatgctgggggctcaagcgacaccttggccttgtggtgcggcaccgttgaagaccaaagtgacttcgcactgctgattcttaagtggcatcgtaccacaaacactggagcaacaccatgccccccatattgaagcggcagcgtgatactaatgctcaaggcgccttcgtgccatgccacatcaacttatcaagacaaaagtctcattaaggcaaattttcaccatcaaacagttctcaacaaagggaataatgacacacacacctttgcaaggttcactcaagacctcaatgtcttgctttgcacttttaatttctttatgcacattctatttcatgaatttttcgacaaaatataattcccaaagtacatagtgttggaagttattttaccaggaacttagatctactcacaagtat

SEQ ID NO: 236019 - DNA, 652 bp, Cannabis indica
atttttaggaccgtcgcgaatactctttttgtagtagtaattccaagtcattaacccatcacttgttacttaaaatagtaggcattgactctaactccacaatgggtctcttaacacctataaatacttcctctactctctcatttgtagaatagcttatactttaaaaattcagagaaagtttagagagaaattgtccaatcacaatgtgtggagatatgtaatgggagtgtcactcttaaaataatcttcctcactgtgagataaattttctaatcgattcattatgatagagttgtaatttcttggacatgatcgagtgtaactgctaactattattcaataaagattcaattttattcatcttattctaagctaagtttgtatcctcttattgctttcgattctattttgtttaattcttgattggctctagctagttttaattgtgttcttggaactactacaaaaactagttttgcgtgggttttgaagtcgacaaaatttaaaaaccgacacaattaaagagttggtgaactttgtgttggttatgcactgtcgcaaagttagcaacgttgacactaactttgcatcaattcacaacctacacaacaattgcttcgtaaaagaaaatcaacagatgggccaagcc

SEQ ID NO: 236020 - DNA, 727 bp, Cannabis indica
acaatactaaaattatcaaccaaatatgaataaaattcatgcaattagtattgtacatatagaaaataatagagaattaaaaaaacaatgaaaatggtgaaaaatggccaaaaacacccctgcacgcacccccacgcgcctgctattgttgttttttttaaggaaccatacaacatgtcatttggtcgaacgacatgtagcaggccgaagacaagaaacgacttgtcgttcgctgaagggcttcgagacaaaaaatgacgtgtcgttttgaagggatcagggcaccaaaaacgacttgtcattttttgtgggattttaggacaccagaaaaacgacaagtcgtttttgagctattttctggactaaaaacgatgtgtcattttttctcgtctcttttgcccaaaaaaatgcccgtgggtctaaaactcgggtcgacgggacccagttcgtgacccgaccatatttcccacattcaaccaccaaattcgacgctgtttgaggcgttttgtcccatttttaatcctctatcattttctaatacccatttactcaaaaaacacagaataatacatcaaaaaatgatgaatccaaaatgggtttcttcattgttaaagctcatatatatatatatatatatatatctcaatagaaaatgtaaaagattgtttccaagacattcatgaacatatttagagggataatactcatattcacacaaccttaaaca

SEQ ID NO: 236021 - DNA, 845 bp, Cannabis indica
gaacactctcgtgaaaaaaaataaaaaaaaaatgtattccgacatgtattttcaggcgtagaggttgactaagaggttgtaacaggaaattgacggtagcactcttctatagaaaattgttgttcttcctgttttgtcagtgatgaaatttaaatacaggccaataaaactaattgcccaaaagaaagtgcccttgttagggtttctctttagctctaatatgcaaggccaatgacaccatagtgttaaagtattggtagataccatactcttaaagagagatttacattttaaaaaaaaattaatgaattataaaatagtaataatgtatagggaaattcttcaatagacactccttttaaaggctcactaatgtgtccaatatcaaacaatataattggtgacagctattaaatgtaggatttttgtggtaaggcttactgtagagaatcaaaactcagtaaaattggggtgcacctatacaacctttaaattattatttgattggcccatataattttagtgcacagtaaataatagccctaaaaataacaatctctctctctctctatttttgtctctcttcatcttcttcactccaagccgccgacgattccttctccctcagttccggcaacaccgacgactctctttccctcaaccccagagtccagcgagagattccttctccaaccctcaatccctcaaataaaagtatacattcaaagatgaaaattcaatattgaatcaggatttcaacaaagaaacaacactgctgccatactctcttttgatcccatgaatccacttataaataataatcaattactattattttattaaac

SEQ ID NO: 236022 - DNA, 1197 bp, Cannabis indica
taatcatgttgatgcctctcctcagcgagacgttgttcttgtttaaaatttctccttggtgagggggtcacagttcctcattgtgcttattttgtgcagtcatcctttatttgatttcttgcatttctattgctaaagaggtatagttggatcaacaatttgattttatgcatctccttcacttataaccacagtattctacgcattctccaacactttcttaaatcccatcctagactgtagcctagtcttcagcatttttgttcttgtgattcccatagacaacactgactgttgattctaaaaactaactcaacaataaatttgtattaacactcgaattcttcacactaggtattatcccaataaaagattacaatttgctttatttctcaatttctcctaaatagtcagtggttcgtcttcggtcggtgatctttgatttaaggaaagaatacttctcggaggagcaatttagcagaataacgatttggctagtgtcgtcaataatttgtcccccgtttgaatgttggagttctctatttataggcgggaatcagtgtcacgtcttctctattctctcttcagattggtccacgtggttccaataccttattccttcgtgcgctttctcctttgctctgctgaccaagctctattcctcaagctacgttgaactcaactccactcttcttgtaatcaccgctttcttttctttttaagtgacacaatgcattttctctttcctggcatatgacttctatatgactttattaattttcacattcttactatattgaaattacttttatatctttagattatttttataccttacaccataaactaaaaattaaaaatttgagaaaaaatttaaaaatagtttccgatgtaattgtttaaaaattgatttaataaagttacatctttcattaaaaaaaacttataaaatttgagacaaaatttagtaaaataattacaaaaataataaataatatttataattaaacaaaatacaaaaaaactcacataaaattatatatattaaaaaattgaattgtttattttaattgtttatttttcaattaaatttaatgatttatttttgcattataagtaatattcaagggtgtttattcgattaaatccgtactattttgttcatagtgcatccaatctacactaagtgcgaatttc

SEQ ID NO: 236023 - DNA, 943 bp, Cannabis indica
tttttcactagtttccgcttttcatcaattgactgaatttgacttttgataccccgggaacctgtaacaaggaaaatcaagcgtaagactgctccaaaagacaccaataaacgagaaaatacttacttttcagacctgaaccataggctaaatataacctaacatctattggcaagaaccttggagacaactttgtaaagcgtggaacataggctgataggtctaaaatcacgaagagtggaagcattctttttctttgggattaagaccataggggttccattgatagtagagcagtcagatgattgttcaagacatcaaggatggtagagcaaagatccttgcccatggtatccaagtttctctggtaaaaatatgtatatgttattcatatttttgaagtgatgatctaagcaaatttaaagccccataacagtcaaggcaggcccaaatttggacccaatcaggatagtaattcagcccactaacaaagtcacactacaattccagatttggacatgactttagcccaccaacctaacaaggttgaaccgcttcagtccagaggatgtcattcgatctagaagatgaagagtccattagaactgatctagataccatcatggggctatctggagataggcaatcaaagaggcactcaaaaagcttccagccatcaccttgcgcggagtcctccagacacactgccccatagtgtcaaagtttgtcagctacgtcatacccagggagtatgtgcaccatcaaaagaataccacatttttatctaatgccatattctatgatattctcgatatagacatggctgcgcatgacacctatcatccttgaattgtctcctctcgtacaggcgatcatgcctcgtgaattgggcctcacttaattggcccaaagtcgatatgtattgtatttaacccaacagtgg

SEQ ID NO: 236024 - DNA, 781 bp, Cannabis indica
gccctcctgcacgagtacccctcgtaaagcataatctgacgcatcggtctgtacttcaaagggcttgcatacatcaggcagagctaatacaggatcttcgatcatggcttctttcagacttcggaaagcttcttcgcacttctcagaccacgtccatgtaacacccttcttcaacaactctgttaagggtgccgctcttctcgaatagccctccacaaatcttctatagtaattgtcgtcgactcttggatcccccgcaccttttccatgtccatacggattttcccatgttccacaacatgtcccacgaacttgatacttttctgagcaaaagagcacttctctcgctttacatacagctgttctttcctcaacttccgatacaccgttgccaagtgttcctgatgctcttctaaagtggcgctatagaccacgatatcatccaggtacaccaccacgaacttgtctaagacatcatggaagacttcgttcatgagtgtacagaatgtggctggcgcatttgtcaacccaaacgtcaggacgcgaaactcaaacgccccataccgagtaacacaagtagtcttcggttcatccccttctgcgatctgaacctgatagtaccctgatctcaagtccaacttcgtgaagtattttagctccacttagttggtcaaatagatcagcgatcaagggtaattgggtatctgttgcgcacagtcaccttgttgagggcgcggtagtctatgcacagtctcagggtcccgtccttcttctttggaac

SEQ ID NO: 236025 - DNA, 809 bp, Cannabis indica
aacaataattaaatcatctccaactctttttcttttttatcattttgcagcagccatctgcttttgctttatgtatttttattaacatactaatttccagtcatttatattttcattatcatttcaatatttgtagtacttacttctccaatgtcgactgtccttgaatatctaagagaaccacccttcttacaaatctcatcaatcatcttccttgctattcttctcaaatactacttcatcttaaagaagagaccaactttcattaatctcccaccaagccctccaaagcttccaatcatataggaaaccttcatcaattcggaaccacaagtagttcacatctctctcctaaacttgtcacgaaaatacggtccaatattctacttaaatctcggccacatccctactgtcatcatatcatcagccaaactagccaaagaagctttcaaaactcatgatctcgctttcgcaagccggcctcggaatgtagccgccgagtatctcttttacaagagcactgacacggtgttttcgccttacggtgcttattaaggtacattcgaaaagtctgcgtactagaggtttttagtggcaaaagggtctaatctttcaagttagttagagatgaggaagtggctcgtttggttaggcggctttcggggccttacgtaccctgccaccattaacatgagcaagatgcttggattgtatgccaatgatgttctttgcagggttgcgtttggaagggacttttctgagagaggagagtatgagagggaaggatttcaggaaatgcttgaagagta

SEQ ID NO: 236026 - DNA, 943 bp, Cannabis indica
tgatcaatcggctgatgaaacaatttaggacagtatttgtctgaatgtcctattatgccacagataaaacagaaagtaggagtcctctcgtatttaaaatttatccaaaaccaagtcccatcatcctttgtgatcttcaaacgtctgcgtaatggtttttcaatattgagagtgattctcatcctaagataatccctccatactccaataaaattcttaggatccgattccaagtatttccccattgtattcccaacttttcggagagtagtttctgtcatgaaacctggttccacattgtgtaattgaacccaaatatccaaagtattcaaaggtagcgactttggatctccaccaacattaagcctttcaattatcaatttcattcgatcataagtccaaggacttccattgatcacacgttggatatcaacttcgtgatagaattggaataaaaatcgattagtatccaactgtttgacgaacatccccatccctggttgccataaagaagcgagtatgttctgcattttttcaaaatcaataactcgatttgataggaatttgccaaccaagcaccaccgatcatctattccttcttccccatcacccgctgaaaccagaactgcttctaagtcttcttcctcaatctgaaaacgcaaagtgtcctcctccattgctttggtgtttcgactggacgacgccatcctgatcagcagaaccaatacccacaccaaacccaacacaaaacactaattctgacagagcctcacaaaacaaaaccaacagtacatacgatcaagaactcacaaaaccacccaacctatgacaaagaaactaaagaaaccatgtcaatagacttgaacgtacattcttgactattcccattctttagttgaatgttattatgtaacgccctgaataaataggcacgctacccaaa

SEQ ID NO: 236027 - DNA, 869 bp, Cannabis indica
gccttaacttgttcagatttgcttctgatcagctcagatccgcccttctcctgttcaggcctgtccaaactgcctcatcgagaatccttggacttaatcacttttgggagggtccacgatagtttgctcctcagaaaggtcaatgagcacttcagctggtgccttctctctagacgaagtcgtctcaccgcccgtagacttcttggccggaggagataagcccgagcttcctcccactctcttcttcaacgcttcaagcattttctgagacatgtctgcacagaagaaaagtaacataatcagaaaaaaaaagcatgagagatacgagggcatgacgatcaagaaaattaaatacaagatggagtaccctgcactttggcaggggcatttgctcgaacaagaactgatggggcatcgtcatccgacgaatcttcctgctcctctaggatggccttccccttttcttccttaggggtggatggccaagcaggtagaccgggctctctgatctagaatgaatgttcaatcggtctttgctcggtcgggagggttttcttccttttgagcgacgtttcctcctctgaacattcctgaacctcatcctcctgctcagaatattcctgagcatattgtttggctccagctcctcccttcaacttagcctcgcgcttaagttcaatgagctccttctcctgctcagaatattcctgagcatgctgcttggccccagctcctccttcaacttagccttatgattcagttgaatgagatccttctctttcttagctccctcagcccgacagcactggaatttttctcctcccttcagagtcgggatctaaagtctgctggataaagctcgtactcac

SEQ ID NO: 236028 - DNA, 1541 bp, Cannabis indica
cggctgaccattatgagtttgggcactatgcctagcagtaattcttctgtactgcccagtggaatactggacgtggcagctagcaactggttagcaacttgataggctctccatatcagtacggttgcctaccttgcacggtcatcgatggctgcttgttgggccttcaatgtttccatctccctatccctccactcaatgaactgacaccgctgctcatcgaatgcaagcattatagcagtacggagaccctcctgatcatggtgcaaggcattagtatggccttgcatgagtctgaggacatcacagaggttttggatctcagtgtcatctcttactgtcctttgagcattattagtggacgagacttcagtgttgggaatggattggtcggcagcagaactggaatttccagtctctttcacgcctggtgttatcccagccagaggggaagtcacactgtggcccacaataggtggttgtgtgttaggctgctcgagagtagttcctggtgggcccttgtattcccaggggtttgtacagcagagtctgtcaccattgggtcactctgatcaaccaagcctctacaagtttggaccaccattctgtatgcctgttgagacttaagacaaagaacaaacttggatttttgctctcaatgaaagcaccaaaatattaatctcgcttttagtcaacgatagttagtcaattatgaagcgattagaaatacaataaaacagatcaaaaaccaataagtaataaagaaatcagaatttgaagaggtttgacccctttaatacggtactagcctactcctcttagattgtattaagttgaaaataaagaacacaatgtttcctctctcaaagctctcacagtgaaatctctgaatatttctcttagatctctctctaaagcaatttttttgatcccttttacagtgaagctagatcactatttatagggccttaatgcatgagggaaggtttcccttttgcttacaatgtctatattgaaaggaacatttattacataattagaatacatgaaatggacgattgagatagcctgccatatccctctaattcaatcccatgatcatagggattgccttcgtacttgggctccacgataccattatgaagtagtcaagtccaagtatacagttcggaaaaccaaactcgttctctggtcgaatagtctgcccttcattctgctcgaataggcagacgttgtgcgtgcaaatatattacttgaagcccatttagaatatctttcttcccaagtgcaacgagtgatggacacatgtcacccatacatgttgccatgtcatagtgtaaaaatgggataacacgatctaatctgcacttttgtggattagattggattagatttgagctattgtacggattggattggatccaaaaaatgaaatttgcacttagtgcggattggatgcactataagcaaaatagtacggattggattagatgaacacccctacaaggtacgtaacaacactactaacaatcccttcaatc

SEQ ID NO: 236029 - DNA, 2097 bp, Cannabis indica
tgttttaacatatttatactgatcttaacatgcatgaaactaaacagaatacactcaaatttacaagcttcatcggaccctgaaaactcatttcaggcgactaatgcttaggttcccttgaaccggggtaataacttccactatgaatcaaaagatacactttccagtttcaattacaatcacaccaagtaatctgaaactaattcatacaaaaattacccaactgatttgaacacactcaattcagaaaatcatctaggaaccttagacttcagaaggcaagactcccttgcttctattcagctgaactcccttcagcaatgcaatctgaactcccttcagcaatgcaatctgaactcccttcagaaacgcacgatctctgatgcaccttcaatctaaagatcacctcaacagatctgcaagaaacacctgaaaaataccaagaacaacgttttcccctagcagagcaaaatctaattaaccaagaagaagagttagttaaaaaaccggtaatccctgatttatattaacaactcttaagctaacaaactttaacagctcagccaacaaagaatgacagttgtccttagttttagctcacttagctgacctgtcaaagacataataagaccaagagattagatgaaactaacaaccagtcagatgacaaaaacagcataatttgccacacataccacagggacttacataaatgataaggtaaataacaactttcatgtttgcattgaccttaacgttgttaagcaagtataatatgcattctccatagaatatatttgggtaaacgttcgctactgcttttttatacttttgtgccagtctgagatgatggtcatgcttgcatgtcaatatttatcaaatattagtttctgtatgttttaaccagtttctttatatatatatatatatttgaaatcggttatttttgttatgttagtataataataattagaaaattcaaacactaaaatagatgtattagttgtaaattattgtttaaatcgtaccttctctttctctgaatatttcttttagtttgataaaaactactcccatgacgaatcattctctgagtctcttattccaaataccaatatgaatatattgttattggcatacattgttgaggctgtaaataatgtccctttgtatattattttcaagaatgtgacatctacaacaattaactggtctgcaatatgtctccatctttttattgaatttgacaatgctaggaacatgtacttgaaccggttcttcttgtccgtaatcaattcagttactgtccctggatttgctatttttagcatatgaaaatatattggtagttgctggtatgagtcttctgggtttcctcttgccaaatctagagtcttttgtcctgttctccaagccttttgatatcccattgaaactccaaactcatgtaacaagtcctttatattatgtcattcagtgcatgtttcttgttgattgagttgtatttttttctttactatttgaacaatagtattataacttgcttgcctacgatcttctattatgacatccaataagcaagtgtgattgttgacatattttctaaccttcaaagtttgtgtttgttttaattttgaagcatgcaaaaattaattagaatttcatccacacaagtaaccatgtattccattggttgatatctatctcttagctctgagaaaaacaatataaggtaaatatttactcccttatggtaatttgttactcatcaagttactcttaatttttttcatttttctttttttttcttaagataattttttcaaaaaaatcatattttttgtacaaatagtaaaaagcttgtaatttcctcttaggttaatgggcaaatgttgaaaatcaatgattcaaactgatatttataaaaattaaaagttttggaaaaagtactagctattttatacaagtgataagtgaaagtagttaattaaatatatattgatataaaagtgaaaggaagggtggggcatatacaataattttatgggcattttacataaatgtatacattttttttaaataattacaaaaaatgtg

SEQ ID NO: 236030 - DNA, 939 bp, Cannabis indica
aaataacacattaaacaagtaatgaaatttaaatctgtttctttattgatatgcaaaacgacatgttgtttttctacaaagaagctgcccacaaccacgtaaaatgacacgtcgttcaatgaaggctggctgctcacacacgggaaaacgacacgtcgttttatgaatttgaaggctgcctcccaagacgaaaaaaaaatcagccacaaaacctgaaaaacgacacgtggttttccacaagaaaaaaacgacatgttgtttggctatatcttcaacctccagccgggtcaatttttgacccatttttcagccacgcgggtccaacgaacccgacccgaacctgacctgaaaaaataattccgatgataaaattacgtgttttcaaatctaaaaggttctaaatcgaataataaagagatccacatgattttatgcacgaaaacacgaaaaaaataatatgaactttaatatcacaaagttaatcaggtccgaaaaatattttccagaaaattttgagatttctttgtttttcaaaatgagttttcatactacaatctatattaatatatgaatatagtaatgtatgtagaattcgaaataaacaccaaaaaataaaaacggaaaaattataacaatcggaccgatgaacttcgtgtttatgtatatacatatatataatgtacaacatatatgaaatactgtatatgaggacatacaactaaataatcattgtaattacacgtcctcataatataccctatatgaactttattatatatgtattaagtgaataaaatatatatgcaaccgacgaataaattatatgaaatatatatatgtgatatacatatatatatcaagaaaaaatgtatacaatatatatatgaacgtgaatgaatagaatatatatatgtatatacttaaatgaaaataaaaaaa

SEQ ID NO: 236031 - DNA, 731 bp, Cannabis indica
attcctgccaagagagtagctagaataatgatatgtcgtcaataccaacgtcaccgttaggtgccactaacggcggtctttctcgttcgtacatgggcgggtgaaagggtcaagtgcattgaccaggatattgcgtctcgaaattctcgacccaaatataagcctcacgagctttttccttcaaggaccgttttacaccatgagtactgcaagttcggtacatacagaattcgtaaacggcgacatccttcgccgttaaaacaacattaatagctcttagaccattgtctttaccatccgcaaggaccaatagatgagaagtcttacgaccaataggccaatagaccgttaaaaccacaaaagacttgcttcccaataacaagattagatgaaccttccttgtacatctccgtcgttttccaccacggcaccaccgaaggcggcatagcacggcaagagttcaacgaatggatgaaatcaacaattatagtaattgttgcatattgtaccggagaaactcaaatctttggagagatggactggcccagtcaattcaaagtcttttttaattatgaatctataaatgaggtgactaattttcttaattttcttctcgggaagattttgaattatgcaatattaggtacatctgttataaataataatatataagatgtgcaaatcttttcatttcatttaatactatgaattgtaattactatctcttttct

SEQ ID NO: 236032 - DNA, 782 bp, Cannabis indica
ctcgcacttcggggtcaatgttcaggcgatgacacatgacctgaggagatattccgaccatatctgaatgtttccaagcgaaaacatcaagattttgtttgagaaaggtcgttagtttttctcgctactgaaaagtcaatttagagccaattttcaaaactttactattatctacgggattaataggtacctcaatagtatcttccgcggcttgggcggttgcggcataatcgaggatcctcggatccaaatctggtccatctttgtgcggcacttcttcaatcctaaggacctcctggcgaggaggcggtgcctctaacagatagatgacatttactgacttcttctctgcaagcttgactgctgcattatagcattctcgcgagtctgactggattcctcgcacagagcctactccagcgggagtagggaacttcattgtgagatgatagatcgacgtcacgatcttcatcgctttcaggattggtcgatcaatcacggcattgtacgccgaatattggtcgattgccgcgaagtcacccattgtcttggctactacgggggcggtttccaaggtaattaggagcttaatcattcctttcaacgcaattacgtcgccggtaacaccgtatatacttgaggtaacaggtcgcagatccttctcatgcaaccccatttgcttaaaggcttggaagttcaggagatttactgaacttccgttgtccacgagtatacagtggacgttgtctctgccaataatggcgacaatgaccagtgcgtca

SEQ ID NO: 236033 - DNA, 1087 bp, Cannabis indica
tatgaccaaattcctcacactccttgcactgaatatgtttcatgttagattgaaaagatttataggtaaaagaaataccttttggagtcttaacattaggcttcttatttctcattttctttaagcatttttgaaaattctttgcaagtaaagccatgtcattatgaccattttcaatatctgatgcttttttttttcttcttcagtacttttaaaagtgataccatgactctgatacctttctactttcatagtactgaaatcctttgcctcttccatagtcatgagtttaacattgaacctgtcaggaagtactcgtactatctttcttactaaaataatatcatcaagtttctcaccaaggataaaatattcattagaaatgtcagataacctttcatagaattcaaattatgtttcaaaatcagtcattcttagatcatcaaacctaatttataacatgataaatctagatcttttaacatctgcagttctttcaaaatgggtttgaaggacagtccatgcatcttcagcaaaaatacaagtagaaacaagtttaatgaaactttctccaacaccattaaagatagcatgaagagatttattgttataactagataacttctcttcttctgtattccataaaagttcagattttacttttgtgctatcatcctcattttcctccgagggaggagactatccaaataaaattacttttcatgctttttcatcttgtgctttaatgaaagctctcatcgtcactttctagtagggatagtttgtgtcattgagtaacggaggatgagataccgaacttccttgtgtaataaagaaagacatttcacacaagaaataatttaaacggaaattaaagacaagatctcattaagattttagtgaaccgctctaataccaattgaaattctatttttataattaccaagtaaaattattaaacaatttaaataatgcaaaactgtagtaaattgtttgaacataatttatctctgctctatcagacagaatttgacagagcagaaatatactgtagaaagtaaaaatgcagaaaataaaatgacacaca

SEQ ID NO: 236034 - DNA, 853 bp, Cannabis indica
tatttttcttattttgtgagacaaaaaaatcattatttgcttatttaattattatattattagttaaaactatttgtattgctctattaaaaataatgataataaaaaaatctatttgtattctatgaatattctatttatgaattcaccttcatcaaaacccctaaatattctcactctgtgtatatatatcttactactacccaatgttagagatatgaattagacgtgaaaagagcctattgcatatatatcttagagtttgaagcttttttggaaaattatcatatgagattgtgaagaaagacaatagtggtataattatgattaattataaagtatctatttgtgattattattttgaataatggacacataggatttgtttggatgaaaatcaaaagttaaacacaagaaaatataaaaaaaaaaaaacaaaacaaagccaaactttgtcaaaaaaatctcatgcatggtctacaggcaaccatgtacgtgcatagggtcgtgacatccagagtccacaagcaacaaaaaccatagcttgcatggctacataggatttatttgaatgaaaaccaaaagttaaactcaagaaaataagaaaacaaaacaaaacaaagccaaactttgtcaaatgaaaaatcttttgcgttgttcgcaggcactcatgcgtgcatagggtcgtggcattcaccaagtccacagacaatggaaaactgtggcttgcatggtcacataggatttatatggatgaaaaccaaaagttaaactcaagaaaacaagaaaacaaaacaaaacaaagccaaacttggtgaaaaaaatcttctgcatattccgtaggtgcccatgt

SEQ ID NO: 236035 - DNA, 1938 bp, Cannabis indica
atctccaatggtgatatatattggaccacacttatcagctttgtcattatatacacgtgcctatcaatatgaaaaaaaaaaaatatattgtcattatattataattaagaagatttgtttcataaaaaaaaaaatatcaaattaaatattttagggtaatttacctaaaaatactatatttaattataactctaaaatttttttattttaatataatagcattttatcagaaaaaaaagaattataattctagaactacgtatctaactattaaatattaaacaaattaccacacagcaatccataattactttagggtggtgaatttttatttttatttttatttttttaaaaaatttaatttaaatatatcaataaaaaaatcacatgttaataatgaatagacatttaatgcttgaatacctataaaattttaaaaatataacttaaatattattgccgttaaaaattaaatttaaactatatttataacctgagagttaaactaatctatgctacaaattattcatatttttatcaactaaaaaatattttctgcattttgttgtatgagagaaaaaaaatagataggaataggaaaagaaatatacgtacaaaacgttcgtaggcatgcacgtgaccagagaaaacgacatcaacgcgagcactatagagaagttcctccatagcggctttcatgtcgtttgactcgggctcaccctgatgagcagtattcgagttataccaaggcgcgtgtacaacaaccactaaccaaggcgtcttggttctattcaccttcctcaagtcagcctccaaccacttgtactgggcggagtcatggctgaaatcagtgtaggaccccaacatgatgacgtggatgccacgcgcagcagcgtcaaaggaatagtagaggttggattcggatgcgctttgctggaagggcattggccagcgtgagttgtaggcagtgaaaggggtggtgtgtaggaggggaattttctccacctcgtgattgccttgggtgaccatccacgggcgctggcttgcgagttgctcgaccagacgcccgaaggaatcccacctcggctggatcgcgtcggcgtaggacaggtcccccggtagtaacaatatgtcgtagtttgattttgatatgtgatctagtgtggaagttgtccaatcagtttgtccaagatcacctatatgtagatacatgcatttatgatttatcaaatatttaagtactatacatgtatattggattggtttacaattatacttagccatcttacaatttatcatcttaatgtaaaaaatataaaaaaaacaactaacaaattaaacttgggctagaatagagcagaggagggataagaaaacaatggaattgcttcatatgcctgttagataaatgctcttaagacaacaacaacaacaacaacaacaacaataataataatcttgaaattggcgcctaaattctttatgggtaagtttctataatgaaagattaattatttgttttatatcttttaaaatgaaaggatccgttaattggtatttaagtagaacaattacttaaatgtccaaaacttagtgtaatttgacaaataattaagtagctctctctatgtataaacccaataaaaataaatttttttcacacaaattacctaaattagtatttctatacaattttttttatcttatttttacagagatggagtgttattttttttttttgaaagcaatgtttgttttcaagttgcagaattatagtataatattataacaacgtaaaaataatttttttttttatattattataattttgattattgaatgacacaataaatattttatttttcaaaatagtataaatgagacttttatttatttagtactattttaaaaaatataatatctaatttgtcatttatc

SEQ ID NO: 236036 - DNA, 532 bp, Cannabis indica
aaccctaatcccctaaacgggatcgctaataaaaaaggtgcagaatttaaacttttgtattaaacgtaatgaaaataaaacttgtaataatttaaactttacaactgttgggatcccaaaaatatttccaaactttattacaagtctttttctttcagccggcctcaacggcaaaatagagtttcaaaatatatcactggtagaccttaaacccgcttggtctgatgtggctcggatcgagctttcccacgatataaagaactcccaaatcagtgtttagaataaaaagatatgcattttcaaagttggaatcccaaactgcccagaaaattaaaggcgggccgcgtcatgcccaagccatgccgcgacacctgggaaaaagttccaggttccaccaacaggggcggcctgcggcatgctcaacccatgtcgcggtacctgggtttcaaacccagaaaccagtagcattccaacacgaatttcagcccttaaacaccaacaaatcaagccaataaacacccaaactctcaaa

SEQ ID NO: 236037 - DNA, 1686 bp, Cannabis indica
ctgttcctttaccgtattcattaaaataaaagaaaaaaggaaaataacaagaagcagaatatactatatattgtccttacaaaagtaaaaatactatgtatgtatagtatactgtcgatgctatctcaatgaaaccaattaaagtgggaagttaaaataatgaaatttaaatcttaaaagaatatggaataggggcattccgagaattgaactcgggacctctcgcaccctaagcgagaatcataccactagaccaaatgcccacttgttgttaaatgtttactgttttatacacaataaaaaacaaaaggtaagtggtgaaataattaagatgcttctcttctaaccgaccaaggtgatactacgcaaagaaagaaacgccaaacttataagatagaggaaaggatgtttaaaattcctcacatcacattcaaattcacatgctgtgaaatgagatgagctccaccaaaccaccacacatataatattatagataaattcacgagaaaatgaaatgttttattttatgaaatgatatataaacgtgagggtggtgcaaatcggataataagctcaacacaaacgtaaatgattttacaaaagttcacgagactaatccacacacaggcagtcaattactttgtgtaggaattcaactgtaccgggaattgaatataacataagttaacattccaatataaaaactaaaaatacatttgctcagtcaacaagcaataataataataataatgttgtggtatagttcattcaaatgaaaaaatctccgtaaattttaattttgaaaagctgttcactctctgttatcgatcccagaaagagttttgtgcaataatagtagagttcgaaaggaagttcttggatgagtatcatgtccactccaagtcttgttctcaggatagctagctcttctctggaaaggagttccacctgactagttatccctcctagaatagtagattcgaatagtcgactacaacagacttaatcctattcaaaagcgcctttagcgagtgtacttggtccgtgagtccggaagctcatacatattcccagaggccatggtacttaagctgacgtggagacttcgctcaaagaggagttggttaagttagttatttctaactaacttaacaacctcatttcttgcagccaccaactttagaatcttgatcctaagcctataaataccaccttgactttgtcatttgtacaacaagtcttgatacacgagttcaaaactttagagatgagattgagagattggagagaaaagattgagaggtagagagagaggtgaagagaaaagagagagattaactttggattatttttaaagaagaatcttctgtggatgaagaagattcgtgggtgtaagtgtgaaagttaaaatactatgtgaaaaactcaacagaaaatcttgtctcgactatattgtacctgttcttactcaatcaataaagaaggattatggtggtgttctagaactggagtagagccatagatcacatcgatctattggacttgaactagtatatatcttggtagtgttgattctttaatttctgcacttactattttatggttttcaatactttgtttgtccttgttttactgtcgattgttgttcttggtttgataatcttgtcattactaattgtttgattg

SEQ ID NO: 236038 - DNA, 926 bp, Cannabis indica
  modified_base (161)..(161): a, c, t, g, unknown or other
  modified_base (406)..(406): a, c, t, g, unknown or other
catatatagtaaagtaacttcagttatacaaagtaaaaaaacttttattagactttaaaatgtgttataattactttaataaaaaaaaagtgttataattaatatatattattttcatttttttacagagtagcaaccaacgacccttcttctttttttangtgagttcgcctctagccaaacacatcaattgctagaacaatattacgaattcgtaaaatgtgagcatgtgtgcccttaaaaagcttggcagttagttccttttttttttttctttttaactgttttaacttccaaactctctgatctctatcctcaatattctccttttattgttcaaccgtatatgataacttctttgtttaaatttcaactgttccctccactcttcttttttgaattttcngtacaattttagtcagtagttcatgtcgttctaacccctggtcttagccttcatggatcatctcttgcatgatatgaatcatactttacacctcactgaatcagaaagagaagttctaacgcttccccctggactgagcaatggcaattctcctcattcgaatcatgttctgtatgctagagtcatctcctctcgggatattaatcggaaaacatttcgcattaaaatgagtggtttttggaagggacaatgccccgttactattactgatcatcattcgggtcttttccttgttacttttggatgcctaggagatcttaaaaaaatgttattgctggaaccatggcatttccaaaatcatcttattgtgttagcctcacctactgtccttcaaattcctacacccgaagctatgtccctcactccttttctggattcaactacacagactaccgtttttgagtaaaactaaagctatggcaaaatgggcaggaaatctccttggtacttacgttgatgt

SEQ ID NO: 236039 - DNA, 709 bp, Cannabis indica
atacacatatttaaagaaattcgacgaaaattatagattttctagtattgaatgcttaagcccctaaaaaaatcattgagtttatgatggttacaaatcaaaactctaggtttcactcccaacaacttctctataatatacaaagctgtaatatttaaagaaatgtgctaaaaaagaaatccatcagatgattcatattgattctttaaaatagagaattagtagcactcccatcaacttctctactatatcctttagaatactataccgaaaacttactttttctattttacttgaaatttttacatcacaccaaacataaatttctttatatttatattatatcatttaaatattatatatttagatactatttatttatttaaatgaaaaatatgagagagaaagaaagagaaaagaagaagaaaaagttaaaataagtttgaattatgaatagtgtgtagctacatttgaagaatgaatagtgctagataaatttcttagagcactcacaacaactttcttctctattctttaaaatacttcactaaaatttcattttatttattttacctcacacttttacattacatctcgtaagggtgcacatcgggtggatttggctgggttggatttttcaagtttgggtgtaggaaattgcataccaaacccgcccattgtaacattgagtttagagggtttctagtcc

SEQ ID NO: 236040 - DNA, 1088 bp, Cannabis indica
ctcatttgcatggagatccgacgttcgaacaacactacaaaatctgaagaaaaaaggactctcggcatcaacatacctgcagaaactcaactcactctgcaacacacttgcttctgtgggtgagcctatttcttttccagatcatctaggatacttactaaatggattggggccagaatacaatgcttttgtaactccaatattagtcaatcaggccaacagtggaggaagttcatgctcttttactctgttacgaagcttgcttggatcgacaaacaacagtcgcttccatcaacttccttcaagccaatatagccaacctaccttatcccaaaaaatgcccaaaaaccccttcaccaccatcccaaatacctcccaaataccctcaccacaacccacctcgaccaccatcttatccccaattccgtcaaccctgacctagctataattcttcaccccgtgccccggctccatgggtttcttcttctccttgcccaaacaatcgacaatccaaatgctagatctgttttaaagttggtcgtacaactgcatactgttatcatcaaactaatctccaataccaaccaaccccaccatctccccgtccctttaatgcctatttcactcaacaacaaccacttctactcctcccctgttacccaaccctcctcttcttcacatgttaattactgatcccgcttggtacatggactccggagtatctcatcactttactctcgatctaaatttgttggaatcggcaactccctatcatggccaggatcaaattactgtgggtaatggtaaactcgttcctatatctcatgtgggtactgcttttttaccgtcacctactgttcctcttcttaaattatgtcaggtttaccattctcccaatattttcaaaattcttctcagtgtatcacaattatgtcttgataataatacatatgttgaatttcatccatattttttctatgttaaaaatcaagacaaccatcaaatcctccttaaaggccttcttgatcaaggtatctatcgtgtcacacctccttcaagtagtccgcactcctctacttctccctagc

SEQ ID NO: 236041 - DNA, 682 bp, Cannabis indica
tcgacaatccaaatgctagatctagtttaaagttgggcgtacaactgcatagtgttatcatcaaactaatctccaataccaaccaaccccaccatctccccgtccctttaatgcctatttcactcaacaacaacccacttctactcctcccctgttacccaaccctcctcttcttcacatgttactgatcccgcttggtacatggactccggagtatctcatcactttactctcgatctaaatttgttggaatcggcaactccctatcatggccaggatcaaattactgtgggtaatggtaaactcgttcctatatctcatgtgggtactgcttttttaccgttatctactgttcctcttcttaaattatgtcaggtttaccattctcccaatattttcgaaattcttctcagtgtatcacaattatgtcttgataataatacatatgttgaatttcatccatattttttctatgttaaaaatcaggacaaccatcaaatcctccttaaaggccttctggatcaaggtatctatcatgtcacacctccttccagtagtctgcactcctctacttctccctagctgttcttcccatctaagtcctctattgatctatggcactctcgtctaggtcatcccactcaagatgttatctctcgtgtttcttcttatcgtaattttt

SEQ ID NO: 236042 - DNA, 770 bp, Cannabis indica
aataaaaaaaattaaaaaagtttaatctacttaataattttatcgatttggtcagattaattaatctaaattaatctttattttttatttattttttattattattaatttttgtgtttaaataatatatttaagagaattttacatgaggtgataaaaaattaattttaattatacaaaaaccactgttatttattttgttcaaaatactgttaattttatgaattatttttaaacgtcaatcctatttaattatgtttgatgaccatttcacctttctttaatcatccacataaagattaagaaaaaaaatatgacgactcccactgatcttcatataaatacactggtcaaatgtgttctcgataaaaccaaatgatgtcacaaccttatcaaacttcaagaaccactagcaagatgcctgtttgagaataaaaatggattgctttaattttcaaaccaagttttcatttttattttccttgaatctttcaggttgagacatataaacttgctcacttaattctcaatttaaaaaagcaattttaacaacaatttgatgcaaatttgaatcaaagtgcacaactaaatccataataattttgaatgaatctttagtaaaaacaagcaagaaagttatggtataatcaataccttctctttgggtaaatccttttgccactaaacgtgctttatacctttcaatctgtctcatttcatccttttagttcttaaaaatccacttgcaacctattggtttaaaaccatca

SEQ ID NO: 236043 - DNA, 3639 bp, Cannabis indica
cttatgtatgatgtcttttcatctcattaatttgatatctataagacaaatatgatatttgttcttggtcattatcatatggaaaataaacaaaataaacaaaataaaataaatccttttcattttctagttgaagaaattatcaagacaacgatttgtccaagaaattaggaaacaagagaagagattagaaaataaaataaaaattaaacgagcctactcaattttaattattaataatctacccaatataaaattctataattttttttttttgaacaataatgatatataattctatgattaatttaatatagaaagaaacattcatagataggtttggcaataacgtgattcatgtagtcgaaactagctattatagttagactgttgaggagtattacttaaatatttattaccatgatggtgacgacgacaacgacagaaattaattaaaaaacatatcacaaaaacaatatatagttaaaataataataattagtgtccaaaaagaaaaatgtgctcccctctccagtctccacacgctgagttttgagtttttaatttactcagcttgagccacattcatttattagttcatttctttttcttttctttttcataaataataataataattattataatatcagcaattattagtggacaaataaaaaaccattatttacggcatcaaagaaaagaagcagttactcgtatggtatggagattttggatataaaagcaaagcaaatacaaacacaagaatttcatttcacaaactccgttgatgattcaccatttgaatcccaccaattctaacaccaaaacccaaagccaacaccaaccgaaccaaccacagtttcgtactatatatatatactcagagagagagagtgagagagagaggacgatgtttgaagaccaaaacaacattcatggggaatattcatattgtcccacatcggacagatttgatcacaataacagcaacattaatattcacgagagcagcttctcaaattcatcctctacttcatcttccactggtgctggagttcaagtaccagctggaaacagaaaaaagaagagcaaaaacaacaaacgaaggttcagtgatgaccaaatcaaatctctggaatcaatgttcgagaacgagaccaggctcgagccaaaaaaaagctccagttggcctccgagttaggcttgcagcctcgtcaagtcgccatatggtttcagaacaaacgagctcgttggaaatccaagcaactcgaacgagactactctattttactcgccaattataagaacttagcttctcgtttcgatgctctcaagaaagaaaaacagggtttggctcttcaggtacgtaaaaaccagcaaaggactaactaaaactaaagacatatggttttagcagagctactgataactaaaatatatttttttttttatatgacagttgcagaagcttagcggtgatctgatgcagagttggaaagataaagataaagataatgataaggttgataaggactcggataatggaaaggtgaaaacagagacagatcaatcggaagtgatgaagccgagtctttcgtctttggaaagaacagaacacgttttaggggttctctcatcagacgatgatagttgcatgaaggcagcctataattttgatcaagaagtacttgaacccgaggaagcggagcttctgagcatgaacatggcgccggagcctcctgctgatagctcccttacatcgcccgaagactggggcaatttgaactcagacaccctttttgatgaatcctctagtggttatcagtggtgggacttttggtcttaaaattaagccacaaaggggtcttcttgaaaatattctctagtttttattgtttcttcttcttggtatatataatctaaaagcagagcccttttagttgagaaactacgtgtagtagagttggagtagtttcttcttaggggtgcagtggagaaaataagggaatgaagatcatcactcactgagctactgacccaacaaattacaaaaattgcgctttacttgatgttgggttaggcttaattgttattagaagccatatatggcattagattacgttagagtacacatagggtttagaatttaggcctattataattacagcaagtgggtagtgtaagtaagatgttccaatgttaagtttcttgtacatacttgttccgagaatgatcatgagaaataaagagatagagagagacttgaatgagttggtagtgtgaattatattgtgacttgttttgtttattaatttgcttttggtgagtgtgtgtgtttttcgaattgctgtaaatggtgattattagtttattaacccttaaaggtttgaccaattttaaatccaaaattacttaaaactgaatatactttataatgtcatgccttaaagagaatccaaagaagaatatgagatggattttttgtcttaaggatagaaaagaagtatagtatatcatatgtatcaaaaaatgttgtacgtactaatagacaagtcattttaagtattgaagaagatagaatggcatatggctagctgagccttaaaataagtgacacgttatacctgattttaaataatacagaagactgattgaataagatatatcacatatcaggatgagtatatatatcattgatgaaacaaaatccaaattaaccaccaaaaagtactgacgcccatgatgagtgttttatcttcaatacgacatagcattgatgtgatcttaaattgtcaataagcatcatgtgggactgaaaggtggttatatcaccattttcggccacgaaatagattcagccttgggcagtgtcactctttcaaaattaagatctttttaattatgtgtccagctagctcatgtggtttccttgagttatgttggtaggaggagagtgtggattgatagagaaagaaaaggaagatttgtagagaggtattaattaatgaatagatgaatatggtagtttaatctatcttttatcccctcttttatgtataacaaacaaagttgcacgagttatatgtaccaattaacgggggcacagatggccatgcccacctaggtttcgatcagttctacattttgcatgtaagtttttgaaaaaaaaaaaaatgttgttccaacaaatagaatctagtaagttttttgatatatataatggaaggctatatgaaatgaaataaattgttattccaatatacgaaaagaaaaatgaaaatttgtttcaatatgctaaaataaactaatagatttattagcatatacgatgataggctacacgaaaaggctactatgtaaacagataatgaaaatttgtttcaatatgtcaaaataaaataataagtttatttgacatatatgactataggcgtatatgccaaataaacttatgagcaagtcatttcatgtgagcaaggaatttcatcatatttaaaattttgacaagtgcatatattgttatcatagtttactatacaagacatgttacagttatgtactttgtatacaaccggattcgatgtctcaacctgaaaaaaatagactaattagtttattattttataggcacacatt

SEQ ID NO: 236044 - DNA, 859 bp, Cannabis indica
ctctctctctctctcttcaatcacaataaccacttcaagatttgatcaggccatctttgactatcgtcaaagaaaatgaagctcaccacgagcttgagagatccttagaatccctgaccccctttccttctcttgcgtgtcttcctctgccagtctcccttctcttcgttgacatcaacggtggacggaaaccaccaccaggcaaacccctctgccaccgtaagcacagctagacgtctctcttcatctacgcatgaccttcattatcttttggtattcatcttctcctttttttaggtacaaatctgtaaatgatgggggttatgaaaccataactcttttgatcggatggtaactctttctctctctaaattaccttctttcactacagatttgaatgctattttgaaccatgaagttaaatgaatattaaaatatgtttaataaatcatgtttaattttattttaattatgttgtttttaataaactatgtttaaattcttatatatttaaatgattttttaaataacttttttaattttaaaataatttttaaatatttgttatacccgaaattcggctaccattttaatggaagacacgtgtcaaagtaggaagaatatggatcactgtgtgtagcggtaattataatagaataactcattaaatgcggacgtgacaacgtatatttacaacttactgactataaggtcttatgcgagataaaaatatacaaactattacctcatgcattaacgagaaaccatacggcattggatgtacaaggcgagacatcaaccctcgttacgcatgagtagacgtaagtcgaggtataatgactgtgaagacacttagcgt

SEQ ID NO: 236045 - DNA, 1195 bp, Cannabis indica
tctagaaaatttggcagcataacagctgtattttcaataaacccataatcataacctgcataaatagttgcacacaaaaaatatatttggcactcagttccccagaacagtccagaaaaatatgcagattaagttttcaatttttcaaaaaattttgtaaatcataaaaacttgaatatgtctaatgttatacaacgcatataaaaatcaagtccaataatcaaggtgagtccctacctctcatgtgtcgttaaactttatccaaaagacaatcttaagctctcaagtcccgagctccaattgttttagtccaatcttacatattactctcacctctaccatcaagtggttaaataattatcatcatcgcattctacattcaaaaccgagtccaacgacatataatataactatatttaaaatttggggttccgtagcctcacctaagcagtgcacaataacaaatcggtggcggtaaaaattggtgtatcgaaaacgtcgccaaaaataggcgtagtgtatatcaaaacgactacctcgacgagtagatgacacccatgccaaccgtttgtcaaaagagtacacgatgtcaccgaaaagtctccaaaaaggagcggagctacaaaaatgtcatcggaaaaagtagcgaactaggaaaaatgatttagtgtaggttgttctcctcgaagagctgagtttagtggtgaaaacctctcgtcaaacggacgccggaggtgaccggaaaatccgttcaaagtttgaaaccccaaactttgacttgcgatcctgagctaacggtggcgaaaggagcggcgacacttggggggtgaggttgctggcacctagagtttcgttctgtccggcgcgtgtggtcgggcggtggctggaggttggtcgccaaagtgtggtggtgatggtggtttgttggttttcttttgggtttgtgtttgaagagagagaaaaggatagagatggatagagagagagagaaggatgacaacactgttttctgtatatatatattttttttttatgaacatatatattatattatatttatttaattatactcagtttgactgggtcaaactgattcttcacattctaccccccttagagaaattcgtcccgaaatttttaaagtacaacctcaagttgaaaattaaacaagtgaggatacttcatatacatctcg

SEQ ID NO: 236046 - DNA, 658 bp, Cannabis indica
atttaaaaataatttttaaaatagatgtagaaaattattattatattattagatcaaaatattattatattttattgttgaaataaatccccacatgccttgtatactgtccaagatcaatattaaaacggagtttacaaagcaagaataaaatacttaggtggccttcggcctctatcaacctacagtaagactaaaagttagttaaaagtttgtttctcaactctctttttcagctacaatatatataaataccatctcacaaatcaaaataaaggcagagtaacaacacacagaactcatatcagatcaaggtggaggagactcacagtggggtaagtcttggagccctaagagttatggctcggatatccagcaactagaaatcagaagaagaaaacatacagaaggaagaagaaagagttgtgttcttacagagagagaaacgagaggaaataaacactgtaaacatcaaaagattaccaaatcttacctgttgtaatttggaatctggctttgcactcttgatttttgaagatcctatagtggaatcgaggtgagctcgaagaggacgtatgttggaaattgaaattccgtattttaatttcccagtttgattatttaattaagtgattaattaaatgcggaataatgaaac

SEQ ID NO: 236047 - DNA, 1067 bp, Cannabis indica
aggaagaagcataatctatgcccaatatgagtgaataaaatcaacacctaaataattaaagttactcacccagcataagagatagggcgagagctccaaactctgattctagcaaccatcttttcaattagaccatcacattccgcattcgataatctttttgcacaaataggtattcctaaatatgtaaacgacatattacttctcgaaaagccagacatatcaatgactctctaaacttcttgcagatccatgccacaaaaatagaaggttggtttagcttcactagactgtagtcctaaagtctgtgagaaaagcttcaatccttctagcttgaagtaaattgaattgaagtccacattacaaaataataaaacatcatctacaaagcaaagataatttatcttcaagcctcgacatcgttcgtgaaacaataaaggagatattggatcaccttgacgcagcctctctttgcctcaaaaaaaccatgcaccgacccattcatcattaagctaaacctgggagttttaatacatatcataatatttgtataaactcttagggaaaattgaatgcctgtaatacctcttcaatgaactcacattctaccgtattatatgcttttttgagatccagcttaatcatgtagttgggtcgagaattagcccttccataatatcgcaccaaatcttgataaactattatgttatatgcaatataccttccccaaacaaagccactttgattctaaaaaatcaaatctggaaggatatttctaagcttagagcaaatcattttggtagctattttatagagaacattacaataagagattggttggtagtcactaacactttctaggcatttactctttggaataagagtaattactgtagaattcaactcctttaataattttcctgtatgcaaaaaatccaagacagcctcacaaacttcattccccactaaatcccaattatcttagaaaatatagctaccaaaaccatcaggtcattgcgccttactcccaagaatcgccaagatagcttgtttcacatcatcactag

SEQ ID NO: 236048 - DNA, 1914 bp, Cannabis indica
ggtagatatcaaagtctggggagcatagtttagtacataaacaatcactgaaacagtaaaattgaatgaaattagacaaaaattcttaaatttaacaatctcaatagttcagggggaatttctaacggccaaaaaagttcagggggtacgatttaatacatgtcaaagttcggggagaaaattactaattagccttaatattaacattaattaaggataaaaaaaggttttgtatatatattatatggtaattcatatttgttcaaaaaaattactaatcaaacctaattggggacaatttgcatgcttacaactatgggctgctgacccacgattattctcttaaaaaaattagaaatatattttttttagttatttgtagtaacatatatttattagaagctttttcatttttacaattttaaaacttttttttttttgcatttttacaaaattttacgttaaaacccttattacaactagcgctgcaacctaataaattgcaacaaaaaatcgtatagaaatccctattgcaactagcgctgcaaccatttagaaacatttaatacaaactagcgctgcaacttaaattgcataaaaaatcgtatgaaatccctattgctatttagaaactcaaaccgtaaatttgaacaacaaaaaacgttaaaaaatttataattttcctatttattaacataattttagccttttttctctcgcctatgcccagggccggacctgcgaagaagacatgttacctctctctaagagaaaaaaaaaatactcgcttctcaattttagtcttaggcctgccatattcacaaaaaatgcttatctttatggttcaaaagtatcgattatgaatttcctataaagctctattaattacacaaaaagaaaatcatattaaggtaaaaagaaccctattttattaggatactatactctatatatgttccttctaaagggttcttttcattttcccatgaagttggaaaatgaattagaagaaaaaaaaaagttaattagttgggtgcagaaaattatatgatcagaaaagcactaattatctaattcttttatattgggtgatttttttttaggtgaaattgtgtgaaaataagcattagattcttaaattatttaatcatgtaataacactatcattaaacatgatttgattctactaatatgtataatcccacgactttaaaaaatatagtgattgttattctcctattagagaatcattacactaatattatatattgtgtgtttgtaaagatttttattttatttttaggcttttaatttagaatatcttctaattgaatttttactattaataaatcatggttttttaatttttattgtctctgttaatttttttttaattattcacagtactaaaatataacatttctagctataaacggctaacaaaatgttgatgctgatgtgttattgttacatctcaaggtcatatatgtaatataagataaaaatttaatttcaacactataaattgtgaaaatttttaactacaaacaattttagtatgtacatatgatttcataataattagtgatattagtgtaataatattacagcattgttattgggtatgcactattagttagtgatattttttaaaaattattattttaagttatatgagagatttgatatttaattgtaacaataataatataataccgagtaattaggatgctaagtagggatgcacacggggcagataattggcggggagtgcttccccatcctattccgttaagaattttaatcctcatttctgcttattccccatcgaggatggggcgaagaatcccctaatgggggcgcgggaacgagacgggaaatctcctaataaaaaaatatagtttataataaaaa

SEQ ID NO: 236049 - DNA, 1297 bp, Cannabis indica
gttttttttgcacatattttgtaattaattaaaataatgtatacaaaattgtaaaatgccctatttataattcgacatttatattaagttgataaaaatacaatataacccgaccaaatcaatatatgtacacgcctagtgtggcgtgctgccccatggcacacccaccataattacttgttacacccatatgaatgaccaataaatagagccattaacaacaacagattgttaaattaggcaacaccataattttcatactataaactaataattcttcactacttgttacacccaccattttgaaatcattggttaatggttcgtatctaaatccatacattctatctatagataaataacatggatataaagggagtttcttatacttttgaattgctggattccaaaagtaaaaaataattattattatcattaaatggttctcgtaagcaaatcacaccattgtcaatacccaccaaggatatttccttagactttacatgaaatttgtatgtacctaagaagaaaactgatcaaagttttcatagctacaaattgagaataggcctgaatctccaggatgattgtggcccatgaaaatacgaggtggctgtcgtttgtggttggtatacataaaaattggggtatttattagggacaaccaagatttgcttacgcatttgaatcgtatcaaagattttgtatctaattttaagagtatatcttcgattatctcagttagtaatatgcctttgctcaaattcaaaggatcaatttttaatacccaattaatcatctccatagctaaaacacacactaacgagtaaatagtagtgttatttatttctttcttcatatgacagaaaaatttaatatttaaattaatagtaactatatatattcggtaaaaaagatttaaagaattaaataataagattttaattatgaaatattagatcaacatcataatctttatatgcaaaaataaatgagatttttgtattatttttagggaaatttgcggcaaaagtccccaaaaagttcacgttgatacatattagtcctcaagatccaaaaatagcggcaatagtcctcaatgtcacactttttatttgtccgttggtctccaagttaatagatctgttaaacccaattcaaatgccacgtgtcgaaatattattggtgggtattattattttaatttaaaaaaataaaaataaaaataaataattttaaatttttttttttttttacttttttttttacttttttcttttctttttctttctttctt

SEQ ID NO: 236050 - DNA, 1267 bp, Cannabis indica
ccgcaattatccctaaattaaataaaataacaaattacaaattcaaaaaaggaagaaaaaaaattatatgtataaaatatgtttaattttattttaaattgtatgtagaaaaaaattatatataagaatggaatatacatttgatctattaagttttaaaatataattgtattatatgtatagacttttaaattactattttctttacattaaaatattatttgtatatataattttttttataaatatgtgtaaaggattggattcgttacttttatatgtcaatcaacatctactttgtacaagtacgaattttgtattttccaattcgcacaggtgcaaatatccacactttgcagattggattggattagatcgtgtgaattggatgggattgattattttatgaacacccctacgtcctagcttgtttattcaatttcaaaaactttaatcgcattctcttagattaatgatatgtgatcttaaaaattaatttaaaaaattcagatatcatttttttgaaataacttgtcgcacaagttagtgaatcaaattttgtactaagaaattttaagtgtgaacttgtaaattactatacaagattaagaaacataaataaaccttcacggggtcttatcttgagtttcttgagtcttgcatttcactttgggtcacttttgagaattttgataaaattactattttgccattggagtcaatttttctttaaaatgcttaattatctttaatttatgttgcaaaattaacaaatcattagtgacaaataatcatcaaataaggagacttaagagtttgggtcaacaatcttctcatttttaatgatatcaaatatttgattattttgaaaagaaaataaataaattaaaataaaaaaaaaaagattagctccctcttaatgtgtgcaatggttaaaaaaaatatctttcaattttacctcatatgattttgtaaactcctcctcaatttattacttaaattatttaaaaagagttaatagcccaaaaattgaggttttaacaaaaaaaaataataataatcaattatcttagaatttctccccctcttgatttatcaaaaatggtggtggaagaattcgcaaaataaatagcaaaaaaatagaaaggcataacataccatccattaaagaaaaaataactaaaacatagacatccaagttcaaataaccataacctccaaaacatgtgttaattccatttttggcatatttaattgacaaaaatat

SEQ ID NO: 236051 - DNA, 1657 bp, Cannabis indica
ttgtatattatgaacctttgactatcaatgaaggcagggaattatattctttcatggtatcacgagactaaggtttttctcgcttccgcaaccttacccagttaccttcctattcatcatccctctttctttccattatatagctatccaccatggctgaaacttccaaatttcattcagccttagccatcaccaatgtgaaaactctcatccccatcacattggacttggaatcaggacagtaccattcatgggcagcgttattcaaggttcaagcaagggttcataacgtgcttgaccatatcatcccacccaccgatgcaaaagaaaaagttgcatatgacaaggccaaagccgaggatctccctctctggaaacgactcgatgcggtggtcttactgtggatttatgccacgttctcctccgacatcctcacctccattctcatagatgatgactcggctgaacatgcttggcacagtgttgcggatctctttcatgataataaaaactcaagggccttgtatctcaataaggcattcaccaacacaagtcttgcagatttttcgacgacaaatgcgtattgcaatcgtctcaaaagtcttgccgatcaaatcgccaatgtcggagctctgataccatgaaagaatataattccctgcctttcattgatagtcaaaggttcataatatacaacaattgcaaacggttacaagcttgatattaggctaataatgaggaatcaaatattacctaataaatacaattaactattgtctaaatatatacatatacgctaaataaatatatacatattctatcaggaacatttggtgtgtaataaaagtcaattacctccaatttcgtcaataataaactaaacaattatttgcattttcgttgttactttaattttttaataattagtaattttttttttgaattttcaatactattggttttaacttttaaaatatatgacttattaaatactattttgtaccttgtattttgtaaaagttaccaattgaacgctctgctttattaaatgaaaaaattgatcctatatttttcaaaatagtaaaaataggacactgagcttaattttcaacaatttattttttaatataaccaactttaagataatttctaacacgaacagaaaatgtaactagttttttcataacatctatagatcaaattattattaagttttattttgataaaaaaatcaattcaagatcttatttgtacaattttaaaaaaatacagggtctattttgtcatttaacaaaacaaagggtccaattagtaatttttgtaaaacacggagtctaaaatagtatttaccataaaaaaaaaatagaaaacttgtttggaacatttggtgtgcaataaaagtcaattagctcaaatttcgtcaataataaaggaagcaattatttgcaattttgttgttattattttttttttaataattagcaatttttttcttttaaattttcaacaacacttattttgcctcttaaaatatttggtttattaagaattcttttaaatttttacatttatagacatttgttgatacaacacaaactcaacacacacacatgcacaacagtgctcataaacctgatactaaaaccagaaaagaatc

SEQ ID NO: 236052 - DNA, 1488 bp, Cannabis indica
gaaggttagtgtagctaaattttaaaaaatgaatgttacttagttaataaaaaaacttttgaaggtcatttagctaattatcccgaggctatttgcttagttaagctttttttttttgttacatagtgattaataacaaatgaatttaggatgcagatgtatggagaccctttctcgatttaggatagctcattgtatgacaaaaaaacatgttttgtcaaatcatagactactaaattcttagggcgaaccatgaagaacaaaactgctcctgaaattttgaacaataaaattataacaatttcaaacaacactctcagcatattgaaaaatatctttctattattaatagttgtcgtcagagctagcgaaactgaaaaataaaatatcccaacacaaaacaaaaaataaaacttatattagaatgaaaattttcaaaataaaattaatatacaaacttaggtggtacgtatttggttggaggtaatgaaatggaaagaaatagaaagaaaaataattgtcattccatttctttgtttggtagtattttaaagtattgaaatatcattctaatagaatgtcatttctatcattttggtggaataatatttcattttgaaatggaagaaaaaaccattccaatattacatgagcaaaaattaatgattttttatcaatctttttaatgcattttaaattttatttcaatttcattcaatattcttattctcattcatattcctattcctattcctatattttcattccttctaaccaaccaccactttagagtttaactcacaactcaattcactagctcaacaacattactaaaaaactaaaagccaaattttttttaagtataactagccaaagctaccctttggctagtaataagatactagcaccccactaacaagatagtatgaaagaactagtaaaacaatttatattaatataaagatttcaaaaaacttgaaatacttagccatgtgaataaaatagatcacttctcttgcctatttaccattatacaaaactacctcaaataaatagaaacaagtcacaatcaaactatacatatatataattaaactatacattaatacttgaatagctagtaaaaagaaacaaatcaaaacattcatatatctaaataaatatgtatataaataataaatacaagtaataaaagataattgaaaatacaaatgtaagaattatatatataattatattgaataataaaatatatttttgtaaaaaattaataattaaaactaaaaaaattaacataataaaaataatctaaaacttgaaaactaagaaaagtccacaattattaataaacattgattagcttcaaaattaactactaaatttattaaaaaatagaataacaataaaaattaaagaaaaatagacaactaataagagaattaattatgaattaatatgattatgttataaaataatataaagtagatg

SEQ ID NO: 236053 - DNA, 827 bp, Cannabis indica
aaattcatgaaaccgattccaaaatgatttaaatgaataaattaagagatccatattgatttcaagtatcaaaaacacacaaaatgtaggctttaatttcacaaatcaccaacgagtctgaaggtgaatttgatgaaaaatcacatatttttatggtttatcaattcgccttcatgcacaaatcactctcaaatattacgaaagtagtgatgcataaaggtcgaaaaatacatgaaggattcaaaaccaaaaaaaaaaattggtatatcacggacgaaaaacaaaaaaaaatgtgaatatatatatactcgaatatagtgattatattgcttaaaaacatgataaatagatagaataggatattctaatcaatgttatgcaataaaatcaagaattaattgagtattatatataaacatatatagaaaaaatatatatatacttgtatacaatatatcgcataaagttatcatatatataacgaaaaatatatataactatatataaatgtatctgcatatatatgaataaactttatgcacataaaaatatatatgtatatataaatgtatatatatataaatatgaatatgtatatatatttatatgaaaaataatcattttgatacacataaaaatgttaatgtagaatgaaattaacaagatatgaatcaaaagattaaaagaaagaaatcacaatcaaacattaaaaataaaattaaaccgatcgtatgaacatatatacatatattaaaactgaaaacataaattaaggtagagatatataatccgctctgataccaattgttagatatttatatgtataa

SEQ ID NO: 236054 - DNA, 1003 bp, Cannabis indica
gggtgcacttatccatcagttgttcaatcaatcaaatcagataaggttgacgaagtgcattattaaattgcaaggaagagatcctgattcagccgacttgagccttggtgactgggcttaacatattacgtggacctattgagtccgaggttgaagagaaggcgacgtcagaccgtttgatagtagaatacttcaatggggatccatccatcgacattggtcaactgcgtagcatctttgagtgttgcattgagaaggatgatgtttacaagttaggtatggtgttatttgtgatggatgttctgactgagaaagaggagaagactctagttccaccatttatcatgagaatggctgacgatcttgtttttttttttttacgagtacctatcgggaagatatctttcaacttgttgaaagaaacttggagtaaggacttcgtagaaaagaagaagcgtatggataggaagattgaaaatggaacaaatcagaaggagtcaaagtactcgacctatggatatgctataacattgcggtattggcttacgagtccatcctagagcttgctgagaaatttgtgatcagaaaatcgcattgctttcccagaatgatgaactgggagagtaaggaggtgtcactcgggaaggatgaagtcattagattatttgcaaaacatgtaagttttttaatttattgtatttgttcaaatttatttatttatttcattttaacttaagtctaataatctttttgttcttatttgcagttgatagtctactccattttatgttcgtggcctaatgaggccgagttttttagcaacgtcactggaggtgaggcgcctctatttgtggatatggaagaactggttgttcgtagtgatggacaacctactcaggatagtttgtgtagctaggcctcaaagcttacacaaaccctagaacaacgagcggaggaagttggaatgtaagaccctaactaacttaggcgtattacgtgattt

SEQ ID NO: 236055 - DNA, 1444 bp, Cannabis indica
taagtgatattttttctcataaacaacaaaaagttatatgtgatctgagtaaataacagctagcatgttatagctcgtattataaatgagataccaatatgtcttgagaaataatacataagttaaagtatgaatagatgattaattattaatacaagaaatcaaaagatatttaaaatagttcttaagagaactgttcaaaatatttgaagtttgctctaaacatagcaaactattaactgctcacaaaagatgtaggagattactaactgctcgcaaaaaaataagctaattactaactgctcgcaaaaaacatgtaggatattaactacttgtatcaaataacaagatagtgataatggtacacatatgaccctaaaatatcttaagctaaatcaaataaaatattttgttgtgaataaaaatacaatagacagacattaataactcgaaaaaagcatgttaaaagacataaaagtaaatatatgtataaattagcaatattggccatccaacaaactaaaattttgaataatattacaaaaatgccataaggatcaaactattatctcggcctaatggccatggttcagaaattaaagcaaaaataactaagtctatatagttggggacttagtgggttcttcttcttcttcttcctcggcctcctcctcaacatttactgcctcatcctcctagatctacttgcaaaagactcacatctcttcagtcttagctcccaaaaaactcatatccatcccaatatcggccaaccaagcttgataaatagatcgcttatcaatcatattaatcctaactttggcatcagttttggcatcttcaagttttttgtcaacttcaacctgggccttctggttcgcgccttcaagttctttgatcctttttgggaagcctcgagatctactttaacggttttctattgctcttcagcatccttcttgacttttgaaatcttcgactgtgagtcggttcattacatagcgaaaactttgagatgttccctagatttgcaaagctcgacattaagcatattaatgttttgaagagcccttttttgagccacaaaggatagaaaattaaatatgagcacttgtacaaaataaacaagaaaaatgtggtgagatagtctcccactttagaaaattacatagtcatcaaacgaggaagaagaactataataattactaaactctctcaaactagtaatcatgaaaagatcaaaggggtttagagggaacatatcttaatccgaatggcttgccctatcgaagttagtgtcatattgtttggcaatcccgaggtaagaactattacaacttaattggacataatgctcgggataccaactgtcaaacctatgagcaatgcgatctacacagttctaaatgtaaaagttgcactgactatccttaaatttaactaa

SEQ ID NO: 236056 - DNA, 746 bp, Cannabis indica
tatttccttcgttttggtttcattttggttgttttgctattttgtcacgatcgagatatgttcatcttcatcgttcgctccgtgcagctgaaggtttagtgcatgtagtatttttgtaaatatttatatgtggactgtataaatgtttataatgggccagcccatagtatttttgtaactttttttcttttttgtatttttttgcttttttccctaaaatttttgtcattaaatataatttttaatcacaccaaaaaactacttgtgacgaacacataatatttagatacaaattgttactaatttaattttaatttgattacacaaaaaaactacttgtgactaaaacatagtatttaaatacaagttgacacgaatttatttttagttacaataaatattgtgactaaaaatacatttagtcacaataaattgtgatttttatgtctaataattttaactacggaccttttaatcaaaatataaaaataatgaataattttttcgtacttttagtcacaaattttattgtgactaaaaataagatttttattagtaactactgtatatgaccactatcaacaccactcttttattatttattttattcttattattaaaaaatagtctcttgttgaccactttttaagagatccaagttttaatatttcactcaataaaccatctatttttgaatttttggatgaaaatttttattgattaatacttagagtgtttatataatt

SEQ ID NO: 236057 - DNA, 1000 bp, Cannabis indica
tgtgaaccatgcaacattaaatcttatttctgatctatattaataattatatctgattatattgaaattaattttatttagggcataaaacccaacaacacttcctcaacctcctgaaaatgactctcttcttgattcttggatctgttgtaattagcttgtgatgtcttggatactacactcggtttctcttgaaatcaagagtagtatcatgtacttcgatattgctcatgaaatgtggatcgtgttaaactatcagtttaaccaaggaaacggtccacagatttttgaattgaatgaaacactaacctatctcaatcaaagagatgattcggttagtgcatacttcacaaaactcacagccatgtgggatgagatcaatcaactaagacctcgtatcccatgtacatgtgctgctgctgcacaacacttggatcatcaaaatcatgatcaagtacttcaatttcttaagggtctaaatgacgcatatcaggctgtgcgtgatcagattcttcttcttgatccatgcccctcccctaaataaagtttttctatggtaatcaaccaagaaagacaaagatctttaggccatcgaatgattcccccaatggctgcctctagttcttctactcctcaagaacctgctgttgcagaaaatgcagcatccaaaaataaaaggccacgaccacattgtaccaattgccaaaaaccaggtcattacaaagataaatgttaattcctaatcgggttccctcctggctatggcaatcgaaaattagattctaccaacaccataaatctgatgctggaaccacatccaacaacaatccacaggcatcccaagttacctcctgtacacttgatttttctaactcacagcttagaccagcacagtgccaacaactcatttcaatgttagcacaacaatttcagccaacagatgcctctacatctactaaaaaagctgtggtgaaatttttttcaagtataaccgatcctt

SEQ ID NO: 236058 - DNA, 3551 bp, Cannabis indica
gaaaatactaccagtaaaagtactaggtcagatgaacatattaagtacgaaataaaagaacatttgctcttaagtgaatggccttctaagcggaccaagcccaaaggttcacataaaattatcaagtactcaagtcggatgaccacctttgaaagtacgatttttgttttctgtaatttgctttgtttatgctaagctaaagatcagatcagatcaacataatagctttgatgtaagttaatacggtaacaaacatatttccaaccaataaatgaataaagatatttatttgaattcaaattgagtctagttcattagcatattaccaatttaacacccagtgcgtacaaaacgtttggtcatacccaaaactccgaacagataaaaaagcatacttgtaaaaaagaaacaagtgaccaagagtcataagtctgctctgtaacttagggggcacctatacctgtacaaagcatttggtaaaaaacaaaacggaacacaatttcacgatgattataaacaaaggatgaaattcattaagaataacaaaagcatttaagcccaggattaaaggctgttcggttagctagttgttcgaaaaatgaaaaatatattccaagtttaaagactgcttggtcggtcaccttgtctcaaaagaaggcctattaaccaaacagacatataaaaaaagatagtaaaaggaaagcaattaaacggttgaagtcccaggctctttgtacggatcaactggtttgaaggggccagaagatcatcatttttggcagaaggagcctcaacattctaatcagaaggagaggtggaagtggtcgcctggggctccctgtaggctgcctgagcagcgcagtagtcgagaaaaatgtcttgcgcccagataatcaaagttttcttcgggatcggccttccaaaagtcataaaaaatctcgagaccagctgtctctaaggcatttaccttctcccaaagcctcaccacctcggatttatgtttctcaacctcagccccaagttcctcctccttggtcttcttctcatcctccaagctacgaagaagagtccagagacgctctctttcatcctgaagactagtaacgtcccgggacaaagaaggatatttgcctcgagatgctccgttgatggcgtctcctgcaattccttggttaactcagcaactttggtctcaggcgccagaagtttcttgttgacctctcccagctctatctgctcagccccaagctgtaacaatgcgtcctcaacatcctttttggccaagtacacttatgtttgcattgtgttggaaatggaaaggttcttagtagcagtcgacttagctcgggaataggtgtaagccatcttcagaccagtttgtgcagaaaaaaggcattaaaatccaaactagttaaagagagatgaacgggagatgttagaaaagacttacccgtgaaagctctttcaagaatcctcccatgaccatcttcaaagacaagtcattgtctcccccagctaactgctcgttcacctcagggaccgactggctcacatagtggttgagcatgtcgctacctcttttggtctctgtgtgcaataccaaaggtggggtgggagccttaactcattcagactcgcttctgatcagctcggatcctccttttgcttgctcaggttcctccgaactctacttgggaacctttggacatagtgattttcggggcaagagggtccgcgacaggttgttcctcggaaagatcaatgaatcatcttctgagacatttctgcacagagtaaaaacaatacagtcataagaaagtataatatatatgaaggcatggaaatcaagaaaattaaatgcaagatgaagtactctgcacgctggcacgagcatttgcctgaacaagcacagacggggcgtcatcatacgaagaatcttcctgctcctccaagatggttgtcctctttccttctacaaggtggatggctgagtaggttgatcaggctctctgatcttgatagtatgttcaatgggcctctgtccggtcgggagggttttcttcttcttgagtggcctctcctactctgaatattcatgagcctccttctcctgctcagaatattcctaagcatactgcttggctcctgcatcacccttcaacttaacctcatgcttaagttgaatgagctccttctcttgctcaactccctcagcccggccaacactggacttcttcttcttccccttcacgggctggggtataaagtctgccggataaagcttgtacttcacaaagttgtcttctgaggtcaacaaagtgatattctcagagcagcatccggcagttggacaatctccttagccttgtccctgagtgcaaaagtgagaggtcgacagcaatatattgcgatctattgaaaccgagtataagtggtatccattccttccacaaaataatactcgtcaacaaaagccccgatcttgctaacatccttgtccacggtgcccgtcagccacttgaagtctggctgagagaagtagaagtaccccgacctgctctgcttaggggtagactttaggtcaaaaaaacagttgacctcgtttggggacggcacaccccattcttgaatggcgtagaggacgaacacggtaaacaactacttaatgccctttggagtgaactgggtcagataaaggcaaaaatagtctataaccttcttgaagtacgggtgcaaaggcaccatcgccccttgcttagtgtgagcacccgaccaagcacacaaccctctctgcgggtttgttgcccggtgattcgaagaaggaatgtaacactccagtctacccaaacacccagccttatccaaggccttcatacatgcctcacttattttggatggacggctcacccatctcctaagcactttgcctcttgtggggaactacttcagtaagctccccgatgacgtagtcctccccttcgaccaagacgtcaccctagcagacatggctcccctcattataccctccaaagttttgaggttcagccactccttcctcctcgacctcagaagggctgccaggacggacgtcgtcctgctcaacaatctcttggacctcaatgtcccccttatgatgtccctcctccatggcgggcgaatcttgttcggcacttggtagtgtggcgagctgggccacatgagtatcagatgcgttgatcttctgcatcgtctactttgtgcgggccatcatcctcctcttggacggatactgatgtgtatgtcgtgcaaccccaaatgaagcggtcgtacccctctcctgcgatctgctcagagttatggtggttttgcactatgggttctggagtaggagaacgatcactactcaccacccaatcttcaaagcttaagttagaaagtccgtaactcgaagaggacggactggcacgaagacgaggttgatcctcgtacagaatttgaagtaaatcctggtcgattcggtgttcgcctccccaaaactcactagggttcatctacaaaagacaacacacgag

SEQ ID NO: 236059 - DNA, 1421 bp, Cannabis indica
cttcctaagctcctagatgaaacgtccgtatccttgacctttgatctagtcggggtaaaaatggtgttgcacttcaggctctagagaaggtgtgtgtttgctacttatctcccaacctttgaagcttgaattggagagaccgtcactagatgaggacgaactagcatggagatgaggatgatcctcgtatagaagttgaagcagatcatggtcgatacgatgttcgcttccccaaaactcactagggttcatctacaaaaggtaggacacaagatgagcatttggtcgggctaacgaacagaaacatgttggttatactgaccaggtccgatcaaaaggatcacaaaatagaaattttgcatgatattgaggtttacaatctagaattttaaaattttgaattaaaggttgattttcactaaaccccgaatgggtaagtgaaagtgaatatcgtggagccgaaatcaaaacgcaattattatccagcaacgtgattaagcatagtcaagatttcaaattcctaaacctaaattttctatggttttcctagaataagttcaagaactatcaagttttttgcagcagaaactcaaaaaatctaatattcaagcatataagaggaaagaaatgaagaacttactcattgttcgaagctttaggtctgctcggatgacgctagtcggtgtttcttgagaattctttgaaggattttaaagaaaaaggtttcttgctttaactcttcaaaatcaaaaatggctaaaagtggttgattaaggttttcatccctatttataagcagattagtgaggtaaagtaatcattacaaattttaaatacctcgagttccccccaaaagtgtacgctgtgcactcaattacctaaaggacaaccgtcgaaatgtgctaattctgaggcgtggttcaagggacctgttagttagcattaatgagccaaaaattgaagagacccttggtcatagtcacataggatcatcaaccgacacttcgaacacatgccacctgtttagataagggtccaaaccaagtgaagtccacatgcgaccacaaaggtcctacgcagacttggggagcaaatattatcccattttttgcactatgacgtgactgaaaacataagtgacacgtgtcctgcattcctcgcatatgggcggagatgaatgtcccgaacagacttcatattatacatctgtatgtatgcttctaattacccgagcagggtggaaggtagattatccaagcaggagcaagtttggctttctgaattacttatcaggacttgactacttcagaacgatctcgtgaagtccaaacacgaagataatccctacaatcgtgggattgagtcagaggaatatggcaacctgttccaatttcttattttgtgcattgtaattatgtaat

SEQ ID NO: 236060 - DNA, 1354 bp, Cannabis indica
aaaaaaatcttttaacataaaagtgtaattttttttttttaaataacaatttatgtaattctcctttcttttttaacttccctctttagttcaaatttagagttaaaaaaagttaaataaataaataaataaatattaatggattattaataatagtttactttttatatactttgtaatgtataaagcatttatcaaatattatgtcaactaatttttatatcaaatttgacattatatatagaattacattgagataatggtaataaacattatgtcttgatgcagaaaattagccaactgtttgtatgtatagacgagataaataagagatgagtagagtaaataaagagacacaaaatttatagtagttcacttcccatgtcgtgatggtaatggagctacgtctacttcaagtttttatttcttacaagaattataagagaatttactaagtgtgaaagctctaaatttctagaaaaagaaactagagagacatgctctgatcttatgggcacttttttgaatgtaaaaaatgaactagaggagctctccttttataagcaaggaggtcctattgaaataataataaaatattaaaaaaaatgtgaaaaaatacatttaagctatttttgactgtcgatggtgatctagaggtgaaattaacgatctagaggccaatcgccaacctttggagcttgaatcgtgtctacaggacctttttcagataagttgtagttgaaatttataactctctcgaggacaaaatttggacctgatatcatgatgacttgatagagcattaaaatagtttctaaatgcaagttgaatcacatcaatcagatcaatattgaatgacttatgactattttattgaaggatgctctaataccaacgccaaagttgacatcatatgtcaacctggatgatgggtcaagggaaaaacgtgttgagcggtgtattttttgatgccttagtaatattttgacatcccttagccaatttctttgttttggtgaagccgctcaccagttttcgaagatattgctgtttcacaaaatcgagagactcgaaactacctgattggcaactagttcactttgtagaaaaagtgtatatatgaagttgtgaatttaacttgtctaagttcatagctctcgtttattataaaaaactagacgaatacttaagacagaatcagaatcggataagtccaacctagcgtaccaggccattcattaacctaggcgccgagtgccttttttcgaagcttccatgatgtcatttttataattttaaggtcttcaacatcaaggatgaggtattctgccccatttttgaccattccaaagag

SEQ ID NO: 236061 - DNA, 1354 bp, Cannabis indica
agacgaaaaacaaataaagattatgttataaccccaagaggctgaaatttttgggattaaaggctaaatttcacgaagctttgaatgagcaaggtgagaatcaaacattgtgagattaaagtcaaaatgttgtaaataacaaagtcgtacgaactattacagaagaaattacaaagttttgaactaggattttctacgtatcttttacaacaagtgaagcacacctgtattttctacaatagtaacctagaaattaaagatacaaagttaaagaagagaaagattaaaaacttactatttgaagcctaagcgttgtccaggcaaagcttttcgaatactcactgctagaaatcccaggatagacttgaaagaaaactcttttttcttttgctctgagacgatttcgtggagaaaatggtgaaagtaatttctaagaagtttcggtcctatttataagctaacttgtgaaacgaggtaatcaattcaaaatcctcagacgctttcatttccccccaaaagtaaatattgggaaattaaaagaaatcaagtgcctcaagagaataactgtcaaaggcatgcaaagggaaacatgtctagaggtattaattagtcaaagcattaattagccgaaaattgaagggacgcctggtcagactcacatcgaatcaccagcaaacgcgcccaacacgtgtcacccattcaaatgtaaagacaactccgatgaagtctacacaaaactttggaagtcccgtacaggcttgggggcaagtgttatcccaatttttgcactctaacatggcatcacatgctagtgacacgtggacttgattctccctgcctgcccgaaggagatgttccaagtagagtaccgtatatacctctacgggcaaggtcctcccaaccgagcagtggataatccaagcagaatatcaacacttagcaattcaagcatttgcatcgtgaaccacaagagcaacccccaaaaaatttggggtcgtatcacagagatatggcaagctatctaaataccacaatcagtgtattttaaatatgtaatatgtattcttaccaattatagatattgaaagtaaaagggaaaccttccctcaagcatgtagccctataaatagtgatccattctcactggtaaaggggtcgaaagaattatctaagagagcatactcagagatttcacagtaagacctttaagagaggaaacactgcattcttcaatcttaaatcaatacaaatcaaggggagtaggctattactgaactgcttggggccgaacctctttaaaaaccatgtgctctttatttatcttttcatatcatatctgaattatatcctttat

SEQ ID NO: 236062 - DNA, 2079 bp, Cannabis indica
gtgtaattactaaaacttttcattccaaatattaacaactaaaatatgtaattactaactattataccaaacatgatattaataatttatatataattacagtacttcatatttaaacacaccttgtattttaaaatatatagtgtggtaatcgattatgtaattactaccctagtaattacatcattacttacaaacataccctaaacaaaatcaatgtccatttcagaaacaaaaaaaaaaaattaattaatatgggaatctttaacatctcttcaaaatggtgactgttttttgctcaccaaagatagctcgatcataattagttaagcgacacttttggcttatgacgaatctttttagctcacaattatattgtaattctatctctcaaaattaattgacaatgagataagtagatcatgcatcttttatatatatatatatatatatatgatgttatgttctcacattatcaataccaaactatctaacaatacccaaattagagaatgaaaatagaaaataaaaataactacttgaattgatttatgatagctccacaaatgaagtataattatcatcataaatataatttaatagtttcacatttctctccacaaaaacaagtccgaatcctcctctctcaatatataaaaaaaagcgcaagaatttatataagagcattatacccaaataaatgaaaaaaatgaaacttgcgatttgacaaataatggctgcttttaattgtttatttaattatttattgttgattgaatttttagtttgacaaataagccaaaccactagatttattttaaattataagaggttttaaattcatttatatgaacgaatatcaactatatattgagcaaagaagtcaacacatctggttttcctgaattttaatttccttgacattgaaaagataacatagaatcttaataaattaaaacaataattattatatatatgtctattgagcagaaaatttttattaaaaaaatgaaaattgtgttagggaacaactttaattttaaattaataatacatatgcaatgtttcttgacatataaatatatttatatatatacaagtgttttggagtctcatgatgaaaagagagatggaagctatgatgtcattgaagaaaaaatcagagataagatcagccattgaagagctttctatgtcattagctaatcttagaacaagtactactactcatgatgatgatgatcatattgaagacaaaatcccctttcacctttttatttctctctgcaatcttcttcttcttcttcttggttaatattctcatctttaattttatatatgtgtatattttatatgatgatgatagtatgaaattaataagcaaatgtattgtactgataaatcaagcttattgtgtagataaaatcggtccaacaatggctgtcttgagacaagatattcatcagaatattcaggtaagaattacatttatgtatatatataaatatatatataatataaattttccaattaatcaaatggggttttgatttctttgcatgtttttgttctgtctaattaattaatccaatgattgctaagtatgtttgttggttatgttttgtatatatatgaataatgttaaatatatatttaattatgatgttttttttttcattatttatgttatattttcaattatatatatgtgtaattaacatgcatataattaatatggaatatatatgtagagactggaaatggttcatgagactgattcttcaacatattccaatttggttgagattttgaagaaagaagttgctcaaggaaatgcaaagaaacctaacagctgtactagagcattgctctggcttactaggtagcattatattgtaattaaacatttatatatatttctatattgcagtttacacatgcatatttatgagtagggtaatgctaaatgtatatataatgtgatgtcacttatcactcttataaggaatcactaatcttacttaattttagttacaataaaacttgtgaccaaaattaaaaaaattgtaactaattata

SEQ ID NO: 236063 - DNA, 1824 bp, Cannabis indica
gaatcaatggccttcatagatttttccattttccacaactgttggaacttgtggtccaccgtcaggcgtttctgcactatccactcctcgaaccactttggtaaactcggagagaaaggccatctcgcctcatcgtcatgtttcatccatgacccgaacagtgggaaaaaagcacccttagaatcttttataacagtaggaggcttgaagcaaaacttctgttcgtgagagataatgccgcattttaaacaaaacttgggaagtttctcgtatttgtattgcacccacaggtctttaatggattccctcttcatgaagaaacccgagaaaaggggtttgtcaatgttgatggtggccttgaagcgtaatgtacccatgccgaatgaacctctttcaaagtctatgtatctaggcagtttgtagattgttgaagcttttgcagcaagctcttccagattagttttgttccaataaaaaggagggattccgcttagtcgtacccagaatggggacttatcaaatttgacttctgatggggcaagccaagatggccaaggcataatgaccaataacgccccgcagataatccaagggcgtctattaagaacattccaggcgtcttcattagttgcaaaagtgaagtgtataatcccttcatcatcctctttccagctccaccctttgaaagatgcccaggctttttttaaagttccagcaattgctttacgaccaagtttacctttgcatatgagttttcccagtagcacatttccttgaggttcctgaacttcagtttcccctgggtcaagacggcatgtcaagtcttcagtagtaatctgaacagaatcttcgaaaagatggctgaggctgttatccgccatagcgatacacgaatgtagtggactgcaaaatggtgaactttgcaacccagtaaagttcgaagcctactgcagagtgcaagagggctttggtaagcttccaatgaagttatactctagacagagtaatcagaaaacatttctttaattaacctcttcctatttccaacactaatttctaaaaaaagtctgtccagtccaaccttgtttattcataatgaatacaagaaaggccaaattttcacactatttgttgttgttattcactactcagagagtaaaaaaatattatcgactgtaggagctgtgctgggccatgatattttatcatatcacctataatcttctcattgttttttaccgtgtctttggatttgtcgtgttgttatgttgttccaaattatacattaagatgtggattaagttcatattttttttgagtttgtgctttctaaactcgcactaatcttgtatcgtgctaaaaaattacttagcccatattgaaatctctacatataataataacagaaaattaccttaaatatcataaaattttaagagtttacttttttatggcataaataaataaagctatagtggttatgggttttttgtttttttacatttatatagtttttttatgccatatttttgtaaaacaagtagaaatcccatatttgtaaaacaacaataagttttgccggaaaagtcgctagaaatgtcaccggcactggaaaaatcacggtagccgaaaaagtccatggaaaagtcaacatggccaaaaagtcaacgaaaaagtcaacgtcgccggaaaagtcaacagaaaagtcatcgttgctggaaaagtcaccataataaatgtctcatatataactaaaaatataaccggtgatatgaataaaaactaataaattcaaaccggctataattgaaatataatcggttc

SEQ ID NO: 236064 - DNA, 785 bp, Cannabis indica
acccactgcccatactcattcttcaatttccaaattaaattattacttctaggagtattagcagcaacatgaaaaaacttattgttatggtcaccatcttttagctaaaattatttcgatctttgcttccaaaaaatctccctctaatttagattctcaaacaacctttttttttacctctttcattagtgaacaaaagcattgtcgtgcttattcttcaacatattgagcttatttttacaatcttttaaacactgcttaagtttccaataatcgactttacccattctggaagtttaaccgcacaagaattaactttttcaccaattttgatacctacaaaatcatcccaataatctcgaacaatttcatagcacatcggttcctttagccaagcgttttcaaatctaaatcgtcgattgccgaaaaaattaaaaggaataaatggttcaagaaaaataaggctatggtctgagggagaatgttaaagattatgaagtttggcattaggaaaagttgtgaccaaaaagagttaaccaaggctctatcaagtctaacttcaatccaatcatctcttctccaatttttctcccaggtgaaaggataacccagcaagtctaagtccaccaaatcacactcatggagaacctgttggaaaccatcaatcgacgatcttggataagtgttaccccctctcttatcttcagcacttacaacattattcagatcccctatcacacaccagggaccatcatctctatcccgaagtgttggaaattatttta

SEQ ID NO: 236065 - DNA, 1473 bp, Cannabis indica
tttcataaggtgtttttaagtctatcactcagtatgggcttctatgtatgaggtatattgtggtgctagagcttccccccaaaatggtttttttaacccaaaattgaacagtaaacatgtaactttgttaaacaaggtctggttcatccttttagcaacaccattttgctctgaggtcttcactatggttctatgcctactgatcccaaattcttgacacatcttgtcaaattcagagttaacaaactccaacccattatcagtcctaaggttcttaattttaagatgtttggttttccacctgaattttccaatttctaaactgttctaggcactcattttttgttgatagtaaataggtccaaacacacctatactataaatcatcaactattaaaagaaaatattgcttactggagtgagtacgcactattcagtatctttttagttgtgtgccttaccggagtggacttcatcttatgttatttccctaaaacacaagcttcacaaaatggtaaggcacgaagtttaatttttcaattataccttgtttgtagagttctttgaggccttattcactgatatgtctaagttggtgatgacacaacttcatatccaattctagccctttcaccatactagcttctctagatgggacagcttttcttggagaacatataaaccattaatattttcacctttcatcactaacaaagaaactttggtgatctttaagcttctgtgtatggacttgtatctgtatctttcatctttaagcgcacccagggatatgaggtttcatataaggtccgagatgtgccttacgttcatcagcaccttgagtcgaccatcatactttttgatggcaaccttcccggctctaatgaccctgcaagaatgatcatttcttattagaactctacctccattaactgatctataatcaaaaaatgactctcaactcggacacatgtgataagtgcatttggagtcaataatccactccctgttcatagatgactctaagatagagaacatttctccaaccatctgtggagcagtcgtcactatcttccacaattgtagcagaatccttcacgtggtgatggtgctagaagtctttcctatctccattgtgagattttttgaagccttgttgttccttgtttccttctctctgaacttcaatcttgattgatagtgatggtgtttattcttcgaacttactttcttgggtgatcttcctcttaccaaatacacttcttctttcttggattccttctccaactgtaattcaaaatctttcgacttaagtgctgcaagtacatcctccaatgaaatcacatctctgccatacttgatagtagcctttacttcttgatatgcgattagaagcgatctcagcaaaatgatggcctgactttcttcatcaatcttgtgatttatatttgtcaatcctacaataatctcatt

SEQ ID NO: 236066 - DNA, 905 bp, Cannabis indica
tacttttatgtagttttttttattgattttatgttgttttcgtgttatttttttaaaaactgtaaaaatatatataaaaaaaaaacattatttcaaacgtaaaaatgtaaatattttacaaaatattgtgccttatgtaattattctataatttttttttcttactcttacaaatatatggtatattacaaaaagagccaattccttgtattatcatagtaattttaactacaaaattgtttattacatacacaccaacttctttcattattacaacatataattattggatcatataaagagccaaatctttgagttggccatgcaataatacaccttaattcaaaataatattgtatttcagctgtttgttaggcaagaaaagtccccaatgcttctcatattcagggctcttcagattctcattgaacatagcaaacacataagtctcaatagccttccctggtctcttaggagtccctccctttacatgttgaatcaaattagcaatataagtcccggcgttcgcaaacgacgtccctggtcccccatccgaaggccaacccgactccgaaacaacaatttccaaagaacttcccccagctttctcaagagcagaataaacagcatccaaaatagcatcaaaaagatttttgtatccattttgaccatctctcaccacaactgattgggatttaaataaagcatagtcaagagaaatggtgttggagttttccttgtaactaaagtatggtacacatttactaacaatggagatctgttgttcaccaagaatcgaattacagggttgattataggcccataatttgacgtaaaagaaccactagaaggtgggtacgacacaccgaggattccagtattgacagatgttgagaccttgatcc

SEQ ID NO: 236067 - DNA, 899 bp, Cannabis indica
ttggccaaggttagggtttgcatcctaaggtcgaggttggggtaggagtctaaaatattaattaagaaaaaaattgtttaaaatttttttgaaagtggttttattttgttttctcaaataaaaaattaaaaagtgaaaataattttatagaacatatgtttttgaaaaatatttttacttttctaataaaaacaattaattaaaatagtattaccaaacactcttaattaaatataaagtttgtgacaccccaccatttgtaatgtgtactactttttcaaccaataacaatagagtatccaccatatatactaacccttatagggtgttcactactatagaactaccttaaactatatatctagtgatataataaaaccaatatatgacactgccctctctacacatttttaatcataattgtaagacgattgaagattggctagctagtattcaaagccgatagcaattaacagaatattttagatttaattttttttttcttccaaaattttctctgttttatcttacttttgagcatgtttttgatttcatacatattaaaagttgaattaaaaatccaattaaaaatcgatctaatttaattacatttatatatatttaaagttatttatattctgttttacaaaaaaaaatatttatattccaagatcaatcgtgtgttagctaatcaatcttggatatggatctatttacaagggctggagctatttttctcaatgagggagcctttgatcataccccagcaatattaaatatctatcctgatttttcttgtggaaaaaaaccatttaaatactttcgcatgtggacttcgcacccaagttatcatcatgaagttaagatactctgagagcaaaaggtgttaggaacaaaaa

SEQ ID NO: 236068 - DNA, 903 bp, Cannabis indica
  modified_base (853)..(853): a, c, t, g, unknown or other
gagcaacactccaacgaattcatttttaagcggaccattgactttttgatctctagtcatccttgcaattccctttgcgactgattcaccaccaccacgacccctttgctttgataaattctttaccgcaatcaccacaccaacacaaccattatattccaccacaatacagatatttttaagtctcactattttaaccatactaaacgagaattcaaagagtgagatagaactttgactaaaataatcaaaaaagttaataataataataataataagcatataaatttaaatatatacagggactcaatataaaaatatatatatgtataatatgaagcagagtatacataaataagtatatcctatttagaagagggcataccttttattattaacacacgaaaggaaattgaaataccttttggtggtgaacataaatcgaaatcttgtacgtttgaaaccttttggcggagggagatgacggggttaccggaggcgtcaaggagcaaacggttgtcgtggatcaaaagagattattttgattctcagacaatagttgtgcttgacgagaaatatcctcagcaaacggttttaagttataatttgttgggggaaaaagtatcattttatattccatgatcttagtttttatttttgattatgtgtatttttagtgtattttttttttctaatagaaagaatcatgaacattttttttattttatagttttttaaacaaaacactaatagaaaaatattttttagatatgtggagtgagtataaaaaaaaataatagaattttttttttttaaatatgtgaacaaatgtatttttttatatgtgcctagngttttaaaaaatgatataataaaaagatatttttgtaaatatgtgtagtg

SEQ ID NO: 236069 - DNA, 559 bp, Cannabis indica
ataagactaactcaaacaggcactattatactattgattctctacctttaagccaatcttctatggaaggtatgataaaaacactttcttggtcgcaattgaccaacttctaatcatttcgattattcttggtcactagaatttttgtttattcatcattcacacattattactaaacaatattattacctcttttttctcataattaaccatttattcatatcatctatttctgacaaaacaatagaaaaagaatgcagagaatgttatatttgaaattttagactcagatgtgatttgttattgaattgaatgtagatgatgctttgaaaagcttttgacttggtcaataattttctatgaaccggactttgcttttattaattaagagatgttgttcagtgcttcttttggtttaatcaacatctctttttctataaaaattcttgcctagaatgtgatgagtctgggtgcaataattgtttgaggattatattatcaaggtggtgtgttgagataattagaagttatttacttattggtcaccttatcttgagca

SEQ ID NO: 236070 - DNA, 1025 bp, Cannabis indica
atgaaaaatctggtgtggcgagcttgtcaagggtgtcttccaacgatggttcagttgcgaactaaaagggtgaatgtgtcaacaatctgtccaatgtgcagtatgcaggaggagaccatttaccacgcccttgtagaatgcccagctgcacgactctgctggaatagagtcggaataggcactctgctgcaagataatgcaacatttctggactggtgtttatcagcctttttggtgcttgattcagatcaaaagaagctcttgattgctctttgttggtcactttggaatgcaaggaacgacaaggtttggaacaacaaattgtcaagtgcggaaagtatagtttattcggcaaaaacttaccttaatcaatagcttgctgctcataattgcactacaatttacccgtgtcctggcttggtgcaaggtgacggggctgagcagtggcagccaccaattgcaaatagcattaaggttaatgttgatggcgctatatttgctgacactaatcagtatgggtttggttttgtggcccgtaatgcacaaggtttgttgatcgaaggagttactaagagttaccaagggtcggtcacaccagaatttgtcgaaacattgggtgtcaaggaagctttaagttggatcaagagaaatcaatttagccaagttgtccttgaaaccgatttcttggtgctaatacaagctttgcgtagttcaattgaaatgatatccatgtttggtcaaatggttaaagattgtaaagctttattgaaagaaattcaaaatatttctgttctttttgttaggcgatcagccaataaggtagctcataactttgctagagcttccttattttatcctgattgcagtttcaacttggggtctgtcccggttgatttgctacctgtgttggtagctgattttaatggttaataaagataagattttccattcaaaaaaaaattctaacaaacttatgtttatttttcaataaaaaaaatgtttacttcctttttttttaaaaaaaa

SEQ ID NO: 236071 - DNA, 2358 bp, Cannabis indica
cctttttcataaaacaattataatttttttgacaaaagatttttattttgagaccgtatcatggccagaaattcctttaacatctgcctacttagcccaaaagcaaaagcaatatcaatgaatctcctcccttcttctgttttcatatacaatggagcaatcacacaacgattcaacaaaagcttgaggtcttcaatgctttcgtccacaaaatcgaacagaacaaaggcctcacgaaggccacatactctatacttcttattcaaagtcaatgacctcgacagtaagaatggaagtgattgagaaatcaacgatcacgacccgctaaatcctccttccaccgctcttctcgactcagttcggcgtcccgtgtccacccaccagtcggcgacggcgactgttgaaaggttcagccaataggacccgaacccgattacaccctacccgaaaatccgacccgtgtgcacccctatttagaactttgtcatctgatctttttccgtttgtctcatagatattacaatgtttaccaatgataaaaggcaaaaagagcgcaccgggagatacggtactccaaggcttcaataccttcaggtagttttttttttaatgtatgatatatatgtccacatacctaataaatcatatctgtaaatttatgtcttttcgcttcactaagcttcatatacatgccccaggaattggttactcagtttcaggacgctacaaatgaaggtttgtttcgatattgggtttctaaatttagttttacagctcaatgaaaattccacagattttgatttgaattgtctttatgcatttttttaaaatggcctagactagaagacttgttcttgttgtgctatgtcttgagtaccctacttgataggaaagaaaatggtgaatgatcataatggttgacttaatttgaaccctcctttgcacacaatccacccttgaattctgagcaattgagctagcagatggccttgagttcgaatcaggttgacatattatgtaaatttgataaacaacttatttattacctctagctcttattatcacctctaagaaataatacttcctatttcattcttatatgcagaaacaaaagagagagtggttgctaatttggccaactttgcttatgatccttataattatacattcttgcgccaggtataagttattttggctagagtggtaaattcaaagttttgtctataaagttttacctgataatcatttgaagattgtaaacagctcaatgttttagaactctttctggactgcataactgaaccaaacgagaagctagtggaatttggaataggaggggtatgcaattcttgtgctggtatgttcatcaatattaaccagtgataacttgatctttattttgaggcttgtttatataaacagatggatcattctttttactgataacttgtttattggtatgtttttttttatttgtagagcctgaaaatgctgcaatcattattcaacatgggggaatccctcttgcaattcagtgtttgtcaagcccagtaaaaaacactgtaagcttgtcctttgttctactgggacctcaatttgagatgcataatatactcctaaatgatcttgttttaatttgtgtattgttgttccttagtttagatttcaactattccaaactatgactttgagacactttgaacttgatagacctactaagagtagcaaattctaattttaggtgaattcggcacttggatctctttattatctctgcaacaattctaaggggcgaggttttaaaaccagaagtgatagatctcatcaatagatatgctactgctgaagccacgagtgtcagcttcagtaacttggccagggcttttttggacaaacatgtatttgaaagcatttgacagtcatggagccaagtttgtttcattgtaatcctattgaaaacaacacaaaactatttacaagaatagattccttcccctactcttatattattctactatgtattcatttgtactgatggaaggggagtacaggaaaaagaaatcagttccagcctttgtttctttgtttctttttttttttagtctacacttgtctttgtcttgtctatgaaacttgaatactaatgtcatagacatttgtgagttgtgaattgtttcaagtcacacaggagaaacttatcagttatattcaattaacatgctgccgcaggcagtgaaataccaaatacatcaaaattgtcggtgtgacattttccacccaaaaaagtaagtgttaattttgttagcacctagagcttgtaagaaagagaatggaaagacttatcaatgaatggatatg

SEQ ID NO: 236072 - DNA, 968 bp, Cannabis indica
gtttgggtccacagccttgtttgattgtaaggctacacattatgattctttaaagcaatattaactttcaaagttgtattatataagctcaatgataaatagttaaaggcaccaatacattttcaattggtgtcaatctctttctgttgtcatataacaaaaagttggtcatcgattcattcagactttatttgttatcacaatatccaagtcataaagtcataattcatttctaaatatatattataacatatataataatgagttacgagttaaacgtcaagaaacaagcgaaaggagtttaagtgaggcatcaagtagttgtatcaacatgtctgaccgaccaggatgagcttgtatggccgaccagggtttgagcacaaactggcctgtaaaaaggtgactttcagaccaagggaaggtccgttcgaccaaggaagcttggcctctgcaagaaaaaggtgtacaaagtctgacctccacctccaaaagatggcctccacttgccaaagctagcaggagcatgacctacaagatcctagcaggcacatggccggccagaccctgacaggagcatggctgaccaaacctcaacatgcagaccttgtatggccagccagcctgcatcctgcaggtgcatggccgaccaacttttcccttgcaggacattgatgcgcaaccttcatctgtggacagcaagtcaagctacgagttgggccttgacagtccactaagacgttacaaaaatatcaacaactttcctattttcaaagggtagccatttatatttattaattaaatatgtaaataatagctttatttgatctattcctaaagaaattagacatataagctttactatataaagcacattaacctatctctaaaacccaatctaaagtctcaaaccctaagtcattagctctcaactcaaagtctaaaatcctaatcctctcttctctctttac

SEQ ID NO: 236073 - DNA, 794 bp, Cannabis indica
ctggaagcaccggaaaaggtggactaggagcccacacttgctcatatccactcttggccagctcggatccgccatttaattgttcaggcgtgtctgagcttcctcctcgagaatccttggacttagaaacttttggagtagaaggatctgcaacagttagctcctcagaaaggtcgataagctctccggcttgtgccttttccttagaaagggtcgcctcaccgcccctagatttcatggccggaggggacgagcttgagcttctccaactctcttcttcagggcatcaagtatcttctgagacatgtctgcacgaaacaaaaatagcatggttagagtaaaaaaggcatcagaagcataaagcatgatagtcaaaaagtttaaaaataagacaaaatatcttgcaaagcgattgtcagaacaagactcaacagtctaccatcaccttataagtctcttgcctctgtcagaacggccttcccttttcccagcacgggaaaatatggccgagtaggtgaactgagctccctaatgcgaattgcatgttcaacgggcctggattgggccggaagtttcttcctcctcttgagcggagtcacctgctcttcctcagcctcatcttcaggattgaagggctcatgagcatactatttggcccttgcacctcccttcaacttagcctcacgcttcagttcaatcagctcattctccttatgagctccattagctcgttcaacaccagatttccacttcctccccttgaatggcttaggaatgaaatcctttggatagag

SEQ ID NO: 236074 - DNA, 3874 bp, Cannabis indica
cttcgagatgacaatgtcaacaactggctttccaagcttcaagatgccatctatcaagccgacgacttggtggacaggatcgattatgaagcactacgaaccaagcttaaagatcacgatcaatctagcagccccacaacaaaggttgttcaacaactgaagtctatgtcacctttcttgtccacatttgataaaactgtacagagtgatgccactgagatccttggtacactagatgatcttcttgctcaaaaggatgctcttggcttgagagaaggccttcaaaacacttcttctcaaaggcctcctgctcctttactcgaacaatctgatgtttatggaagggatgctgaaaaagaagccattgttgatttgttgctaaaaggcgatgttgatggtggtactaacatttcagtcatcccgattgttgggatgggtggcgttggcaagaccactcttgctcaacttgtttatgatgatgttcgagttaaaaatcaatttgagctaagagtgtgggttacggtgtcagacaagtttgatatttcaaagataacaagagagatctttgagggtgtcacttccaacaaatgtgaaattgagaacccagacgaaattcgaagaagattgaaggaagcattgcaggggaagaagtttatgtttgttcatgatgatgtttggaatgagtcttatactttgtgggacactttgaagagctgtttcgattctggagcaaatggaagtaaaattgttgtaactactcgaagcaaagctgttgcctctactatggccactggtggggatattcatcatctccaaactttgtcaaatgaagattgttggaagttatttgtcaaacatgcttttggacccaacgatgacctcggtaataagtacaaagatttggaggaattgggtagaaaaatagtaggcaagtgcaaaggtcttccgctagcaataaaatctctcggtggattattgcgctctgaacgaaatgccgaaaaaatggaaggacatactcaatagtgacacatgggaggagttgtacaagaaggagggttctattcttccagctttatggttgagctaccatcacttacctacacgtctcaagcaatgttttgcgtattgttccataattcccaaagattatcaatttgaaaagaaaaaattgattttgttgtggatggcacagaattttctaccacttgataaaaacagcaaaaagatgaaggaacatggggaggaatacattgaagatctcttatcaagatcattgtttcaatattctaataaagaaaaatcattgctcctaatgcacgacttggtacatgatttggccatattcgtatcaaatattttttgctttaggttggatttgagtaatgatctacttaacctttcaacaaaaactcgtcacttgtcatatatgaagaggaaatacgacatggacaaagttaagggcttgtgtgaagccaagagcttgcgtacctttctagcattgccattcgatgaaaagtttgtcacatcagaaaacatatcatatatggagtatggtatgttgcttacaagtggaagttgcttaagagtactttctttaagtcaatgtctatctatgaagaagctgcctcattcaattgccaatcacaagcatttgaggtatctggacttgtctcacactcatattgaaaaattacctgattcagtttgtaatttgtacaatttacagactttattattacgtgggtgtgaagagcttcgtgaattaccaaagaagatgggaaggttaattaacttgcgatatctagatattgaaggtgtacgtctgaaagagcttccccaagaactgaatactatagaacacttgtatttcttatctgatgtgtttttgagtagtggaggatttaatatgaaaaaggtaggacagcttgagaacttacatagcatttttgggctggaaaatatcaaggatgcgagagaagcttcggaggctaatttgaaggataagaagtgtcttatgcaactaactttggagtgggatggtaatggtgtcgtggctaatagttcacaacaagaaaaggatatacttgatgcacttcgaccacatacaaacttggagcatcttaagattcaaggttacaaaggcacaagattttcagagtggattgtaagttctgcattttgtaagttagcatatatgacaattatcaattgtaagaattgttgtatgctacctccacttgggcagctaccatttctcaaaaatcttacaatccagggatgtgatagtgtgatctcaataggtaatgagattcttggtgacgagggttctctattcagatgtttagaatcgttagagatttccaatatgccggaatggaaagattggtcatttaatagtgaagctatgcaacaaactcaaatattattccctcttctcaaaagcctttttttgtgtagatgtccaaagcttaaagttgggttaccaagttgtcaccttccatccttggaacaagttggtgtaatgagatgtgaacaaatggtgagtttggtcccgataacagaaactcaacaaaccgtcacacccacagcccttcccaaactaaagcggattatgttattcaactccaaaagggtctttgatctgcacacactctcatctttagaattcttaaatgtctattattgggaagatgattgttttcccgaagacgaagggctgcttccgaccactctgaagacacttcaaattcaattttctaataagcttgaaagcttaaatggcaaggcctttcaacaactcacatcccttcagagattgtatatttataattgtgaaaggctgcggtgcttgccagaagaagggctgcctacttccctatctcaattacatatagatcaatgtcctttgttaaagcaacagtgtgagaaagagaaaggagaagattggcctaagattcaacacatcacacatctgtcgttggatagggaacgtatcaattaaatggtctgtctgcattgatgtctcaagtttagcagcagttaaagcaagattagcagaagcagacagttgttgttctacttgttcttatccaagttcccaagtttcttgcaattgctcgacggaatgcaagaaaagatcctagaagaagaagggaaaccggaggggtaagttagttatcaaacatttttacttaattccctttttgcaacttcacaatgtgctttttttccttacttttgatatataggaggaggaggttaaacagaaatcaaagggcctttctccagatgtttgaagactttgttcaaccattccacaagtcactcaaatcaaactacaattttattccaacttcaacaatacgcaatttcagacacaagttgttgttcttgagagatgtagatattctcagattgtaaagtaaccattgtgccttctattttctcatgaattgagactcattgattcttcaagcatctaataagttctttctacaactactttagtagtttaaaagttgttgaatctattgctttagattttgcttatttctttagatacttaagtgcttaatggcacatagtaaatgtactgaaatctcaagtgattggagagtgaaagacatattttcattaaaatgttacctttgaatatccatatttcagccagacttataatcaataaaaataacaatcaattattaaagcattagcatttagcattgggcagaccagttggattcataatatgcatatgcatttgagcccacataccaaattatattccagccataatttataaacctattataccaatcaattagcacagggcactgttacgaaaattattaattactacgcaagtgtacgcaat

SEQ ID NO: 236075 - DNA, 1306 bp, Cannabis indica
gtcaaaacattgcccaaggtgttgaaaacaagtatgggcgagtagtgctataataccctatacacgttacattattttcttaattactgtactaactcttgctaatcaaaggattttaacataaaagtgtgtttaacaaaattttgtaacatataaaatttaataaactttaaaattttacaaaatatttataatctaggatacccaaaatctatttataaaacaaacataataaatacaataatcaaaagttgtagtctaacggcataaccaaaaatactaccaacggtgtcccaaagatcgcaatcctctaagactatatgtctggatatgtacaaactttaccaagctcaccactcattgctgtttagctttaactttcgctttgcctttgcctacacatggaaatatatatatgagtcgacagactcagtaaaaaaaacataacatacacaataatattaaatctgacttgtaaattgaccacctatacacccaattaccataatttcactacccgcatctaatgtgtatgtctaagtctcaaacgttcataattgtagtataattaaccataatactaaactgcactcattactctagtcgtactagtgttgttagcattaatttatactttccaatattatctaacatatatttgtcagtatttcggtgcaactctatgtacaccaataccgttatttcttatatgtcagctacatagctatacaatatacttttagttttatggtactaaattaggtacacaatagaagaattgtatatctgattatcatcgtaccatagttctaagaatctccagatgtatatttattaaatcaaaacataaattgcatgaaagaaataaatacctcttgaagcctatcagggtattcttgattcttttcgtaagttgtatcctttcaggttgattagaaactcagaccgtagtcttcaagattaatcaaccacacacaaatcaaccacacacaaggaatagtgtgggctattaggataaactatacattagaatcttgttgaattctcaacatatgagcaagaatagtttgatagagaaaaataatttttcttttctcccaattactttcgaattctataatctagaagcatcatatgatttctcaaatcgggcttatatttatagtagttaatttttaattaattaaatcatatttaattatttaaataaatatctataaccaaattcggttctaaaaaatcagatgagggaatctctcaaccacttgagagaatatctcactactttgagggaatatctcaacca

SEQ ID NO: 236076 - DNA, 813 bp, Cannabis indica
gtaagttatccacttctggaaaacatttaacagccgtgaatctgccggtttcacagtgtctacttcaacgggcccatgtcgttgtttcttcttcccctctgtgtagtccttcaagaaaaccgacttctattttctcctaacccttgagaagtccaccctagcaggtggcccgtccaattgttgcacatcttgagattctgtatcaccaagggttaccacaatggcgtttgtaggagtacaaggaaccacatctatgttaagttcccaatcttctggatacacatcatcctcatcaaaatcatctctcagcggtgatggatgtatcgtctgtaatggctctgtcaggtctgatggatgtgtcggcgatgactgctgtgccggccctattggttgtgtctgctccgaaggctgcttctgtaacaaacttatcacggtcgcaatttgatccatgataagattcttcatctctttctgacttctcttgaagtgagccttcatctcagtttttacagtcagaatcgcaagttgttgcgcttcgaccttctccaatctctttgccaacaagaggtagtcggagtcattagctgcagtagaggttgggggcatagtggcagtggctgggggcacagtggcagatgtggaggggtctactgtttctttgagtgaggatagtggaataatatttgcacttttaacataatctgtcaatcgttttgcttgggcctggcatgcggtccaatcttgcgccccaacttgtgtttcttcgacctcatccaagcccatttccaccgtggggacctcaccctcacaatt

SEQ ID NO: 236077 - DNA, 1375 bp, Cannabis indica
taagcggtctttacaataaatgagaagcaatttctgaccattgctgttggaaggaggggcgatgaagacaaatggttctttctcattaaaattgggatttgggttttttttttttgggatagggattgagagtgaaactctgcaattgaaaatatagaaaagaactgaaatttctgcgattgttatgcgattgggactgggattgagtgaagtaactggtgtaaaacgtagaaataaacggatagttaacgtttcatgttaatgatccgtctatttttcttctaaaaaaatataacgttaaaaaaaatcgttaaactaaaaaaatgtcgttagatagccacttttaatatataaagatttagttattatttttttaataaattgatttaaattaatttaaattaattgtatcaataatattattcttttcatttgctagcctttttttaattgtattaatatttttttatttaattgatgtgtctatttaataagattatgtggcatcattttaaatggtgtgtcatgccatctggtgtccagcatgttagaaaacgataaggtacttacggaatttccaaaagtgtaacggaaggtatttttaccgccaaaaatacggctaaggtatttatctgctactcggcataaaacttaggtatttatgccgcaaattactcaaaaaaatatactctaacttgttcccataaaatttagtttttacaaaaattaaatttttaatatactttttttaaatataaatggattttttaataaaaataattaatttttaaatccattaattagtttttacaaggaagcttgtgacatactcttgaaggggctccccgaggtaagattgaacatttttatgggtggtctccaactgtccttaaagttgatcgaaattgcctggttaaattttttgatagccaatataatttttacatttagaattgaattaatctcatcgcacataggtttgatagttggtatctcaattttcacgttcaagttacaagcagcaactcatattatggtattccagaccaatatagtagaaatgggtaatgggtcaaaacttaagaaatgcgagataaagtgctttagggagtatatagatacttgagttgatcccccttcctctaacttttcagataatagtttaggtgagatttatcttgtttgttcttgggtgtcttaccctttttttcttttctatctcgcttaagtctaactcatttgttctctttgtagaaatggtgaattttactgaattcctgggaagcccaactactatcctaatgaaaaaaggaaaaaatgtaacaaaaaagacaatcaagatactttggaatctcaagtggcccttatgaaacaa

SEQ ID NO: 236078 - DNA, 958 bp, Cannabis indica
tgccgccaaatcctcaaggcaaataccactgtggcaagttctaaatcatgagttgagtatcgctgttcatattcattcaactgacatgaggcataagcgatgacctaacagattcaatcttccccaaatctaccttgattccatctttactgagaacgtgtccaagaaaacacacctgagatagccaaaactcggacttcttgaatttggcatacaacttatgttctcaaagctattgtagaaccatccgaagatgttgctcatgctcgtcttctaactgagagtagacaaggatgtcatcgataaatacaataacaaaaatatcaaggaaatgcttgaatactctattcatcagatccataaaaactgcgggaccattaattagtccaaaagacattatcagaaattcataatgcccatacctagtgcagaaagccatctttggaatgtcctcctctcagattctcaactgatgatagctttatcggagatcaatctcggtaaagaccgttttcccctgaagttgatcgaaaagatcatcgatcctaggtaaatgatacttgttcttgactgtcagtttattcaattctcagtagttaatgcacatacacaaagatccatctttcttcttcacaaatgaccttggagctccccagggtgacacactaggccgcaaaaaccctaggtcaagtaacccctaaagctgagttttcaattgtttaagttctgttggagccattctgtaaggggccttataaatcggttctacagctgatgctagatcaattagaaaataaatttctctatgcgatggcaaacctagaagttcatcaagaaaaacatccaaaaattccagaaccaccttgatgtcttctggccaaactgttttaggcggtgtggtatccaataccacggccagaaaccctagatatctatctcgtaaaaattctatagctat

SEQ ID NO: 236079 - DNA, 1298 bp, Cannabis indica
tatagttacagtacatgattttgtttatttttttagaaattctgaatattttagtgtgccgaatataagtattcaaatagttagtttgcatgttctctttcaaaaaacaaaattattgcacacatataaaataggacgcatacaagtgactaatttgaattttatttttgatgtacacagtaaattattgaaaaaaattcaaaaatgaacggaatgcttactataatcatatagtatatcgtcatattaaaaagattagaatgcagaaaatgttgttacaacaagagcaaaagtgatgccccaaaattttgtgttatctacacttaataattataattttgatcttttatatggttgtatttttacattgtagttatagcttgcattttataaatttagaaaaatatataaataatttacaatactaataataaaatttatactttttttgttgcatccatatatatttgttttaacagttatatatatatgtgcgtgcaattataaatttgaactctaattttggtattataatttataactacaatacaataagttatagtcatggaaaaaaatgatattataatcattttacatgtggaaaacacagaaggtacacagtgattcttttctttttctggggaatcacttgactcgagaactaacagatatatatgtatatatatataaataatatttgatattgagtttcttgataataattatttgaatacgtgtacaggaaacggataagattcaattggctgaattgacggggttggatcagaagcaaataaacaactggttcatcaatcagaggaagcgccattggaagcctccggagaatatgcaagtagctatgatggaggcacattctatttatgcctcatccatatgccataatcaataattaattgtttcattttttttatttgatgtatatcctcaaacactaaaccttcaattttatttttactagttattatgtccaaactcttatctattaattcatatagatgtgtaaatttatcttgcgtctgttgatgatattttgtatcagttaattgtatatttgttgttctatcgactgtttgtactgtagaatagaacttcaaatttacagtaacatggttgcagaaaacttcaattcagggttgttttgtttgtggtgcggattaggctgcattgttccgtctttattttttttttggcaagcaaagaatattattgcaccaacaaaactgttacaaatatcacagatatcatgtttatttcttcccactatacaatctactcta

SEQ ID NO: 236080 - DNA, 1126 bp, Cannabis indica
gattgttctattctaataattgtgggtcacaacttattggctatgcagatgcaggatatttatctgaaccacataaagccagtttgagatctggctattggttcacttgtggtgacactgctatatcttggcggtcaacaaagtaaattttggtggctacttcctgaaatcatgctgagatacttgcaattcacgaagaaagtcgagaatgtgtttggttaagatcaatgacacaagatattcgagaaatatgtggatgaacatctaataaggaagtaccaacaattctctatgaagataatattgcttgcattgctcaacttaaagaagggtacattaaaggagattgaactaaaaacatttcactaaaattcttctttacacacaatcttcaagagaatggtaacattgatgttcaacaaattcggtcaggtgataatcttccagacttattcacaaagtcattgccaacatcaacttttaagaagatggtttacaagattggaatatgtcgattaaaggatctccatgaatgccaaaataaaggggagtaatttcatactacactctttttttgttgatcaagttttgtcccactgggttttctcggcgagatttttaatgaggcaatattatggacatccaaggggagtgttattgttatacccgaaattcggctaccatctcagtaggggacacgtgttaagataaaaggaatttgaatcgatgcaattgcttttttatggaataactcattaatttcgtaagtatcagagtatatttgcaacctgctaactgtaaggtcttacgcgaggagtcaatattcaaactgttgcttagtatattaacaagaaaccatatgtcgctgaatgcaaatagcaagggatcaagtacgttaaatttaggaagacaaaagcgacacatatcgactgcggaaacaattagtgtataatatacaaactaagtttaacagtcgggttggctcgagaccttataagcgaggtgcctatctcgctatgggaaggcttcctgtaacttcacccagttaacctcagacatcttctcagtgaggctcataatcctgacgagtcagaagttaacaatctaacgagcctcgaagaactct

SEQ ID NO: 236081 - DNA, 1063 bp, Cannabis indica
cttacataaattaaatctacaagcctatattgcacaaatttagcttctagatgtcaagtggctacccctgctcgcctattaaagtagaggccactattcaagaacaatgggagaccacacccaaaaaagggctgtgggtgctagcactttttggactctaacgttgaatggatagaactgctactttagagtagggttctataagctgatttactagtagtatttgtgaaaaaggctctccatttgagtatctttggagcagaaaaagctccatgttctcgttgtaccttcccaccttgtaggctctcttactagttatatttgtaacttgataagggccttcctagttaggtccaaacactcctattggtgagtctttagtgttcaagaacactctttggagcaccatgtctcctatgaagaatcttttcccttgacgtgtttgttgaagtccttgatactttttgctgggaggcctatatctttaggatggcttgttatcttctttcttcttattcatcaagggactctgccagtagggtgttgtttgtttgttcatcataggttattcttctatgagatagtggcagtagctctacatgcaacatcccttgtagcggtaagctagagcaaatggagcttgcccagtggccgtcttcttggtagtcctttgcgactataagacctctaggaacaattcaggcaagttgccttttgcttcctcaaggcccttctttaaggtgtccttgagggtttagttgacagcttctaccagctcattttcttgaggatgggccacggcagaaaagctcttgatgatgccatgtctgttacaaaaatagtgaacatatcactctcaaattgcttgttgttgtctgacacaatcttttggtgaaggccaaacttgcatatgatgttcttcactacaaagtcaaggaccttcttggaggtgattgttgccaggagtttagcttctgtccatttggtgaagtagtctactacgaagaaagcaaactgtacccctcctttttcctttgagagttgaccaattaggtctatcccc

SEQ ID NO: 236082 - DNA, 970 bp, Cannabis indica
cacctctcagtttctgttgaagagtatatgcactcttgactgagtacatcccattagcttcctctgtccaaaacagcctatccgaatcctgatggatgcctaaaggaatttgcaagatcaaatcatggtctctctcctcaaataaatccttcagtaactcaatgtcccatgaactcatgtccatggtcaataaattattcacttttgcttgttggagagctggatgagaggaacttacaaaaggattttgttgatcaggcagccatggttcgtttagtacatcaatagaagctccatttcccacactccaacgaattcccgcacgaactagagcttgagcttcccaaacacttcgccacacaaagcttggattgttccctaaagaggccgagagaaatgttccattggagaagtatcttgccttaaagattcgcgacactaaggactcgggtcttgttaagaagcgccaaccttgtttgcccaacaaagccagattaaaatcatgaagattccgaaacccaagacctccattattcttactcttacacatccgatcccaagacatccaaggaatgcctttgttttccttcgaagaactcttccaccaaaatctcgccatggaactttctatatctctgctaatctccaacggaagtaagaacacattcatagcatagctaggaagagcttgcgctaccgacttgattaacacttctttgccggcacgtgagagaaccttcgcatcccaaccttgaagctttttcctaactctgtctttcagaaatcccaacacagcggacttgtttcttcccattgtactggggaggcccagatacatactcctttcgtctgcttgtggcatttgtaacagagtattgatatcctcccgaacatgacttgctgtattagtgctatagaagattgaagacttccccaagttaactttctgacctgaagcacattcaaattg

SEQ ID NO: 236083 - DNA, 594 bp, Cannabis indica
aattgttaatataaaatacctgttaataagattaaaactattgatttgtaattattgatacgtctattattaaagtaatccttaaactgaccaccaactataatacaactatatatatataaaaaaaaataataatatttttagatctgtggtgcaaaatgaatgataaaggtgatcggaataaatctagtgctaaaattttagaaaaaaatgttaatgaaacaatcatagtattaactattatagtgatatatattttgtcattatacttatttttggattgatttggaacttgagatttatttcttacagatgtacattttatgaatttgtaaaatttttttaggagtattagttttacggaatttgaattataaatcagggttgaattgatgtttcataccagtttttctgtagattttttctctgtcacttatggttgcttttcgatttgagtttgttcttcttctcaagtgacatcgctggaattaatggtgcttcctcgtctgtcgaagtttttttatcgttgtcgatctcattgcatcgcatgaaggtttcgatctcaggaagtgtggatcgtgtgggttgaaggtg

SEQ ID NO: 236084 - DNA, 1639 bp, Cannabis indica
agtggtaaattaatttaaatactgaaaagttggataatattagaataatttttatattatttgatttaatttataaaatataataaattatttactaattaattaaaatattctaattatggttggatttaattataccaaatatttcagttatctaatttaatttttagaattaattgttaaaatattttgacagttaattgtggtagagaccttgattgaaggtttcacttaaataaatatagggtttcggtccccgaactcactactcattctgtgaaaatagtaaatctatctaaagagaatagagagggcttgaaagtccgattagccacactaattagtttttttttcttttgcaaatctaaagttcatgcgaaattgaaacttaaatatatagtatatatgttcgtttaattacgcatttcatatataccttcatatgttttatatatctattcatataaaatgtctaactttaaaacaactgtccaaacacaaattaagagaagctttccagtcaattggaaattgtatggatgagatttatatatatatatatatatatatgtatatatatatatacttaaataaactatttctctttttgaaatgaagttataatttacctaattcatcatataaagaaggaaataataatgttacacaaaatggatatgttgaaatcaaatacagtgccctgtgagtagtggtgaaattatattacctattgttttccttttttttttttttttggaaaaaaaatataatagttactaattaaatagttaatttgtctcttcattttatggtagagagttgttatcaaatgaatggacttcacgtgtgtatgtctggcctgcattccaatcaaaactagtgtttgtttgattctaccaccaaacctacacttgtctatactctaaacctttctcttttctcactttgcgccactcacaaaacttattttcatctttgtaataaatttagtgagatatatttaccactaaatttttacctttactatttttttttccatttaaatgtaactcaatgaataattgtgagttaaatatattttaataagaaaatttataaaaaattataaaataaagaaaagtttataaaaaatacttgaattacagaggtttttatatttttattatatcaagttttacaaaaatattatgttaaagtttcaaaattacaaaaatattgtattttaatcaaatgaaataaaaattagcatttttgccacctaaactttcagtactacctaattttacctcctaaaatatatgacttgttaaaaatttctcttaaactataacagtaaaataattataccccatctgttagattctgttttttttaccattaaaatttaatatttttatcccctgaactttgaccaatataaaattttactcccttctattgaaaaaaaaaattaaaaaattataatattctattaattctaaaaaattaataaaaattattaaaaaaacttgataaaaatttttaattaattaaaaaaatattaattttacttagaaaaaataaattattattaaaaaatatatttaaactttgttttatttataaacacatatattaaaaaaattattgaaaatccaat

SEQ ID NO: 236085 - DNA, 2119 bp, Cannabis indica
atctaatcgggacatctccttgttggagacacgaccatgattagaattaaaaaaaaaacaagctagataattagcctcctaatttccagatcatttgacaaaaaaactaaaactaataaaaatacacgtaatgagatttgaacccttgacctctattctatatgcaatgtaactttaccattacaccaaagttaatattaaatttataaacatcatcttttatgaaaaatataagtcataactaataaaatgtatatatattttttttctcgatattttaagggacaacttgccccgcctcacttttatgtgggtctacgctttcataaataaaacttattttattgataattacaatttattttcttgggacaaatgtaataaaatggccatggtttgaattttataatttatgttaagtgaaattgatgttagtatattgtttaaatattcttgatggaataatcttcagtacggtgataagtaacataaacacggagataactattctacttaactttcaattcttgatatagtgttaactttaaattcttgatatagtgttaatgaattttgtacttgtggatgtacttatagagtatgtagaggattcaagaatactgtattcgagatcggattcttcgatttctttcttgtccaatgttttttctaaggtggttcatcaagaacgacatcaatctcttggtcaacaaatataaaatactccctaaaccaattccaacatccacctttctaccttaagaatttttttatttatacaactaatatgcccatatatatgcaattatataccttttaagacactacagattaacatttaaagttcattttttataacatttataattgcaaacttatggagtatatccttacttgtagatgtgggatgaaaagctagtaccaaataagctctttttttttgtttttttatttttgttttttttttttattaattgaaatgaaagaacatctttttattattaactaagaataaaaatcatattttataattttatataagatttacaactacaaagacaaaaacataatgtaatatatataacatggtcatggattggatcatacaatcaatgtcaaaagaaatggattttccatttagttctttctcctaatatttcaagaggctcttccattgtttcatcaagccctttaattgtttttgtttggcagtctacttccctaactggttttttgagatgaacttgcttaaaaagacaataatccttattcttatcatcatgacattattcaaaatttaaaatggaaattttattttatatacttaaaaaaatacttcatacatattaaaacttagagttttagacccccaattaatttatacaaaataattattttgtttacatatttttttcattttacccttggctaattaaaaaaaaattgaattaatcacacattgagttttataatttgttaacatatttctctaaattacccaacacattctatacgtgacactccacaattagttagcaatttgaaatctgatacgcaattatactaataacggtataacaatgaggaatgtgttagacactagtggtacattttagcaattctgattaattaaatatctcttcaaatatgttatgatgtattttgattgaacattattattactcatcactttctataagtatcactttataattagttagcgatatttactaaaagttattttattaaaaaggaaattacatttactatggaattttaaaagctgtttacttaaatatgacacttttaagtttgacaaatttatatgatatttttttttgtttttaagtatttttatggtatttgatatgtcatatatatatatatgtaaattaaatttttaaatcccatatttaatgtttttatttgtttaggcagttttatgtgtcactaatgccggaaaagtcatcggactttgctgtcgatatcggaaaaatcacaggagtagttgccgatggcgaaaattcgtcggagttgctgccaacgctagaaaattcgtcggaatcgacatcgtcactggaaaaatcatcgaaaagatcacaaagaaattggtttcttg

SEQ ID NO: 236086 - DNA, 750 bp, Cannabis indica
tttttaggaggtttcttagaattttttaaaaaaatttttagctagagatggggacttcgaaccacttctagtggtggctatttatagaaaaagagaacacaatgggggaggaagaacttacagatattatcgagaaaaatgaggatagtggcatagaagggaggttgagaaaaacgtgggttagggcttcgactggatcgtgggttatggaggttgaagaacaaaggaaaaagaaatagagaataaatttaaaatttaaaaaaaagaagaatagggcagctttggaggaggtggggtgctagaatgcataaaacatgacatatgcatggtaaatgtatatttgtaattattgaacttttgaaaaagtaaaattgaaaaatgaaaaatgtataaaagtttaaataaccaaaaatagataaaaatgtaacaaaatggtggaaaagggcatcaggtgtaaaaatcccaaaatttaaaagaaaaaaacttatctgctacaaataattcaagatgtggtataaagattctccatctatacattgtcaccaaacaaaacttatgccgcaacatcacataatgtaacaaaataaatataataacataccatcaccatattcataaatagaaatattcttcttaaaaaaatagaggtaaaagtatttaaaacacaattaaactctttaatagaataaaaactattaactaaaattagacacactattgaaataaaaataaaattaatatctcaaatat

SEQ ID NO: 236087 - DNA, 756 bp, Cannabis indica
tataatgtgacaaactaaggaattataataagtatctagcgaccagttaaggaaatattaactatcaaacgtttggtaatacttttattttttaattttttaattacaaaaataaaaataaaaattataaataattacttttgtttttaatttttaaaaacaaaaaataaaaatactctataattttcaatttaaatttttgattttattttgtgttatatactgcacaaaaattatattctgaaaattataagacaaataaaataacattagcatttttttttttaaattataagcttattacctttctcaatataattattacttattgaaacttgaaagtacgaaaataatgttttggttgatattttgttttggtttcattatataaatttaatgttaatttgtagttttttttataagatgacgagttcgatatggatgtgtggtatattatatacataattaattaacaataatcggcctatacttatatacattatgtataaacctttttaaagagagtaaagtttgaactaccaaatatacgcgccattttttttattaactaataaactagcgcacccaatcttatttcggaatcttttaaatgtcgtgacatatatgattgtatcaaattttaatattatttttttgaaaaattaactatgtttttcttggaatttaataccaatgtcctttttttaaaaaaaataataaatgacattatttgggctttttctttttctttttttt

SEQ ID NO: 236088 - DNA, 1088 bp, Cannabis indica
cattctaggtcgaatactcgcacttgtcacttctctgaaatttctctttttatattaattaaataatatattttggtgttgcgaaattcactcgacaacaattattattgtgtcctacattgtatacaattttgtatcttgacattattaatttttctaacattttattcattttaaatatgtaatatacatacataaaaaataattaaaactaaaaaaaaacaagtttagagcaatgaatagtgatgctccacactcttcattactctaaaaatttatgtaaaatagagtatatgttgtatgccttttgataaatttatcttctcttctctattgtaaagaaatactaaatttagaacatctattgggagtgctctgagtgttgagcactgacatcagcttctctactttattttttaaaatacactaccaaaatatcactttttctattttttttttctccacattattaaaatattacattttataaggaaatgtagtttagcatgcttaaatgtaaagcatggtcttttaatatatcactcaactagaaataggatacttatacttttaataacttttcctccaaaaaatacccttacatttcaaaactctctctctaactaagtcttattgtctccaccccgaaaccccaaaatccatgagctcaaccaccctgaaactcccgaaatccctacccatcgctggagttctcaactcgctcgttttctatgttttttttttcttctgatttttaatgatatcgcgaaatatcgctaaatatcggtatatcgcaaaatatcactaaatgctctaattcacatcatcactaaatatatcgtcaaatgtcgcgaaaacacactctagtgttcacgatgattagcaatgtttagctatgtgctctacattttttagtctcatatcacaaatacattattaatatcatcgctaaatacacaaaataacgccaaatatcgctaatgatcgccaaacatcatctctaactttaagtttggtctatcattgtaaatacattgctaaatatcgcaaaaaactagaaaactagaagaaaaaaatgcaaaaaacga

SEQ ID NO: 236089 - DNA, 1650 bp, Cannabis indica
gatatagtaagctaaaaaaaaaatacaaaaaatggtctattgagatttgtacttgtgaccaaaaggataaattgataagtctttaccaatataccaaaacacaatctttatataaattaactactatgattttatttaaatattagaagagatataaaagaaaattagtattgcacatttcattgtagtagaattaacaaatacatcacaaacattgattctaatacttaacattagaattttattagtttattttaagtaaaatagcaaaataaaacacaaaaaattaggtgaaaggggtgcataacatgattttagtatgcaaagtttagccctttctctaatttttttccatttattttggtccttaaattattgttttattttattggtcttgaaaaatttaaatatataaaaatatgaaattacattaaaaattaaaaaatattacacattatttattatttaatatactaattattatacaaaacataacttaaaaaaattataaaaaatatattaatatactacaaaaatacaaacacataatgtgaatataaaatattaatgaaaagatagttaatatataaacacttagaattaaaaaaaagtgatattattaaaaacttgactaatataaatcactaaaaacagacatcataacggtaatagaaacgtgtttccgggatccctgttataaaagatttactcaaaagactatatacaataacaattcaaaatacaatagatacaaccagtccaaaataactcctggcaactcggcacacaggaagactgtcatctcatggttgttcttacttttccttgcccttacatgtactatagagcacccgtgaatcacatagactcagcaagaaaaataataaagaaagatacattaaatagttaattatacatttcattatcaaaaaatgattataccataacattcatgaacaataggtaatataactggccatatgcataaaaatagatagactcatatatttgcattgcctaatcaggcaagcccgtgtcataatgcaatatcatatataataccattgcaccacctaatcaggtgagctcgtgccacgacttggtaccaatataacgcatcgcctaatcagacgagcctgtacctatgcccggttctcatatgtcattaacgcccatacctacacccaacacatcgccaggaggaaatcctacaacagtttcattctgtgccataacctgataattttcatactactatcgcccgtatctaataaggtacgtcgctagttggaaatctaacagcgatttcgatctatcccataaccaagcaattttatattattgtcactaaggtatgccacttgttggaaacctaagtgcatctatgccataactaggcattttcacctaattaaacagacagaaacttgatccattcattcgattcaaagattcgtaatcatgattcacggtcaaaaagcaggaaatatgtatttgagaaagttattaaacagtttattgagtatgaaaggttgaatataggttactataatatatatatacatataacgagaacaaagagaataaactatagtaagtcaataatggcaagtgtttcatcgttaagctccattttccttcttcagtgtt

SEQ ID NO: 236090 - DNA, 2083 bp, Cannabis indica
tttcttaaaaaaaaaaaaattataccatttcactccttcttcttctcttcttacacaaaccagtatcatcactgatgatgcgtgtcatttgtcacaataaattaactatttcttttttaatactacaagttactttagtataacggtaaatacaagtcgacccacgaagaatattatcaatttattattcaaaaattagaattaagaattaaaaatgggggttttaaatataaacattacataacataaactagaaagcaaataaaaatagtaatatactattaaaaaataattaacagtcaatctacaccctcaatgatcattcaatatcaataataataagaattattttaatttctcaatcaatgtattgactccgcagaaaacgcgtctattgttattgacacgatctggcgggttcagaatgataaggtacataataacaggatggataatgtgaatcattgtattgactctattcttcacttttatgaagattacagagattcccttactccctccccatctccgatcccttctgctgtttggagccctcctcctctggactgcctcaagttaaattgtgatgtaaacgtaggaggggagcacatgtgcattgcagttcttgctagagattacctgagtgaggtggtttgggtcaatataaaaaaattggacttttcaaatgctctttgtggtgagattgccgttgtttgtttagctcttgaaatggctaaggaaaagggccactagtttatcttggtgaaaagtgattctaaagcagtgatcaattctttcaaaggcatagatcctagatgagaaattgaaaattatttcttattttgtgaaataactatttcttcctttgttggctatttattctgtattactacaagaacatgtaattttatggcccataatgtggctaactgggctttcgtccataagcaatttgggggactagctatttcgtctattcttatgaacctcttttgtagcgaccatgaggtctaattttcttatcgaatgaatgatttttctaaaaaaaaaaaaaaaacccccgtaaaaaatatggaagtagtcaattttctcaatctccctattacaattaattaaggtgaaaggctcataaattaaatttttttactaagaaatagatccacgaatcatgcaatctatttaacctaggaatatcattaatttctattgagatttattaatctaggttacaaatcaatgaagcatatatttcatttaacctatgttctatgtacaataaataatacatttgacactactattaattgcaaattatcactctacttagaatcctaaactattaggtgaaaagtaattctaagttgataatagaacaatgctaaacattaattagctgtacacataagaagaattcacaatattcatagcattgaaataaaagatataaacaatttaataatatgagagaaatcaaataacattaattatcacttatcaagaaattatgttttaaggttttaaaataacccttcactaaaaaaaaaactactccataatccgaactataatcatatgcataatcataattaaaaattaaagagattagagagaagaaaataactagaatgataaataattgatgatgtaatctcgctcttctccactttctatgagtttctctctgaaaaacgcagtctaaaagtgctacaagcgaaccctaaaagtcatatttatataaccctaaaagttcatttcagtatagcttaaaaattaatttttttgcaaactatacgaatgtatttacgcctctggctgctccagtggcaattcaagatgttcctaaaagctgagaatgagatctaaacctttcatgttgagctccaagtctattttagcttttaaagtcgtcaacattcacaattacgtttagattattagtcaaactgagcttcccaacttccactgctattttccaccgaaatgtgctaaaatcccatcaaattactcaaaatgcatgactagtctacaaaatagcctaacaaattgaaatcacactaattaataatttgaagaatcaatttaa

SEQ ID NO: 236091 - DNA, 5344 bp, Cannabis indica
gagtaataatatgtgcacacataatacgcaacaaaaaattacagaggaacgtaacatgtatttttgagaaagtgggtcccatcttaaatcaacgtgtttggttaaaaaaaaaaactgccatatcgacgtatgtaatttttggtgcatgttttgtgtgcatgtactcttaatttaaggggttctttgttggtattaaaatatataaactggtattcaaatattttagattatttttaatataactaaacttatttatgtttcttatactcttgactctcctttttcaaacatagacttttaactctgaaaaaaagaatttaaaaagcagagttttgaagaaaataatgaagaaaaactatcttttttcctagatttagactaggctattgtacataatttagaggagaagtttgacagaaaatctgccactaattctcctttattacttgataaaataatcccttaaatcagttattgaaattaaaatctgatcacatcaaatcagcaaggagatttaagatcttagagatcattttctctttattgtaaaagtaaacctaaaactacaaagaataaatttgacatttcaacacttgcccctcaagctgggagatagatgtcacttgtcaatctttccaagcttggatatcatactgtccaatttgactcttagaagagcttttgtaacaacatcagctatgcactcgactgagcactccttgttcaatcttctctgttataaaacgaggatccaactccacatggattttttgctatactgattgtagccaaatttccgcagaacactctcattgttgagtttgagattcttaattcttctcgagcactcttttgagccacattccttcacaaatccttgagctaaagcacaaaattcagcctcaacactactccttgcaaccacagtttgtttttacttctccaagttactaaattagcccatacataagtacagcaccctgtagtagatattctgttagtaatagaacctgcccaatctccatctgaaaaaatctcaatgttcttgttagttcccttcttgaagtacgaccctttaccaggtgtcatcttcagataccttgtaaatctgtaaacaacttgttggtgaacttctttaggatcattcataaattgaccaacaacacttgactgcaaatctaatgttaggcgtgtgagaaaggtaagtcagcttacctactaggcgttgatattccccccttatcaacatgtgtgatttcatttgagacgtaagtatttgactgacaggagaatgacaattataaccttttgtgtagaagagtatcctaagaagagacgtttgatagctttgggatctaatttgctcaaatttggttggtgattatggacaaaggttgtacatccaaaaaatttgattggcagagacaagataataggaacctgttgatagataaaagaagctttcgataaagggttcgaaaatttattactctcgaaggctgttgatgaggtaagtggcagttagaactgcttctccccaaaaatgtttaagaacattaatagttaacgtgatatatcgagcaatctctacaaggtgttgattttcctttagcaaccccattttgttgtagtgtattgacacaaaatcttcggtggattaagccattctgttgaaaaaaaccacctacaatcaatcaaattgtactaatctttggcattgtcaatcctaagaactttttttttctttcttgaaactgagtttgtaatttggatcatgctgcaacttgtttttaaaaatatggcaagcatctgacttttgcttcattagatacacccaagttaccctagtatgatcatcaataaaggaaataccatcgataaccagaaatattagagactctagactgtccccaaatatcactatgaatcatagaaaagggatgagaaattctatagccttcaataggacatgtgtttctcacatgttttgaaagctgacaaaactcacattgaaaatgttttgcatatactgaacaagtcaggaaacaagtttcttaagtagaaattttttgggtgtcctaacttatagtgccacaacataatagcattctcgttattggaaatagatgaagacaataatagctgttggagtttgtttttctggattctagatgtcttgagaagatagagcccctcacattccttatcgtcctccctgattccaaatcctgaaattcacaatatatatggtaatttttagcaatacaactcacagcccttgtaaacttgctgatagataacagattgcacttagttccatctcccatagtaagtgtttattcctttgttgcattaagatttaaagactcactcatattgatcatgcagtgttatccaggagaagatgatttggctatttctcgggcaattctaatgtaaggttacttctcccattatttaaaggctaacaacatctccaatttcaaactccctaatcagcattccatctatttttctctctctcctttcttcttctgatagattgccctgactcttgcctgttacaataattatgttactgtaggtatttgtcttcaggtaatctcagagatgctaatcaactcatcgatgaaataaagagtcaagttgaagataggcagcttgaccttcctcattcagatttgatccaattcattacttttctgctacaaacgtgagctatttaatctggtgcccttagttcttttttccccttttaatttcagtgtagatagaagagatttgtagctaatatataaccattgtgcttgaaatgtagctttgtttctaatttcctatatcattacaggttgcagagagatgctttacctctttttaatatgctaaaagtgaaatacaaatcatgtatagacagagatccttcttttaaggaggtatgcattttcagtaacgtgatgagcaccctcttgtaatgtatatttttttgattcgttcttggccctgagcaagttcgattctaatatgttgattatgtttcagttgctggatgatattgctgaaaagttctatggagtacgacgtagaaatcccctgcaaggaatgttcggtgatatctttaaggtgagtatgtgatgtgtggtacattgccacctattctatgcttccttgaatgttaccacccaagtgcatactagtggctttgaaaaatattgacaatgcgatctgagtactaaacttatgacagaactcaggggctgtcccaccattatcactatggtttaatttctcagggccaccaagtgggttaatagccacaacttttatgtttactgaagattagttaatttagtttagtggcatgttgagttctaaaactcagcaaaaagaataaaaacaaatgaaagtctaaagaaattgaaaggtgaaaatagatgaagctgcatccaatcaaattgtatgtttgtgtttcccttgttcattctagttgtttgtgaatatgggatctatgtattatccaagcaaaattatgcaccattgggtccaattgtcggattcttatagtgattaagcataggagaacctaagagttcaaatggtcacgtgtatggtttgcttccacaaggtttgaagttcgagtctctcatgcgtacctacataacaattgttatagtcccagtcccaggggaagcattatttatttataatttttttttgtagttgatttgtaaaacatccgaggttgttttggtagtagttaagaaaatcacaggggagtaaactgttatattctttcatatgattgaaaaatgctgctaatatgatattgaagtgatgaaatagtcatttcgtttctaaatttgttttagagttacaagacaaatgcattgttgttatgcagatgatgggggcagagtagcaattcaatggcaattttgatatcaactcctatcccaagtgatctggctaattaacttataatctgccttatgtgtttgatacgtttcggcagttacaattttcttttcttgagcagatgtagaaatggatcataagtgatcgtttcacattttaatttttggaagtatataagtgaggaactgtatttaataggttgtttaacttcataatgtgtaaacatgttatttattgaattggctcaattttctttgtccataacatttgacagtctttagcaatgtaataagagagtgttgtatacaataactagggacacgatgaaagaaaaaacatcttagtttaggccccttcctaatctattgccatccccaacaaatgctaaatccaagtactggttcatgcttgaatgccagagctagttcttcccacttactgctactaataagataagacaaaccagtaatccttcctactataaggtagcaggaatagatccattagaccttgattctcgtctcgtcgtcctttcttttaaaaattcctcccctaccgctgtggatgagcagaattctcatccaaggtgaaaggaaaacgagcataacttcttgtaagtctaattcacaatggagcttccagaccttctaagtgcaggcaatttgcgtcatcaccgagccaaaaagaggttgtctcgtccgctgggcttgaactcctctcccctcactactccctttggttctaccttgttaatgtctgtagagggttttctcacaagtttaactttataatgtgtaaatatgttatttcttgaattggctcaattttcttcgtccatcacatttgacagtccttggcttggccttggacactcaatggaagatgatgactagacttattgcacttgaaacatttgcaagatcacttgatttgttggtccacccagcgcccttgctcagctggttttgtagtgtagaaagtgttgtaaaatgttgtccttccaatctaaagagatcttcaatgttctttaaagttaaagaactaggctataatagagcttcgacaacataaaaggactcgttgcacgataatattccattctcataatttgtcaatgtattgttaatggatttaccttatgaaataacttatatttctccgttccccatatttcttagtgttagatattagatgtatattagctgtaaaataattagatatttagtagatatttagtagatatttagtctcctagctttgtatataaatatgtattattctatgaaatcaacacacaattcgaatcactatttgctacatggtatcggagcattgtgatccgaaattcgaaattaggtttcaattaaaaaaaaaaagaaaaaaaagaaagagagtttagggttttttcaaaaatcttttctggagtgcgaat

SEQ ID NO: 236092 - DNA, 1652 bp, Cannabis indica
aagattagaattagagattgataaatattctagagctacaaagatagttattaaatcgttagcatcgcataaaaatattcctagtctattgattccaacgggtggattacatgtggccttagtttcttggtctgtgaacttcatgcgtgtgatgcctagatcagcacgatgacgactgaatcatgtcaacgtgtaccaaggtgaatatttttcattgaaagcacctcgatccaatgcttgacatttaatgctaacttttttattctcagaccgttatattcttgtattttcttggatgtaatctgaaccattgattaaggggcatgcaaatcaccatttttccttataaatagagtgaaaaaccttcattcaccacttttgcccatttaatattttgaatttaaattttctgagagagaaaagacgaaaagtgtttttgctaatgtccaaccattttaacgtgtgcctccatcttcttcttcacacttgtgctcgattaaatccaggagcaccactcccagacctgacgtttcctccttcagacccatcaaaactattggatttccaagcagaaatagatagacttatagctcgtgcttgcaagattcagaccaatcaattgtatagacaatatttttgttgttgtgttgttgttgcatccaccacacgacgtccaaattccttcgttgagtccttcatcttctccaaattcttcgctttcatcatgcaagtatcttttacacttctggaattttaaaatacgtttgagatttaggttagaacgaacaatttttttgagaatgtatttgaccaaattttattgcttgcatgtctactgtatgagatagtgaatagggtttaggctttcggggttgtcttgaacgtccttgaaattaaaattttgattttcccgagtcctgtttgtagacaatattaggttctataaaattttatctttttggtgattttttgcttaaacactgaactaagaaaaatggtgtcgagtatggtagaattttaatcttctattagttccagatgaaatatttcaagagttttcaatcaaattcttgtgttctcgatctgatcattctgtcggggacctctctaattgtacatcaatgatgcttgaatctgcaaatgagggatcctctaccattttggacaaagataagaataatacttagagcaaaatttttgtatgggtatcagaaccttgcgcaccaggttgaatgtcaacctaggtgctgagaccaaccttggaaatggcccatgttgacaaagtgtcaacctgtgcgttgaagcctagccctaggtcaattgggagctaagtcagcttcttggccgccaaacggttttgtttgtttctcgaaagcacccatgtcttaattgttaatgaaaacagagaatatgactggaagacttcgttagtatttctgttggaagtggtccaggttaatgaagtatttgttgactcagaaatatggatagagattcctaagtcacatctactcgctagattggcaaaaatgagatataagttacgtataaatagagagacacaaaaatagctacttctacttcgaatttttattctcacgagatggaattacaaaaaatagataagtgtttaagctttaatttctagagag

SEQ ID NO: 236093 - DNA, 1462 bp, Cannabis indica
cttgggtctagctagttattatcgtcagttttgtggaagggttctcaaaattttcaacacccttaactgagcttactaaaaataatcagcattttgtatggacagacatgtgtgaggctagtttttcaggagctgaagcagagattaattacagctccattgttagctttaccatctgacaaaggaaagctcgtggtttactgtgatgcatccagacagggtctggggtgtgtactgatgaaagccgatcgggttatcacctatgcttctcgtcagttgaaagattatgagcagcgatatcagactcatgacctagaattggccgcggtagtgtttgctttaaaaattttgcgacattatctctatggagagatatgggaaatttatactgaccataaatgtctcaaatatttttttacccagaaagatttgaatatgagacaaaggcgttggtttgagttagttaaggattacgattgtgagattctttaccacccttgaatggccaatgtagtggtcggtgccctgaggaggaggggtcccgggcaagtagctagtatgattcggatttcacctcagttagtagaggacatggtcagatctagcatttagtttgttgtaggcaagcttcattacttgacgctgcaatctgatctgttagaacgaattaaattcgctcagatgactgatccagagctagtaaagatcagagaagagatatcagctggtcaagccagagactttacattgtcagacagtgggatgttattgtttaaaaccagggtttgtgttcctaataatatggaacttagaaatgaaatttttgaagaggctcataccactcaatattccctacaccccgacaccaccaagatgtatcgggatcttaaaccttatttctggtggagcggaatgaagaagaatgttgtagaattcgaatcgagatgccaaacctgtcagcaaatcaaggctgatcattcgagaacggcagggttgttacagcctttaactctacctgagtggaaatgggaggataccacaatggacattgtggttgcgttacctagaccacgggtttgtttgattctatttgggttgtgatagatcgattcacgaagtctgcacatttctaccagttaaacaacctttagtggatcagtacgcagatttatacgtcaaagaaatagtaagactggatggtgtaccaaaatccatagttttggatagcttacctctctgagtaggcaaaagagttatgcagatccaaaacgcagagatgttcagttccaagtaggggatcacgtgtttttacaagtatctccaatgaaggggatcaagtgtttttggaaaagaggcaagttatgccttagatttacaggacctttcgacattctcgagaaggttggacaagtggcatattgattagccgtgcctccaactctgtcagcagttcacaacgtat

SEQ ID NO: 236094 - DNA, 938 bp, Cannabis indica
aatcatgggatcgtatcaaagggatatgggaagttttccgaatctctcattttatgtattctaaataagtaatgtatgttcttaccaattatagatattgtaagcaaaagggaaaccttccctcatgcatttagccctataaatagtgatccatcctcactgtaaaaagggtcgaaagaattgcttcagaggatctaagagaaaatactcagagattttattgtgagagctttgagagaagaaacactatattcattgtttcgagttaatacaatctaacgggagtaagctattaccaaactataggggtcgaacccctttaaaatcttgtgttctttattgcttactgattttttctctatcttaattatattctttatcgcttattaattgactcactgtcgttggctaaaagcgaggtcaacattttggtagtttcattgagagcaaaaatttaagtttgctctttgctttaagttttagcagacacacagaatggtggtacaaactcgcaaaggtgtggttgaccagggtgactcactacagacagatcctaccttgtaaactcctgaaaatacaaggtcccaccaggaaccaatcctgaacaaccaaacacgcagccacctactgtgggccaaggtgtgacgtctcctctggctgggatcacactggtgtgcaagagactgggaacactagttcggcagccgatctgagcattcccagcactagaatcccgtccacaaccaatgctcagacgacaataagagatgctactgagattcaaaacctccacaatgctcttgggctcatgcatggtcacactaatactttgcatcatgacaggaagagctttgtgctgtaatgaaccttgcgttcgaagagcataggtgtcagttcattgaatggggggatagggagatggaaacattaaaggctca

SEQ ID NO: 236095 - DNA, 1203 bp, Cannabis indica
cgagagaaataggtaaaagaaataagtaatctgagccagaatctaaggcaagtaactcatcaccattttataaaggaccaagcttgtgtaacccatatatctaaatacatgaaatgtattaatatgagaagaatatatattgttgaattaaaactttaaaatattatcatcataccttcttatgaaaccacggacgaaaagtttgtctatgcaaaacatcgtggttaccattaggatattcttgcttgatcttctccaagtgttcactatgaaatgcgatattatcaaggtacaatagagaaaaagagagaagaaaaacttaaaatttaataaaacaaatcattgaaatgtaacaaacttaatctaaataagcttatatttcaggagaattttgaagtatgtaccacttagctttttcacgaatgacacgatcaagaggcttgataattccgctagtcaaaggacgacattgagaattaaaaactataagatagcgagagacagaaggtgcatcttcatttcgatcaagacgatcaaatcttgtttcacaccctataaagtacattgaacaaaaggttactgcctcatgtgcgacataaccttcggcaatagacccttcaggatgtgccttgtttcccacataattcttcaattttttcatgtacttttcaaaagaatacatcaacctcataaatacgagccctgcctcggggacctctacctcggcccctagcaggtgggggaaaccgagcatcctccatatcttttacatttaaagttctcgaacataattgcctgaagaaattacatagctgagtaacagcggctgcggtatcacgtggtggaaatttacggacaccaatcgaaagtactcactacataatgacatgacaatcgtgtgggatttttacccaataatgtttgactcatctggagaaactttgcactttaaatttgaacaaaaggcatcgggaaacttgattcttttaataaattgacaaaatagttgtcttttttcacgagtcaaaatataagaagcatgcggtttcattagccttccgttctcattttcatcaatccacaacgattccctaatacccatcttctttaaatcatgtcgtgcattggttgtatcctttcatttatcattatctaagatggtgtgtaacaccctaactattataggcgtattacgtgattttt

SEQ ID NO: 236096 - DNA, 612 bp, Cannabis indica
atcactgccaaaacctcttgatgatgacttttcatcaatgtgtttttataaaagctacaagcttgctctatggaaagactctgttgtggtgtttaagtattatgatcgaagattccatagacatgattatgattataataatacatcatcagcatgttcttctccaataccaagtattcaaatgtgggtaatgcagcatgaatcgtccttaaatgcatattcatggaccaagcatcttacatttcctcctcttgacaaaatatattatccaatagtattctggaccaatgacgatctcatcctctctagtgttcatgacagagtttggtcggtttcatcatacaatctttctacccaaaaaatcaggaggcttagagggattcctgagaccttacaacgcgttagttctttcgtttatgtgcagacactgcagagtttggtttcagttgaatcatttatttatatattaatttttggttatgagcaaattttggttgaattaaaaaattggagttttgattaaagaatattggagtttccatctttgcttcttgttatttaataagatgcagctatatcattctcttgtatttatgtggttttattccttaa

SEQ ID NO: 236097 - DNA, 699 bp, Cannabis indica
tactaattggaccctctgttttgttaaatgacaaaatggatcatgtaatttctaaaatagtacatataggaccctgaattgattttttgtcaaaataaaatttaattataatctgatctaaaagcaggggcggagctagaattaaagagtaggggggccaatatcgaacaacgcatacaataaagttttacattaagattttcagcgactgaaactttatgtatgtccattgaaaaaaatatgataattttttttagttttcaaatatattttattcaataaattagaaaatttacattaagtaatttaaatatagaatgagtgatgtttaaaatattagaaactcagtttaatagtaataatatttagttattaatgttaattaaaaaaatgtattaactataaactttgataggtcacatttatatacaatgtataatatttaattaactaaaataagagagtgcattatattttatatttaaaaaatattataatttttatgagatctacacttatatttatgtgtatatataatcatgtttgaatatgttaaagactccactcgcattatcaatcttatttgttcctataagagtgacctattgtatatagctcatatataacaaattgatgggcttttgagaaatgaggggggggccagggcccctgttagtaacactatagctccgcccctgt

SEQ ID NO: 236098 - DNA, 1228 bp, Cannabis indica
tttaaatgccatctttttaacttcccatccttgaatcaaatcatgctttttggagaaacaatttggatcattcatttcaaattgtaaggatttggccaaaatataaatggattcatcaaacccactctctttttacattacttcacaattttcaaaacctctgtcttcaaacttcaaacataagcccataattctaaaaaacttttaccttgttatcattcccaggggtgaatgcaagaatcttctgactacatgatccaatacttcttaaacctttatttagcacgttttctagacatggagccactaaacctcaaactattccaccctagcccgatgaggattttgacgttcaggttagctttgatcgcgtaattgactgagtacacaactcctgggaagatttccacaataatcttttattttttagtcatataccatgtaagtattcggatgcttgttgaatcctgctattttgtatctaggatagaaaggtatagttcaagctaggtttaggatatatgacacatgtgaatggcaaaatgatgcccatagagttacatttctaggataggttatgttgaaatttttacttgccaagggagtgctgatactgtttggacaattagggtatggaaattttaaccttataaacttttagcatgtacgtaggattctaaaattagggtttgaaccagcaagatgaactttcaagtgagtgttaaatccgtccatcttctatacgtctatttggagttgttaggacttcaaatggagttgatttctagaatttgcttaaaacttgttctagtaattttcccatggtttcccaatttgtcactttgagtctcctggtagggacaggcttctaggagtgatgtgtccggtggggacctcttcaagaaattttaggggagactttcatcgatgcccatattgtcatttggatgttaggtgtctaattgcttggtttctcttttcttttcatttttccaatgattgatttgaatgaggaatttcaccttgaggcagtgtatattgaagagaatccaacaatttctctcgtagaagaggtggctactgaagaagttccagtagaggctcctgccggggaacttcaacatgacattaccctggaggctaatctggaggctgctccatccgaggtagccgtaaaatctaagggaaaagggaaagccaagtctctacctcctgtgtgtgtgtgtgt

SEQ ID NO: 236099 - DNA, 630 bp, Cannabis indica
aacgggacaaaatcatatcctaatatatatatgtaatgtatattataatttactttttttttggagtatttccaagataataaaacgtttatgctagatcatctcatttgttcaaaatagattataccatgtggtcagagtttgaattgaagtatagaaaaaatcaatgcaagaagtgttatagtgagtggaaagtaaaactcagctaaatttagtatgagttccttttcaacaccaagcactattgcaacattgaactttagaggtcattttttcagctgaataataaaaaaaaaggcagctaaagtatgttttactagttttggattccgaaaattttggtaaggcagttattttataaaaatcgtagctataaaataccccaatttctatggcgtttattttttttgttgggctttaatttaaaattactggtagagcatttatgcggtcagttatttattaataactgacgtcataaggtcacacgataaatgacacgtatctcttatagcgtcagttattaccaaataaccaataatataggcatttaaaattatgaaaaccactactacaaaaatagattttctcgacgttttttaaatagtcgtttaaagtattcccgtcggt

SEQ ID NO: 236100 - DNA, 1871 bp, Cannabis indica
accacatagcacttgtgagttacaaggacttaacaagaaaagtaataacataataccactaattaatgcacaaatagtcaatcccatcaatttaaactcagatattcacaagtatataaacattcaataatatattaatatttgtctaatacaacaagtcgtatatgttaccttagaaggtaatcaatctcattgttgtctaataagataaccctcatccctaatccgacataaaaatatagtattgttgtctttataagacaaccctattaccttttctggaattcatatgtcattgtcgttacctaatgagataaccgacaagcaagaaacctaacaacggtttcaatttatagccataacttttctcacataacagtaatgatcgtgtcttataaacgataataattgtatcttataaatgataataatcgtatccgaacatgacatactatgtagtacaattgtacttttcttaccttttattgatgtcacttttagccaacgacagtgagttaaattaaaacattttaagaataattgaaataacaagtatgaataatattgttaacccaaaaactttttctggtgacatggacatcaatgtttgacacatggcatgaaggatgacgtcgtggagttgagtagacccgagtcatagcagtcaacctaggaggggaccctagccctacgcccaggttgactttgggatctttgggatggaagtttgaacttcaataacttgaatccaacccactatcttttagtattttgtaccatgaagacatggagcaacttaatccaatcctcgaaagctgaaattacatgaacctacaacccgaaaaccaatctgggcacctagggtttcacccggcacctaggttgacatcctcaaatagggtttcagtttttgggaccgtcttagtgaaaaatagtcaaaacttacattggcacatcaaatatatatataccacaaatatatttgaggcatcagaattagaatcgaaggaagttgacttttgagcacccagggccccgagcacccggccaacgcctaggttgacaatctgtcaatctgggcgccttccaagtatcaaatcagagatccgttttttgcatcttctttgtctttatcaaaaatagggaaataggtcctttcaaaggaaaacacaacaattactgggtacaaataacagggcccagcacccaggttaataccctggggctggctttgtgcccaggttgacattttatcaacatgggccatttaaaatggagtttttcggttctttcaagaatcttctttgttttcaaaaaatattacaattcaactatttttggggaccaagcagaatttccaaaggagaaaaaagaggacccaatgctcaggttgacacaaggggatgggcccaacacccaggttaacatattgtcaacctgagctgttttcgatcaagttcagcaaaaattgttctgggaatattttttcataattagaaataaagaagattaaagtgcacttgggtagaaaaccacaatcctgagtccctggaaacagggcccagtgcctaagttgatctagggctgggcctagcgcccaagttgacaatcaacctgggacattgctttcaattactcaaatgctgaaatcaatgcgaccattgaatctggaatggtcaaaaatgggtaggagacctcgtccacaagtttagaagccttggaagtatcaaaaatagaatccccagagctcgagagtaagtacccagtgcccaggttgacaaaaggcctagtgcgttgggttctgcttattcgaatttgatgttgtttctacgttccgtctagtttttcataattacaaagatatatgaatt

SEQ ID NO: 236101 - DNA, 1006 bp, Cannabis indica
ggtcctggttcggcgattcttgtgtaggttctaaattttggtccctggtctaggcctgggttcgtgtttgtttcttcgtctaggttctggtcctagttggagtccttgttctagacaccgactacttttctgttccaggccctgttaccagaatcccgagtccagatctggataactatcacgtgtctcggtctggttctggtttaagtccaggtcctttttctgagtttgggttcgggatcgagactagggtgcagttctaggtcccgacctttgttctatgtccctagtctggttccatgtttgggtctgagttcaggtttgggttcgggtcccgagtccatgtttgggttgggatccgggtccggctcccaattcgagtataggtctgatttggagtccgggtcctggtcctgttacgatcctggatttaggtctaatttcagctatgattccaagtccaagtcctagttccgattttggtcaacttctggtttcggttccaattttgggtcacacgatacgggttcgggtccacttttgggttaaggactaggttcaggtccgggtgtgggttctggtctttctcagggttcgggtccaaggctgggtcccaaatccaaacaccgacaacgggttttgtcaaagctgtgggtccagatccgaatcctaatctcgagtctggttccattttttgtcctgggtcacgagctcggtcctatgttcaagttccggtctgggtcggatactaggtcccggtcctagttctgtttcccaggtccatatcctgattttgggtccaggtcccagttattgtgtgggtttggctctcggtctaggttcgatttcaagtcctagtctcggttcgggtttaggtctctgccttggtttagatctgggctcgggtttgggtttaggtcttggtccttgtcatagtcgtagttctgttctaaatccatttgcgattctaatttcgagtttgcgttttagttcgggttggagttcg

SEQ ID NO: 236102 - DNA, 1037 bp, Cannabis indica
cgacaagacaaaaatgattattatattattaaattagtttataaatatagatcaaaatgaataacagacaggaaattcaaatcgtgtatggcttctcgcaatcgtatcattctcaagcaaggaaaccagtttagaatttgctcttctccgattgaattagggtttcgacgagcaagtccaatggcagaccaaggtaatcgataccgtcagatcagattcaatataccatttttttaatcgttcgtaaccttccagttcgactcaatcatgaacgctaataatctgctttattaattggatgccaaaatggctcaccatcaccaccctcagcttcagctaatcgacggcgaacatcacaccttcgaacggagacaaagtcctaagatagatgatcgaaacgacgaaggcgctgaaaaaaccctatgcttttagaattgtaaagtcagtattaaattactgtccgtgactaaagggaccactgaacttgtgaactgctatgcgtgttagaaaaggagtgggggaaatccctaaatttatttgcttttgttggaaacttgttttgccacttgtatggaggtgacaagctacattgtttttcctagatatatgttgcatgagttgggacgaaacacgatagggggattcgtgggaggtatcgatcctcccagatgttacttctttctcatgctttatccaaatatttctttaggttgatgcaaccctccaggagggtaccttcctcctagagctatcaatttcttaagagtaatttacagcgtaaattcttaagtttaactcttggttgtaaataaatacataagtttaatttttggcagcaataatacttatattataattctgaaactttcataggtacctagccgttaaatatctagtcattatacacgtgttattttcttattggtatatataaattaattttaaataaaaaataaaaatttaatgacatggaccaattaaggtcgatgtggcaatttaattgacactgacttaataactaggtacctacagaagtt

SEQ ID NO: 236103 - DNA, 1161 bp, Cannabis indica
gctgaaataaattagtaggatcataatcccacttattaccttattaacacataatataaatataaaccttaattatttatcataaggcttatcaggatattacaaccatcccctccttataaaaatttcttcctcaaaatttatttaaacaattcgggatattactcctatatttatgattctaactctcaaattgctgtttctatcttgttatttttttacagcactttttaactagtggaattgtctcatttcatagtatttcctttcgagtccaagaacccggacaagatgtttttttatgtaataaatttgtctgaagtttaacattgtcacaactcaaaatatggatcgagtctaatacatattttctcagcatggagacatcaaacacattatatactccagacaacgcaagagttaaggctagctgataggctacctagcctatttatctcattaaacaggtatctaatattactcttgtaccacacttattgaagtacctaactaatggcacatttaattatcacctttagacaaacattttgtgaaaggaagagattattctaaaatcatctaacctttatcaaatatacccataacatgtttctaatattccattcaccttctcatgttacccatctttcaagaataaaacgtcatactatttttgctttaatctccatggttcttgataaccttctttaattcttaacatcatagccaaagatatcaatcttagaatctcacaagattagattattccttcatataaattccatatccttatttactgtataaattatctatactgatagacaatatattaattaactcggtatctccagccgttactattcagtcgaaatcataagattccacaatacctaattcataattatgtatttctataccttctatgggatatcttaagttgatctactaacttaacttattaataagtaagtattcgtttatgatagatattcaattagagcattccttatttccacccactaatatgtacttatctcaataccttgaaaatttctgtttattaacacatcccttcttcttgataatctctagaacgactactgattctgcatcctaatatgaatctttctagcgtactttttcctcactcatacgctttcc

SEQ ID NO: 236104 - DNA, 1031 bp, Cannabis indica
cagcttggctgactgtactgagggatggatgtcctagattgctaaaaaaaactggaccagttcaaaaaaattatgcttggtttttttgtagccactgtatataatatttggaggaatagaattagatgtgtacatgataatttttcttttactgttatgaatgtctttaaggagataaaatatgttactaaatacaagttggatagtatacaaaaggaaaaattgaggcataccaagctaaggacaattgctcacttgattagttagttgtttctgttggtttgtgtttaggctggttgtggtagccattggtgtttgtatttggtggtttgattaataaaatctgttctttaataaatatatttttaaatgtactcattcttacttttataaaaataataagtacaaaataataccacatagtaaaggaacaaatctcatgtatctccaataaactacttaaagaaatattttacaaataacttatatatctactttttaaattaaatacattttctactataatttttcctttacgtccccaaaaagaaagcatttaatacaaatgtgtagactataatgtataatacatcgaaatccaaatagctatagatttagatttgtatacatagattaagaatggaatagaaaaaaaaaaaaaaaacatttaaatttgtagtatcactaattattggagctccaaaaattaatataaatggattgtgtccaaaaacagccaatccatttcatagaatatattatttggtaaaacttaatacataaaattaatacaaaatcactaatcttaatttatgacatttgaaaacactaatctgaatttatttattgtatttagatatttttatacatacctttcaacaaaatatatcatacatgtataaatttttttttcttcaatatcgcgagttatattgagttgagaaatttaataactaattaactatggtgtcgtttggtaatacttttgtttttaatttttaatcacaaaatgaaagtaaaatttttatttt

SEQ ID NO: 236105 - DNA, 765 bp, Cannabis indica
agatcctggtaaaataaattccaacatggacctcaggaggaggcattgtaggagcaccctactgtcttatacgctagatttcttcatcttgttcattaatcttggcttacattttagcaaacctatgttcccaattatgggcagcttgtggtcgattaacatccccccgaccgcgtgccctaccccttaggcctctgccttgaccatgaatattaaggggaaactgaactccctaacaaccactagatttgaccgaattaccttagcttctcgcgttttgcttggtgtccattctatttgaacagcctgcaaaaccatgagctaccctgtcagattgccatcaatattaaattctatataccatttacttgagaaaataaaacatgcgcctattcagatatcaggctactgacatgcttcctataaagcttttcttatcacatactaataaagcaaattactaaagcataaaaaagcttactgaaccatgagtcgagcataactatgatgatgattgaacatatcgtgacgatcttcagaagacagcctggcagctctgatatcaaattgtaacaccctagtaatctaggcgtgttattatgttcttaatacttactgtgcatttcgttaataatcagtaggtttattgaaaagtgtgatttatttaaatttttcataataacttggatatacaaatactttacgtaaacccggattcctttttaaaattacaataattatacaaagtacttaattacaaaagtt

SEQ ID NO: 236106 - DNA, 1683 bp, Cannabis indica
ccataaggttagagcatctctttgtacgatctctctagaaatctaagctctttccttagtcaattctcttgtaattctcgtgagaaatacaaactcaaagtagacgtagttctattaccatcgcgacatgagaagttaactattataaattgtgtgtctctctacattacttacttaactcaatattcatctcgctaatctagcgagctgatattagccatttttcagtatcaatatttttgtggtttcattgagagccacaactcgagttccaagttcttatttaagttctttgctaggagctttattctaaaaggaattcataaattcaagcaagcaataataaatgaatatgcaaagtaatactaccactcttggtagtcatgccactactcagtgaggagtaggtactgagattccccatagggaagcaaactacgagcgagcatccaaaaggactcaaactcaagaatgtgggtctatgggtcctccacctgatgtggagcgatcacctgttaggagagagtgtctgaaaggacttagacttagcattgtagacctacttggggttgtagtatgttcagagggttgggttgtttgcccactaaagcagtaccccaccacacacagctgataggatcaacagcaaacatgctcgaaataattcaaacaatgtgggaaaccaatctcttccgcgagattctcttcacatgtttaatgactctagaccaccccgcgaccctgtaaaggaaaagggacctacaatcactcttggggaagggactcagttgctctaccatgagtaaagagtgtcagattcagaaggcgaagaccaacgaactactctacactcaaaaaaattttcatgatgaatggggtgcttggtgtaggtacttctcatgggtgcatggagatgtgtttaacttaagtaatcaattcaattctctccacacatgtcactctaaggaagactatttcaaaggaaatattcagtatagtactacgagaaaccactcacgaagcaaacgctcgatagacaactctgtcgttgtacgagataaattcctatagttaccaataaggccacacgaccaggttgcaaccatataaggcccaggtcgatcaacgtctttgatcgacttggaagaagaaagaacctacgaagtgacattagccaggaatgacaaattgatacacacatcaccactcgtgatgtctgtagggccaaattcgataccttttgttgccttggtaagaagtattacagccctaaaacaaactgagtttgagctagaacaagagagacgttcacctctctcagatcggatcaaggctttggagatcccctctaaataattacctataacgattcttagtggcaacaacgaaaccggcacgagcacgacttgacacaaagaaatatgaatttgggcacgaaacgatacagcacgatgctataaattggcatagcacaaaaaaagtgggcttaagcatgacatgatactataagctcgaaggcacaacacataagcacgaataaaatagtccaaaaatatgacacgttagaaatttctataacaattatacatatgtatttattaataaatatttatattctaatcattctatttaattttttatatgattatgtgtaatgtattgttgaaaatttatataaaaata

SEQ ID NO: 236107 - DNA, 935 bp, Cannabis indica
atctctatattctctattttatgcgtattattttttttttaagttttgtaacattatttaagctatgtttttgtcctttgtattatttttcatagagttgtaatcttgttaatttgataattctattggagcacaataatttccaatacattattctaaattgttaataaaacagctcgcacattggctaaatatgcttatcaactactgttagtaaagtttggtggtctaactatatcctctttgtattaagtctctttttttagatgatgtaattaatgaatgagtaagcttttgtgtcccttccttttcttagaggtttttctctaacgaagcgtaatttcacttgagaccgtttcaaataaataataaattacaattcactaatctcatgaacaccctggcataatgttgatttaaacaagaataaaagatcgaaacatttaagcaaacttatttagacacaaattcataccccaacagtgaggtcatgaggtaataggtgtaaaacacaattattataaatactaaattaaactaaaagtaaactaaaactttgtatcacaaatagagacaaatcatgtctgaattcccatcatcgagagtccttctttccaacatacccaataccttagaacctcttctccttagacccttaagcttccacccaaacccaccaagcctgagcccaggcgctcatttcttcccaactcccaccctattagaaaatgatatagctactggtaattattttgtccaagtcaccaaatgatgttgtagcactgaattgatccctattatgtgaactcttattttacagcttttaattgtaatcattaggcaatattaataatttgtccttctctcttcttccaattagtgttgtaaaagtatactcctttattgttggtttctctctctcattagtgagatat

SEQ ID NO: 236108 - DNA, 994 bp, Cannabis indica
ttcagcttttctttgatttggtttcaaaaaccttaactaaagactaaagaggctgcttggaaatttggattgactaattggttgcagtactaagtaaatagatagaataatcatatggaattaaggtacaaatgtattcacttaagagcccaatttagtctataatggtttattgtattggaaattcaaagaagcttaatttgctacttttttctactgcgcatttgcatgcttttgggtaaaattacatataaatatgtaaagtcatatttctgattctcagtccataactaaggtagtcatgttgattggaaatatgtcatgttggttgggaccttaggtacaaatgcttttctactatttttcttaacattcctaccatttttgaaatctatgaaccatttttccattctctgttacattctgcaggacgatgagaattttctgggataatcgagttagccccaacattttgtactccttgcaacacctaagaaatgactcatcaactgttaggattaaactcacttaacctgtcaagtcaatagatctatctatatgctcattagatgaatctgaagaaagttgttgttagttatagcagttggctttaataccaccttaaaggggaccccaccaacaactataaataggtgttcttctattctcaaagagagatttgagttctgatccctaatctccaagctcatattttagttttagattcaagtttaaagagagaggttccaagatcatagtgagtgtgtgtggagggatgtaataggagtatcattcttgaagtgatttccctcaatacgagatatttctttgtattacttcccaatgttgagttgtaattttgggctcattcaattgtgtactactgactattcctattcaataaaatctatcattcattctttgtctatttcaattaagtttaagttttgattttggaattagtattagttttgtttgtgcattcttgaatatt

SEQ ID NO: 236109 - DNA, 1046 bp, Cannabis indica
gattttctttgatatctccaccaaggttgttgctttgatgttccagctgagcaacttcttcatctgttcgagcagatcttgtgaaaaagagcacgaaaagaaaagatgttcggctgtttcatcagcttgcaaacagagaagacaagctgcattgtcaataatattgtgcatgtacagcctatctttggttttcaatctgtccaatattgctaaccaaagaatgaagttgtgtttaggaacatttgttctgcaccaaactaggtttctccaattcttcttctttaattgaaaccggttgcagcaggttgtatccacctgaaattgaatatttctcggctgtgaaattgtttaggctcatgatgcttttcactttatcccttgcttctacaatctttttccaataccagctgctagttgggggagctttgtactcccaccaatctccttgcttgatataaacattgtgcacccatttaatccatagattgccttttttagttgcaattgaccatacatgcttgaaaagggctgcttcattccatatggctgtgtttttgaatcctagtccaccaacagatttggacttgcataatgaatcccaagctacatttccagctctatcagccactccttggctccataggaagttcctgtagattttttcaatttcagcaatgattcttttgggaagaatgagaagttgacaccaatatgtgtgaattgtgagcaacacatgattgatgagaaccactctacccgcaaaagaaatattcctggaactccacactttgatctttgctatcattttctacactaagccattacattcttcagttgagattctcttggcacacatgggtaccccaagttatctaaaaggtacattttgcctactgaacccagacatattcaacaccctgtgaatttcttcttcctgcatgccacaacaatacacagcagttttttgaatgttcaggaaaagccctaaagtaagtgagaaggtcttcaatccttgcaacatgaggtatatgttgggttttgtgccc

SEQ ID NO: 236110 - DNA, 848 bp, Cannabis indica
ataaattttaattttgattttttgctataattttaaaatataatttatttttatttagtagatatattttctaagaatatgaattagaagaaaaaaaattacaaacataattaaaaatatatattttatataaattaaaattattaaaatagaatgtattaataaatttttagaatgcaaataaaactctcaaataaaaagggaaaataaagaaaaccctaggttgggagtgggagggaagaaagacatatgagtaaatataatataattttcaaaaatgttggtcgattgtgagtagtgatataattactttggttcaggatttctttcaaacggggcagctttgtggacgtttaaataacactaatttagtgttaattcctaagaagaaacaaccaatggacatgggagacttaagacctattgccctttgtaacgttctttataagattgtttcaaaggtcattgctaatcggctcaaagttgttatgccttcaattatatcggagactcaaagtgttttctccaaggtcatttaatatcggataatattatgatttcttatgagataatgcattatttgaagaggaagagaagaggtcgtaatggtgttatggcacttaagcttgacataagcaaggcttacgaccgacttgaatggggatatcttcgagctatgcttgaaagaatgggctttgatggtagatggattaatttgattatgcattgtgtgagcactgtctcgtacacgatctctcatgggggaaaggagttgggccctattgttgcacgaagggggttgcgccagggtgatcatttatcactatatttgtttattctctgtgctg

SEQ ID NO: 236111 - DNA, 923 bp, Cannabis indica
ggggtcttccaccgcttgcccagtgatgatgagacgcccaaccttaactatggtggttttggagcttggagccagacctactttatgtccggagccatgcttccacttcacgactattttataaattttctagtttttattggccttgcaccttatcaacttattcctgaagcataccgcatgcttacaggcttgtacattttctacatagccagaggctgggcttcaccaagcccggccgagattttatacttttatgaatttataactgtccccaagaagggggataggcgtaaagacggttttttcacactccgggcccatcctgctaatgagggtctgattccttttaatttccaaaagaatgtaaaagagttttgtcatcggtttttcttctcttctagcttccaagctgtggaacgcccagaattactcacggagtgggttagggttcctctgatgcaccgcaccatccctatccaactcttcctccagcacgccaaggtcttctccacatatgacaaggacagacttaatgtgggggacctagtcacaactgcaaactgtaggaggactagcttatcacagagagccaatcgatggatgatttcaacttatccaaggttctttgtcctaatattcgcaccccagatgctaaaaaggcactccgagcggacattattgcctcggcagaggattggtaccagaaatacctctttaggagggagcaagagttggcttatatcaaggctcaggccgctaccgggagggcccttcgggtagaagctggtaaagagggagtgtcttcccagcctaagctaccgttcccggctcccaacactagagcttgtggcgccaacacctccggatccagtaagtctcccttagttgttcatcatgtcccttctgctcaagattattct

SEQ ID NO: 236112 - DNA, 846 bp, Cannabis indica
caatatataatagcacataatttcataagttataagaaatttttcttaccaatgtactatgaaacataaaggaacgtactcggtacgtgatattttgtacactagttttactatacatcatgcataaacaataaatgtacacggtacatgatataatatactcaattaccatcgcacaaatacatagaagatttgaaggaatgaaaagatgaaaataacctcactccgacaacatggacccactgtctgcagcccttttataccgttaactaccacaaacagtaacttcgttgtacctttttgtaccttaactaccacaaacggtaacttgattgtagcttttcgtacatttttatttttaattaaaaatcaaattgacaaccggtaagaaacctacaacaaccggttgtcaaataaataaaaaacaattacaaaaaataattaaaactttaatagaatgtgggaccctccattccgtacaacggattacattctgtgatttcaaatattaggcataaaatcggctgcctatgtatatattcttgcaaaaaaaataatattagctaattagtttcatacaagtcgttatataaaatcatcaattaatgaataagaattgtgaagaaccttaattcttgataaaaaaaattatgaagaatcctaaaaaagcttagtgatgctagactttttaaaataaactgcgctcgtgttgaatgtttatttttggaaagggacgtgttgattcatatatttgacttaataacaataataatataaaatatgagttaatagttaatacttttctagtcaaacaaaaaaccacacgcaaagcaattaaccataaaa

SEQ ID NO: 236113 - DNA, 2179 bp, Cannabis indica
ttcatagatggattgcactttggtaatcacaatgtatgaacagattttttagatttgaatccctatttctgatgtcaagccttttaaccagatggcttctttaacagcttctgttgcaaccctgtactctgcttatgtggaggagaaggctacaatttttttgtaaactttccaactaacacagcctccaaatacagtaaacacaaaaccagatagagatcttctagtgtccaaattcccaacatagtctaaatcaacaaaaccagtaacattatcatcataattgctatcttttccaaatactaggccagtcatgagtgaacctttgatgtatctaaggatccattttaatcccttccagtgttcttcaccaggaacagtgatgaatctgctgacaacactcatgttgtgtgccagatcaagtctggtacataactggtacataccatgacatacatgaggctgccaactccatttgcatagggtatactttccatgagcttcctctcagaatctgtctttggtgactgattctgaggcagtttgaaatgctaagcaaggggagtggtaacaggtttggcatctttcatgccaagtttgtcaagtgccttcttgaggtaattttcttgtgataggttgatagtgtgagctttgtttctctttatgcctaagattttattggctagccccaagtctttcattttaaattcaacactcagttgagacttgagattgtcaatttggttcctttctttcccaactattaggatgtcatcaatatacaatagtagataaatgccattttgaaagtagacacatgtattataattgctcttggtgaaaacaattttcatcataaaatcatcaaatttaaggttccattgtctaggagcctgttttaatccataaagtgatttgtttagaaggcatctccatgtagattttctcctccaaattgccatgaaggaatgcagttctgacatccatttgatccacctcaagatcaaatttcccagccatggatatgataactctgatggttgttcatttgactaatggagagaatatatcattgtaatcaatgccttcatgtttagtaaatcccttggcaacaagtcttgctttgtacattagaccctcactccctggtaatccttctttttgtttgaatagccatttgaacttgattactttctagttttctggtttgttaaccactgtccaggtcttgttctttttaagtgatagtttctcttccttaatagcctgcagccaagcttcactattcttctcagtaattgcatctgtgtgactaaatggctcagcactatctatgccttcagcaacactaagagcataggtagtgaattcagcataaccatatttattaggagcttttgtggctcttctttctctatctctagctagttggtaatttctgaggctagtttgagtgtcacttacagtgctatcttcagtgaggacttcattaatctttattagtctagatgaggttgcgtccacctcaatttggtccttgttgccgttgttttctgatgcagtaatcataacatccctttcatacaaatttctttctcattgaaaaccacatccctactaatgatgcatttcttgtgccctaattctaagcattttagcttgtagcccttcacaccatcagggtagcctaggaacatgcattttaggactctgggttgaagtttatcctacctctagtgagcacaggcagtgtaaccaaataccgttaggtgatctagcttaggtacatgaactgtccaaacttcttgtggtgttttaaacttcaatgggatagatggacacatgttcactaagtagcaagctgtcttaacagcttctccccaaaagggtctaaaccagcaccctttagcatacaccttactctttcaataaaagttctattcatcctttcagcaagaccattttgcatagtttaaaatttaatggcataccaaatcacgacaatcgacttaaggaaggtattccagtaatgctccttagaaatcaaacagaaggcttatgcaatggcacaagattgattgttacacatcttgggaaatggtccattagagctgacattatttctggaacaaatatcggtgaaaacgtcacaatcctaagaattatcatgtctcccaac

SEQ ID NO: 236114 - DNA, 653 bp, Cannabis indica
tttctcaagaaaaaatgaatcaccaaattatcggatgaaaaacctattttaagtggtgtttggttggagataataaaatggaatggaatagaaaggaaataatttttatttcattcatttatttagttgaatattaatagaataatctttctaccattagtaaaatgacaattccgttttgaaattaaagaaaatatcatttcattgcatggtaacaaaaaatttaatatttttttttatatattttaaattttatttcttttcatttttatttatattcttatattttcattcaatttaaccaaaagttactctattttttatggctatctacagagtccgcaagcacaaaaaacccatcaatggctataaaaattcaatctttggatggctaaaataaaaactatagtaggtgaaccaatattgttgtttatgaaagatatgttgaaatataatacttcagtacatgaaaaataataattaaaaaaaaattgataagtcatgtctttctttctcaagtcccaacacatttgattatattataatgaaaacttttcttgcagcctgaaatgagtggccaatgaatgctatgaagcctatcttgctcttcctattttttgtggttgttctaagaaagagtttttttttttttt
